United States Patent Application Publication US 2011/0183924 A1 - sequence listing, part 40

SEQ ID NO: 95172 - DNA, 402 bp, Homo sapiens
actaatgtgtactaaacacttagaacagcgcctggtgtagtaagagtggatctgaagtggcaaacagaaaatattcagcatggaagtaagtcacagagacaagattggctgagataaacagaatggaagaggggaaggagtttaaaaagatgccaagaattcttgaccagaatttacaagaatgtgcaaataacccttactgattgccttctcagtgttcaactctgttctaggtgctagaaatacaatgttgaactaggtcacaatagttagaaaaattgtatttttatggtggatatggcagaaagagataagagaaaagaatggaaggcaagacatatcaggaggtggtaaacgcaatgaaaggacagaagtatgagcagatgactgtatcagacagtg

SEQ ID NO: 95173 - DNA, 361 bp, Homo sapiens
tatttgtggaaggaacgatgactgccttgccttctgtgtcctgtttattagaattcaaacatttgcgccatttaatcaagtctttttcacttaccaatggcgtgtatatcccagcctgcttgaagctcctctgagcagcataataaaggttggctgcgtgcttcctctgtctgcaggtgcactgggcgggatgaggctgacctgccctggcctcagggggctcacagccgggtgcatcaagttctcacacttcgtggtctcagggaccccttcatgctcttcaaaattatgaggaccctaaagagcttttcttttatgtaggctatatatttattaatattgaccgtattagaaatttaaa

SEQ ID NO: 95174 - DNA, 473 bp, Homo sapiens
taaatagtcactttggccaactccacattttacagactgggaaacaaactagagaggttaagtgacttgccttaaatccacagccaattagtgacaatactgagactagaacacaggctaaaggtactttttaaagagagtgtttatcacttattaaaacagttgcttttgacaataatagtgataggataattcatcattaattcaacacttattgactttgttatacacaaaatatggtttaagcattggcagtgaggtaaatacgaagacaacatcttttgtggaaaggatcttaaatggagagattttaaaataaagaaaatgtggtatattcgtagatatagatatagtgacaaggatgacagacatgacttgtaagaggcgttgataggaagaaaggctgatggcagcagatgcaggactagtcccatctttgggtgctagggttgccatttcgttaacggttccta

SEQ ID NO: 95175 - DNA, 315 bp, Homo sapiens
tttatgtaatattctaaattctctgtcatcatttcaacaatattcacagcatcttcacccgagatagattctttcaaccaaaaaatatctccaaatatgttaaattttttcgggagttagaaaagagaattataaactgagatgcacaagggcaagccacatatgcaactgaagaggggagggtaaagggaagcttttatgggcagaatgagaggttcacataaggtgcttgaaaacagagctcatgggtttcagggactcagagatggcataggttcatgggtgaaaatgccgttacgggtcagggatgcggtt

SEQ ID NO: 95176 - DNA, 331 bp, Homo sapiens
ccccgagaaagtcccttcccctctcaacctgagtggaccaggtgatctgcaaggcccccagagctgagaccctacagctcagatcaccaaagccaacagcctctgggatcccagggccacgtcgggtaccacacgggcacggctctcgcagcaaccccgtgtggtaggcactgtcatcaccaccatttcgcagatgaggaaacagcccagaaaggcaaagcgactcacccagtcacacagctggcaggtgaggagctgacccagagtccacccatcccttataccacgctgggatacctcatgaccaagtggaccctgccacacggccctg

SEQ ID NO: 95177 - DNA, 273 bp, Homo sapiens
attgcactccagcctgggcgacaagagcaaaaaactccatctcaaaaaaagaaaaacaatccaaattggcggggaagaagtaaagctgtcttgatgtcttcccttattagagagaaatatttggtagtttgcagtctgttctacctcaggagagactgcagtaaaactgatgtgaacatctcagaattcaactgttttgtaaataccaccaccccttccactttccttcagcatcccagttaccactggaatattttatagcatatttatttt

SEQ ID NO: 95178 - DNA, 1297 bp, Homo sapiens
aggccggggaggggccctgatccaaggcatcactgaatactaatttatttagcaggctagactgaggctttggagaggaaagaagtcctcagtaagcttcagtggagactcttagggcttgattattgtgtcaggaatcaaattaatctcctaagcatcccttatggccttggccttgcaaagccagcctctgccatgctcgggggaagggatgcagcaggcttcctgggcagaaggatccagctcttggcctcctttctctgctcctccctctactgcagggacctgcccctcctccatttcctccacctggaaattaatgagcttaggtcttgccccatccgctgcagcttggtggttaatacagagctggaaatgggatgagactgtggcagcgcagtacgaggggggtctctaggaccagctgctgctcagggtctagtgatgggaggaaggcctgatttgggaagcaggttcttcaggatgaaaagcttaaccctttccattccctgacagcctctttcaaaacagtctttcctcagacccccagttgcacacattctgtttttccttctgttcacatttttaaaggaacacatgtctcccttgggtccatgtaggttattgtgcctctcccttcctctgcagctcctggatctctgcctgaaactgcaataacagctacagggagggcgtgaggtgctccttagagccatgaccacgctttcaactccgatagagcttgtgagaccgctgggagctggctccttcttgtccacatagcccaacgacttccttaagcttgtcaggtgctctcagctctacagcaaagtgtgacaaacagctccccctctcccttcctaccgcctgccctcctccccaaacctcaagcagaacacagtatatccgcagtccaggccctgaggcagtctgccagtctctggatgccaaattattatttttttaagggcaaaccaaaaaactcagctcagaacaaaaacacagtcacggaggaaggtgttgacccacatacaatgagtcctgagcccagagaaaaatctgcacacacaagcactccgcaatgcgctcccaggcgaccccctccccacgcacaccgcatctgtgctgcacagatctgcttctgtcacagaatcagcttctgtttctctccctgagtctctttgcatctctaagcccctgtctgtcacaggctgcacacctccccaccccacgggctccggtgcgggacaggcagccggagggagctccagacccctcccctcgcgcccgcggccgc

SEQ ID NO: 95179 - DNA, 677 bp, Homo sapiens
aggccggggaggggccctgatccaaggcatcactgaatactaatttatttagcaggctagactgaggctttggagaggaaagaagtcctcagtaagcttcagtggagactcttagggcttgattattgtgtcaggaatcaaattaatctcctaagcatcccttatggccttggccttgcaaagccagcctctgccatgctcgggggaagggatgcagcaggcttcctgggcagaaggatccagctcttggcctcctttctctgctcctccctctactgcagggacctgcccctcctccatttcctccacctggaaattaatgagcttaggtcttgccccatccgctgcagcttggtggttaatacagagctggaaatgggatgagactgtggcagcgcagtacgaggggggtctctaggaccagctgctgctcagggtctagtgatgggaggaaggcctgatttgggaagcaggttcttcaggatgaaaagcttaaccctttccattccctgacagcctctttcaaaacagtctttcctcagacccccagttgcacacattctgtttttccttctgttcacatttttaaaggaacacatgtctcccttgggtccatgtaggttattgtgcctctcccttcctctgcagctcctggagaaggtccaggtatgccgggg

SEQ ID NO: 95180 - DNA, 413 bp, Homo sapiens
attacaggcatgtgccaccacaccaggctaattttgtatttttagtagagacggggtttcaccatgttggtcaggctggtttcaaactcccgaactcaggtgatccacccgcctcgtcctcccaaagtgctgggattataggcatgaaccactgcgtctggcccatatttgggatttttaaacaggtaggtgatgggatcagacttgtagtcactttgtttggctacagtgtgaagaaggagttgaaggagagactgagaatagggagaccagacaggagggctgttgtaattgtctaaacgtacattgatgagaacctaaattggaaacagatgtgagatctgttaggtcctggtggggatagcacatagcacattatttttgacaatttgcttgtctgtcattggactata

SEQ ID NO: 95181 - DNA, 889 bp, Homo sapiens
  misc_feature (837)..(837): n is a, c, g, or t
taggattccccccccaaccagaaaccaaacttaaaaactaggaacttccagtccagtctgtatccctagatgtaagattcttacctggataaattgataatgctgcgaaacaaagtgacctagaaatccagctaatcttatcagtgctcgtttttaattgagaaaatctaattactcagataattgtggagcgtgttgcatactcttaattactgtaaaaacaaaaaaaaaaagacaaatttatgctgctatataggcctcacgccctataaaactggatatacttttttatgacccatttagcttcattcattttatcagtgcatagaatgcagtatgttttccttatttcatactattttgttttactttttgtaaccataaaacatcagctttcatgcacaagcatatttttggttggatgagtttgtttaattaattaagcatttgagaacatcagtggtttagttttgaggtgtcacaaatagaaaaacttagggaaaatttctcattgtattggaaacaatttattctgcattaataagttgatataatttggctctgtgtcccctacccaagtctcatctcaaattgtaatccccacgtgtagagggagggtcctggtgggaggtgattggatcagggaggcggttgtccccatgctcttcttgtgatagtgtgtgaatgctcatgtgatctgatggtttaaaagtatttgacagccttccccctgttattttatttaaataaaggtaatcaggaaggcctttcttcagagaagtttggtttctttgctgcaagaggaatgaggctctgtaaccttatctaagaacttgngaagccgtcagccaagtcgccacatttctcttgcaaaatgtcaatagcttat

SEQ ID NO: 95182 - DNA, 450 bp, Homo sapiens
ctaacttagcactaatcacactgcatcagatgacacaatatatatgaaagatctgggtcagtagtctcatttcataaataacaaagcatgtataattgttcttatttttgagatgctgaggtgttataatcatgtacacccccaaagacatgtataagtatgtcgattgaaggtttttgttttaaatggactaatttacctctgaattgactatcttctgattctgaaaattgaattcatctcataggtaatgtagatgttgcccagacttctaaaatgtggctattttgtatagtccacatctgattcatacattaaaaaaaaaaaattcatgacctactttgctttcagaaattcttcctctgacatgccagaaacaccccaccccagggcctgtgccctcactgtcccctcagcctggcagcctggaactctcttggcccagatggt

SEQ ID NO: 95183 - DNA, 420 bp, Homo sapiens
gttgtgggtgcctgtaatcccaggtactcaggaggctgaggcatgagaattgcttgaacccgggaagtggaggttgcagtgagccgagaacgcaccactgcacttcagcctgggcaacagagcgagattttgtctcaaaataaataagtaaataaataaataaataaataaataagtgaaatgaaaggatttagaaaattagaaatactctatggaaatagtaatgggtggtggtgaaagactggttctcattaaatacctcttctatgaaagaggtgttttcatgaaacatggttttcagtttttgaagataattttggttgcatccaagggcaagttatagtttgtgggcctaatagtagtatgatggaaatttaaggactctggctcatgtccttgaacatttatcattgataaagg

SEQ ID NO: 95184 - DNA, 380 bp, Homo sapiens
acagccggccggccaatggccactgccgtgctaagtgggagaagaagggtctggaagcttcaggagaaaacgaaaccttccatctaagtaaggacccacaagaggagttgagctggtgagggaaggagactgaggaagattgagtaatctagattctactgttttctatgctttatttatagtttaatttgtaattattttgaggagtgaatacaggcttatggtatcaaattcaaaaggtacgaaggatccagagtgagacagctgttttcttctcaccctgctgtgaagccacccaggtgcactctgttcccctctgaggcccctccttgccattcctgccacctgaccatgggacttaccacagtctccccagatgc

SEQ ID NO: 95185 - DNA, 219 bp, Homo sapiens
tagctcctagactctgctaagatctggtacagtgcatggtatatggtagctgatcaatatctgttgaatgacataaagtgtgcttctccaaacactgtttcccccaggaaagggggccagagtgaagcagatttaggagctgtgtatgttcattatgcacatttatttgaccatctctcccacaaccctctccctccctccctcctttctctctccact

SEQ ID NO: 95186 - DNA, 705 bp, Homo sapiens
  misc_feature (64)..(64): n is a, c, g, or t
ccctctaatgagatagatttttattgacacaggacaaacgaaaacaacgaaacgaggtgagtgnagtactcgctaccttatgaatgaaaaagcacagtgcagttcattcatacaacggaagactatttaccaccgcgtccggccaaacgttctgatgaaaacgctaagtccaccaaagctaaggacaggagttacagcttccatgaattttaaaacaagacccacagatttgaggaagcaattcctctcttgaaggtgaaaagtcagaaaacagaatgatgaaatcaataggatccaaccggcctgtggaactattctctgcttatgaactatcaactttaatttcatttccagatggcatggtctcagcagttatacggtgtttacagatgttctaaatcaagggaatttgtatcagtctattcgaataaaataaaatatttgagttcttaatttcctttaattaggataacctttttcttaaagtgaagagaatggtttgattacatagtttccgtcggtaaagataggctgtattttctagcaatgacgaatttgttatataggatgatctcgttcttggaacattcttgaatctagtgtctctgaggcaggtgtgtacaacaagaagtgaatcacacagaaatcaatgatgaaagcattagaagacaattgagattgtcagaagtgcaaactattgctgag

SEQ ID NO: 95187 - DNA, 520 bp, Homo sapiens
caaaacaaaacaaaacaaaacaaaaaaagaaagaaagaaaagaaaagaacacagagacagggccaggagtggtggcttatgcttgtaatcctagaactttgagaggtcaaagtgagaggatcacttgagacaaagagatcaaggctgcagtgagatatgattgtgccactgcactccagcctgtgtaacagaaaaagaccctgtctcgaaacaaacaaacaaacaaacaaacaaacaaaaaaaaacagagacaaagacagagacacatagagataataccacaggatgtcaacaattgtgagacatcaccagaagctagaagaaaggcatgaaccaaattctccattagagccctcagaaggaacccaccctgcctacatcttgttttgggcttgtagcctccagaactttaaaagaacaaacatctgccttttacagccatctattttgtggtactttgttccagtagctatagctaactaacatactaatagaggaaaaaatactggattattctaag

SEQ ID NO: 95188 - DNA, 201 bp, Homo sapiens
ttacaggataacttcctgctatgagtcagctaaacattcctgaatccaaccattctacccctggcaaactccagtatctgatgctctatcacatgtgcaaacaaagtcactcacatgggtttcaacaagtacactgcttagtgaaatatgggtctttaaaaacatactggaatttgaaaaaataaaccacacactgatggt

SEQ ID NO: 95189 - DNA, 176 bp, Homo sapiens
actaccagaacaaaataccacagactgcgtggctcatacaacagaagttactttttcacagttctggagtctgggaagtccaaggtcaaagtgccagcagcttcagttcctggtaaggactctcttcgtgagaagacggctgccttctcactgtgtgctcatggggactgcccttg

SEQ ID NO: 95190 - DNA, 687 bp, Homo sapiens
cgcgaacggcgagatacgattgacgacttgcatggcacacaaaatctgcggtcgttccagacaactagaccagtgcgatgggcggagccaacgaggaggcacaatttacatccttggccgtccctactcggatttgctgaaggagtcacgtcggtcgttaaggttaagctttgtagagaacagcggcgtttgtttaacgtccggggatgctgaactcgaaatccccgttctgagccggctacctaaacaaccttcccgaccacctctcctgacctcggtgcttgggaccagggaaaagcagatcttgccacagacttgtcttggcccacactctgccctatcgtcatggcctgctcccacaggtcataacttccgttcaaatcagtacccccacatttcccactgcaagggtaaatttgaaagtttctcaggtgactccttggatgtagcagtactgagtcctctaaccggaaagaaggaactgatgtccaccctcactttccaggggcctccaggagcccctagacacttctgtggtctactgtagctaccaaaaatgtagctggttataacatggggagagccagagtcggaggacctgacttccaattctgacttggatactaatatcacatcattgtacccatttcaaactccccctctgtaaaatggaaaattggactagat

SEQ ID NO: 95191 - DNA, 193 bp, Homo sapiens
cacagacatacacacacatatatacaaccagtgagatggcttttggcttcaagaaattgatgacttagctctggaactctccgctttcaaagaacactgagattagctagatgcccagttgccaactccagcaggaatcgtaactccaagtgaagtgactacaccagagaaagaaactcttcattgaactccc

SEQ ID NO: 95192 - DNA, 328 bp, Homo sapiens
cttgaacctaggaggtggaggttgcagtgagctgagatcgtgccattgcactccaggctgggtgacaagagtgaaactccgtcaaaagaaagaaagaaagaaaaaagttgaactagatttggtctgatgcagttacagatttacaaactgtgcccccaccctcctgcagacaccttccactcctcattcttgagggattagggatggaggtcatgcttctgtatcgacttcatgctgaccagggtcactgagtcccctaaagtgagaggaatgaaactcttgggcttctgagttcaaatgagttctggggtcacctggagtagcttga

SEQ ID NO: 95193 - DNA, 302 bp, Homo sapiens
agcgcgtcctccgccagccctcgcgtctgctgcccccgccatccagttggtgcggtccatggcgagcgcatcatggcgattgaaggtggagagagaacctgtggagtacatgaacttatctgtattagaaaagtatctccagaggcagttggatttttgtcagctgttggggtgtttattatcttgatgctgctcctttttctctatattaataagaagttctgttttgaaaatgttggcgggtttccagatcttggttcagaatacagtacaaggaagaattcacaagataaaatttgtaa

SEQ ID NO: 95194 - DNA, 384 bp, Homo sapiens
acggggtttaaccatgttagccaggatggtcttgatctcttgaccttgtgatccgcccgcctcggcctcccaaagtgctgggattacaggcatgagtcatcgcgcccagcccagaatggctaatttctgaatgttatttggcattgtacttgatcataaataaatgtgaattggaaaaaaaaaaaaaaaccagcagcatcatctccctccctctcttgcatagcacagacccaatctatcagccaattctgcttgctctacctttaagatatatccagaactggaccacatcttgctgtcccctaggcccaaaccatcagcatctctcacctggatttctgcaactgcctccacttcaggaattcctgatactgcccctgctcc

SEQ ID NO: 95195 - DNA, 503 bp, Homo sapiens
aattgggctattaaatatgtgatatgaattaatcaagcagagaaaaagttactagtgacagggaaaaggagaaaatatgtattcaatattatgttgtaaacaatttataaatatgcttcacctatgagtttcttctcagtaccttagaaactataacaccatggaaaattttggatagtttagggaagtgcatcatttggtaatgtgaaaaataagatggtcgtgataaaggaacttgggaaaaaagaaatggcatgaattttgagaacacgtactttctgagaattttcatgtttagaaaagagcaagctaaaaatctggaagcgtgtttgttcacaggcaattttcaattggtctcatgcatttctgtgcatcttgcaaatagaaaggcactagtttcacatttattacaggttttcctttttaaagatctttatatagtggatagccctggaagatcaagatattgtttatttatggatgagagaacagatttgtttatt

SEQ ID NO: 95196 - DNA, 352 bp, Homo sapiens
gaatgttctttgacaagagtaaagttttggggagctggcaggctctgcttggtgagtgatggcagtgggtaaaactagtcttagagtcatgtcagggtgttttagtagccatgagatataggttataggcagtttccgcagccaggcttgcagacaattacatttttggagcaatgttttgtgccctgagtgcattcccctaggcctcttgagtctgtttaagtcagatgtgacaagaatgatccaatttttatgatcaactcccacagcctcaatacatactggctgaataataatgatgaatgagaagaaaggatgagtgaagccaagtgctcaggagaggagcttagag

SEQ ID NO: 95197 - DNA, 442 bp, Homo sapiens
tgggattacaggtgtctgccaccatgcccgcctaattttttgtatttttagggtttcaccatgttggctaggctggtctcaaactcctgacctcaagtgatccacctggcttggcctcccaaagtgctggaattacaagcgtgagccacagcgcctggcctgttttaactttttgaggaaatgctaaactgttttttccacagtgcttgcaccattttaaattcccaccaacaacaatgttgtgcaaccaccccctctatctagttccaaaacactttcatcgcccccaaagaaaactctgtatccactaagcaggccctccttctctctccaccccactccatgcccagcccctgggatacaccaacctaattggtgtctatggatttatttgttctgactatttcctctaaatggaagcatacagtttgaccaacaatgt

SEQ ID NO: 95198 - DNA, 471 bp, Homo sapiens
tctttccttttcaaactatgacagatagtttcatactcagcagcattttaaaaggtagttctaatttggtgacaaatgccttataaacaagagtttctatttgaatttttaaaaaagatcctttttagcctgaagaggttccaaagtcttagatcatagaaaataaataggaaggaattcctcacaagtttagtttgttttatgcttttttccatggaagaagattcagtaaaatacaccaaaaaaaaaaaaaaagaatgctaaatttggagtggcagaaaataagaattttagttcctgtattcctatttggcacataacatctgagcctcagttaatttgcggaatgaaagtgtttggccagattttctaagtttattttcaacttcaaagttttctgatttttaagccaaattaaaatagggattagacttaactacctacttaaagactactttaagacactcttca

SEQ ID NO: 95199 - DNA, 751 bp, Homo sapiens
gtgcccgccaccacgcccaactaatttttgtatttttagtagggagggggtttcaccatgttgccctgcctggtctcgaactcgtgacctcatgatcctcccactttggcctcccaaagtgctttgggattacaggcgtgagccaccacgcccggacaatatctcagtttttttaaaaaaaaccattccctatttgcagtgtctcttataaacaaatgtaatggggcctattgggactcatttgtaggaatcaaatatcctttcatacagtgtagacttattcttggcaagaatgttttactgtctaaccaagaattttaattggtttatcttatttaaaattttaaaagtaagtaaataaaaataaaaagccattccttgcaactatgtatattatgctaaaagaaagtctctctcattcctgaagctgaactattgtctgactcacgtgggagggaaccttccacagtcgtgaatgggatttttcttgcctgtcatgaatagagttatccccccactcatctgtcaagaatcggcactaggccaggtgcggtggctcacacctgtaatcccagcaccttgggaggctgaggtgggaggatcacttgagcccaggagttcaagaccagcctgggcaatatagcaagaccccatctctagaaaataaaataagaaataaaaataataataaaaagaatctgcactagctgcttcaaggaaggtctatgactaggatccaacaaaccagaag

SEQ ID NO: 95200 - DNA, 756 bp, Homo sapiens
atgatgagaagcatcatgaaaagttgcagtaccacgtaattcaaggctctgggctcagtttattcattcatttccaaggcatgctgtccaggctttccctgggcacaaaccttagaagaattctttgctccctctcccagatggctgacaatggtctgctcttttgaccctctcaatgacttattaaaatctgtggacatcatgtttctgcaaaacactctttatggtcagatttactgaatgtagagacacattttcatttgaaaaaaaagaaagtgagatttggtacttactaacagctgtggacaagaaacttgcttagtcctttggtgacacaaagattaaataaacacagacactaccccaaggactctataccatatatccatggagggccaacctatgcgaaggaggaaagctatgcttataaccccaagagtcatagaatgggtgaccctttcaaataatccatatgttaggtaaaagctttgtattccaggcactgccacttaccagctgagtaatcttgggcaagtaatttaacctgcaactctattttgttaatgttcatctgtaaaatgaaaataataataatatccacatgtgcagatttaatgaattaatttctgtaatataccaagaacagtacctgttaaatgtcaattgttcaataaaagttgctattatttaaataaatatataaatagcaaatacggctaacagtgtgagaatttggttgaaaatctacgatctatc

SEQ ID NO: 95201 - DNA, 729 bp, Homo sapiens
  misc_feature (1)..(1): n is a, c, g, or t
  misc_feature (4)..(4): n is a, c, g, or t
  misc_feature (6)..(6): n is a, c, g, or t
  misc_feature (11)..(13): n is a, c, g, or t
  misc_feature (16)..(16): n is a, c, g, or t
nagnantcggnnnganactgaaaaagggaagctgactaagtaaaatcccggaaaccagaagaggaggatgtaagtgacgctctaacatgaagggtttttgggcatcccaatcagcagaatttctacctgccttctgataccctgagacagccaggtcaggatgtgatggtgcagtacctgctagcactttgctgcagaatgcctctgcactcagttctgcaaatgtactgttttagtttcatttaaaacccctttttttgtgagaagatttcaaacatcaggcaagtttgtaatgaattcaagctgagttctctcgagggacaaacatgtataactacagttccagtgtcagtgccagctgtcaggttttcactgtgcagctagggctgcctgcatacccagtcatgtaaaccaaattcactctagaatcggccaggtcttaccaaaatgcaaatagaatacaaagcaactggaaatatatttcgtaatttcattttatgtgtgattttaaaagttaagctacttcaaaactcatctgtctaacttattttcactaataagtgtaacttgcctggaatttggcagatctaagctgggcttgggctagatggtttcaagcctgagtcattaagatgtgaaatttacagaaacaacagaggattgaggaacaagttaaaggacactctaatggtgcagtctgcataatgcagtagtatgaaattctacaaa

SEQ ID NO: 95202 - DNA, 849 bp, Homo sapiens
atccagcaaagacagccttgtccccaagagcctcctcaatcctcaaatgagttggttgtatttcgccagacgctccaaggggtagggggcgccagtcttgatctgtcctgtgcagagccccaccacaaggtcagcaatgaaaatgtcctcagtctccccagagtggtggctcaccatcaaccctcagccgttagagtgagccagtttgcatacctggatcgattcagtcaccgagccgatctggttgaccttcagcagcagacagctcgagaccttcttctcaaaggactgggcaatcctcttggggttggtgactgtcaggtcatcccccacaatctggatgtccacccctgagaggaacgaggtccaagtggcccagtcattctggtcaaaggggtcctcgatggagacgagtctaggtggcagctgggacagtgtcctatacctcatttttaatactacataggctacaagttctagaataatgccaaataacagtaatgatagcaagtttcttcatcacatgtctaattttttcatatacttgtctctagcaatttatcatcattgtgttattggctgttagatttttggggggggcggggggggggagatgggcagcttttctcaataaagcaattcaaaaaacaaggctctttccaatatgtggtaagccatgtggtgagccatgtggtgagccatggagttcttctgtatccaaccccaaaagagaacacagagaaaaagcacaccctattcttgagtaccttggctaggaagtgacacgtattacttctgctcacattctactgcaaaaatagtcacttggcactatctagacacaagaga

SEQ ID NO: 95203 - DNA, 163 bp, Homo sapiens
aaacctcgaatacatagaaaattcacatcatttttgagaaagttgtattggcaaaagctctgccagtttggacaaaaaaaagaccaggacaatttgaaatataaagacttctgtgccccaactttgttttcttttcttttcttttttttttttttttttttga

SEQ ID NO: 95204 - DNA, 352 bp, Homo sapiens
ggttcactgcagcctcagcctccccggggtttaagccatcctcccacatcagactcctaagtagctgggactacaagcatgtgtcagcacatctggctaatttttgtatctgttgtagagatggggtttcgccagattgcccagactggtctcgatctcctaagttcaagtgatctgcccaccttccaaagtgctgggattataggtgtgagccactgtgcccggcctttcttctttttaaatgtaggcatttttcactatgaacttcctgtttaatactgcttttgctgcatcccataagttttgacatgttgtgttttcatttttgtctcaaggtatttttaaatttcct

SEQ ID NO: 95205 - DNA, 328 bp, Homo sapiens
tgggatgcaggctcagtggaaggagaggagtctccttatgagactcagatggccagtgtgaaaaagacagaagataccaactgctggtaagaatgggaagcacactgcatggggaactctcctacactgctggaggcgtgttcttcctgttattctagattcagacagcactctggtcgctggttggtgcaggccaccatttgggccaattagaggaaccccaatatctgcacttggactatcagaaatgagagctctacgcccagagcaatttccaagatgggcctgaatccatgagtcatggcactacatggagcccagggttggc

SEQ ID NO: 95206 - DNA, 610 bp, Homo sapiens
gagtatttgtccatatttttgacagcaaaatatattagggaaacagagtaaaagaccttataattcataaaaatagattcatatatatatcaaaccttcctgaattttaatttttgataccaaatctgtttaaaatttgctattttgataattatgaaagggtgttaaaaatcacacctcaggcattcctagattccctgatgttggtgcccagttactttattcagaagtatcatatcgttttttgtagctcctctatcagtgaatacaatccaggggactagagtgctattgctggttagcccattcaggcaagttctattctcttagcacattcagataaaaaccacacagcaaaacaccaagctgtcccaggatgtgctttaggccattgttgaagttaaatgagaaaaggaatgtaaacattaacaaaatctgaaaggtgagtggaaattaggttttatagcataatttagtataaaaattttccaaatgttagagcaaattatgtgttttcctactccttcactaatgagatattttacatcaagaatatttattattttttgaaattgctgacttcccttggggtgaaaataagtattttttt

SEQ ID NO: 95207 - DNA, 409 bp, Homo sapiens
tggtttgttttggttttggtatgacgagttgttttgattgtattcctgagatttggttacttatgttaggggattcttagactacttaaatcttttgttacagcacatagttgccctattttggtttaatgtataggttctttcctgtgttatttatttatttatttatttatttatttatttgtttattttttgagacagagtcttgctctgtcgctcaggctggagggcagtggtgtgatcttagctcagtgcaaccgccgcctcctgggttcaagtgattctcatgcttcagcctcccgagtagctgggattacaggcatgtgccactacgcctggctaatttttgtatttttagtagagatggggtttcgccatgttggccaggctggtcttgaactcctggcct

SEQ ID NO: 95208 - DNA, 212 bp, Homo sapiens
ttgagtagggtggggtagggtggggcaggggtgggtaaagtgggagtggcctgaatcttccaacggctggatttcaaaaatgtcactgtattccagcacttcaataagacaaagatcaaaacgtcagcagctaagaggatgggcccgagcaaagactgcctggccccgctgggaaaatgaaagtggctcaccccaaggagggaaggacagtg

SEQ ID NO: 95209 - DNA, 120 bp, Homo sapiens
aagcctctaccctcatggaatttacactgttgctggggaaacagactataggcaaggaaacaggtaaataagcaatctactttcagataggaagaagtgcttatttactgcatcaaaaaa

SEQ ID NO: 95210 - DNA, 498 bp, Homo sapiens
gctgggattacaggtgtgagccactgtgcctggcttccatcctcttctatcatttttttaaatctcttctcctatcataaaattaatttctcattttttggtcaggtagaattgggaaagtcccacactgtcctcctattaccttaacatcccaagcttcctttccttttttggtctttatgaatatatttatatggacagaattaagataaacaaaattgattgccccattctctcacttccccatcttgtcttcctagaccccacagagttaaaacttgggattcccctggcccccccagaacacttgtatattgtttgtttgaggttcgtgccgcagtaacagacacagtatttaattgcacatacagatgtttgctgggtatattcactgtaaattttatttaatctgtttttttgtttgtttgggggttatttggggggaggttggttttgtttttaaatataaaaaaaaaaatctgtcactggaaaaaaaat

SEQ ID NO: 95211 - DNA, 461 bp, Homo sapiens
ccgatgacctttgcctgctcttctctttataagaattccacagaactcttttgaatatggatttccacttaatctttgatacttccaggctcttgggtcctgataagttttagaaactgcaagtttaagtgaagctgtttttaacttcccttttattttgctttaaatatttttagcaatgaatgacctttgaatacttttaaatgttgctatacaaacataaacagtgcttttactaacatattttataaatatttccttttccataaattcataaattgcttttgtcataaaaatagtaatattttatagtattttaagagtaaattctaagcctttaagaacttttatgcctacactaaggaaaataggactagagacttaaaatacataaccatgctacatttatagtgattgttatgttctctgattcatacattaaaaactgatgtgattccata

SEQ ID NO: 95212 - DNA, 203 bp, Homo sapiens
caaaagtaaaatgggaaaataaatcatggtgaatttacataacagagcactatatagcgatgagaatgaatgatctacaaccacagccaacgctgggtgaatctcacaaacgcaatgttaaaggggaaatccagctagtaaagtgaacgtgctagaagattccgttcgatggggttagactcagaatagtcacccttggtggg

SEQ ID NO: 95213 - DNA, 285 bp, Homo sapiens
ctggcattatgcacccgcacccaggcccaggccgctgcacacaggccctgcatgcagaccagccaggtggccagcccagacacacagtcaggttgcagggacacccgatcctgggcaccaactgtgggactctgcccagcaaagcctgaacagtctccagaggctgtaaccaggaatctccaattagggcaacctgggtttgtggggcccaggacggggagcagccctccttgaaagaaaggaacggagaggagggggagcgactgctcactcggctcagcacac

SEQ ID NO: 95214 - DNA, 509 bp, Homo sapiens
actgggagctgctatatttaacaagtttcactacttgttcttatggtcagactgagtttgggaaacacaaatctcaccatctgatatggaaatatcactaagaagacccatgtgttctgaaggcaaagggtgaccactactgagaaacagcagagtccttctacagtcgcttctggataatgcccatcttggcatctatagaactgcatttttatggatgcattaatttcatttttctatcatctttgtagtcagttaacgtggattagtttagagtgatgccaacctcattgttctgtgcctgtgctaaaaattggataaaagaccatctaatttttgtccattccctttcctcctccctttcttatcatctcacttttctttcttacctttcactccactttcattcttctgtgaccgtattctagatggaatatagtaggggcaaaagtaatagaaatattttcatgtgcacagggcattttagggaagtgcatgttttgtgatat

SEQ ID NO: 95215 - DNA, 196 bp, Homo sapiens
  misc_feature (21)..(21): n is a, c, g, or t
  misc_feature (23)..(23): n is a, c, g, or t
  misc_feature (173)..(173): n is a, c, g, or t
tgctgtgatctagaggatccntnggaggcaggacactgtgggaggcaggacactgcagaaatggcgcgggaggctccttccagcactactggatgaaatgaggctccttaggtggaaagcagttttgttttctgaagcttttgccggccagtgtcctgtgcctttcccagggntacctgacgcttcgaatttcgta

SEQ ID NO: 95216 - DNA, 258 bp, Homo sapiens
gttttaaatgtagcaactcattaaatccttccataacactgtgacgattataccactttacagatgaggaaactgaggtgcagagaggttaagtaaccagcccaaggtctcacagctactgcccatgctgtgggaagtcagtgaaggcgaagacttaggaattcactccgaactttaggtttgctgctggattgtggcagtgcatttatcacatgggagttgatggctgtttcaagagccattttttttttttttttt

SEQ ID NO: 95217 - DNA, 227 bp, Homo sapiens
aaatatggaatgaagacaattgtatattatttttacagccaaatagtagatgagtagtttaaatggaaattagctattgaaattttgatttgtaatgttgattagtattttaatcagaattttgactaactgaaaaatgtgtttaaaaacaaaagattttgttattaatgaggattatttggaggtttttctggtttcaaagcataccacaaaacatggtctttttc

SEQ ID NO: 95218 - DNA, 846 bp, Homo sapiens
agcgggtcggaaccccgcgatgtcccccgcgctgttcgtcccctcttcgtctccctcttcgatgttccgggtcccagaaaccaggttatcacagtggcccggatcatagggaaattgcgaaatcatccagttgggatcaccgagcctgcagggtccccttcctgggcgagcctcctggccccgtgctatcggaggcctggacacccccgccagggacccagcgacccagcaagtccccaccccctctaagggcgacctgggcctcggggtgagaggtcccctacactaaaaaggctgccgcccttcaatcctagaccccgagattcctttcactcgggaaatctcgtaatggcatccattgtcattttgatctttatgccgaatttctagctcctgcgtctccattgccggtcctaaaagtcgccgtttcactaagcttcggaacctgactccgagaaatctatacgttcgtcccaagatctcagccagaaagagaaatccgcgcggcggcctcttctagctcgggtgctgggaggccccgtcctgatcctctgtcgccctggccgatctccctcagggccacggggaagaggaacctgagcagctctgaggggcgagtctctgacggtggggctccccctcgtcctgccaggaccctgccccaaggagaagaccccttaggacgttaccagatttaaacaatgttttctcctgctcttcagagcacctgggataaggttcctgatgggtcttgggagcaaactaacatgtcgctccaggcgctcaagaccatccctctgattttcatattttggggctgagagcgtttaagaaggactgaaaaac

SEQ ID NO: 95219 - DNA, 392 bp, Homo sapiens
catatgcggtgtggccctctgccctcatgctgttcattttgtcataccagcaaccaagaggagcccaggcttcggagctggacaagtttaaatccagctgtgtgaccatagcacatttccaagcctctcttttctcatctcagaaatgggcatgaatctgacctttgcagtgttgttgcagaatgaatcgcagtgggcaaaacatgcctgatcaagagtggagcccctggggccaggaggaggcgtgtgtacatcatggggcgttcctttctcttgctgtgtaaatagaccctggaactcaataaattagattgattggaccagaaggggaaggtcttgaagacccaggctaaggattagggactcagtctccctgaaaacagggtatgctt

SEQ ID NO: 95220 - DNA, 488 bp, Homo sapiens
tcggaaggactcctctctgacagtagtgacataatattcttcactgtggcttcttccattgtgacccagaccaatctacttaaggtccgcaaatactgctcacgttctcccatgaagtccatcatgtggggagtgttttccttgtaggattacgctgctctcaagtgcatacatgatgatctttttgtccaagcatcagaggtgatcccagcatcttcacagtaccagcctttccccaagatcctcgccagagaaaagtgttacccagatcatactgccactggttccagcatttggaggcaaacatgaagctccatcctctccaattctggggcaaccgtgtggagatgatcaaaatgcttcaccttcaaaactttcaaaggaagagttaatacagagtatggatcgtgtagatcgagaaattgcaaaagtagaacagcagatccttaaactgaaaaagaaacaagtaaaagtctttgcctaatata

SEQ ID NO: 95221 - DNA, 1337 bp, Homo sapiens
  misc_feature (1231)..(1231): n is a, c, g, or t
  misc_feature (1299)..(1299): n is a, c, g, or t
  misc_feature (1336)..(1336): n is a, c, g, or t
tcctttcagaaccggcgatttcttttatttagacaacacctttttgcttttcttccacatcttcacactccttcaggatcaaaaacctaagccacatgactggatgagccgtcacttggccttcattcgggtagtgatggtcctcactgtagtggatgttttgcctccagatatgcttgaatcactgcattttgggaataacttcaaatgcaagtccttgatctaaataaacagagtgacgaggggcctatgtatctataccacctgtctcctgagtatacaccaggccagcataatcagcctcagcaacttctggttggaaagctttaaacataaatttacaaataacattgtcagtgtcctcttttttcttttttgttccctcaatttgtctttcagtagtgacataatattcttcactgtggcttcttccattgtgacccagaccaatctacttaaggtccgcaaatactgctcacgttctcccatgaagtccatcatgtggggagtgttttccttgtaggattacgctgctctcaagtgcatacatgatgatctttttgtccaagcatcagaggtgatcccagcatcttcacagtaccagcctttccccaagatcctcgccagagaaaagtgttacccagatcatactgccactggtgagttgctttgttgtcatgtactgggtggaccttatcatctcatcctcttcatccctgttatggacgtataacccagtcatcctgagcatctagaaccttgtagcctgtgtctatgccactctcgttccattggtacaaatccgctctgataaaagaatagttaatattctccaaaaaatggaattaaagtgctataattttttaatgtgttggtgatgaaaaatatttctaaaaattagtctcattctatagttaaattgttcaagtagccccagatttagcttactgagtttaaataaaatgcgtggaattacacttttattatatttttatgcttctgaaactgaggcatctaaggactatgtagtttcttcagttcaatgttcaccatagattgacatttcagatatcaagtcttttgcacttttatttttatgttaactttgtacaagaaaatgtttctctctttttgaagtacattcttaaaaaatttgttttggtatcaatctctcaatgtttttacttttgaaaatatttacttactctgtttatgaatgatactttagctnaatattcaattctagcttttaagccatgcttgctcattgtacctccctgactaaaaaaaattatgtcnatttggattttaaatttaatctagaattcattttaang

SEQ ID NO: 95222 - DNA, 326 bp, Homo sapiens
ggatcaacattatcatggcaaccctgaggaggctgtgagagtctctggggtccttgccggcctgcagaaaatcaagctttgagcgggaagcttcgaggagacacagtgtcacaattacaaggttccagcatttggaggcaaacatgaagctccatcctctccaattctggggcaaccgtgtggagatgatcaaaatgcttcaccttcaaaactttcaaaggaagagttaatacagagtatggatcgtgtagatcgagaaattgcaaaagtagaacagcagatccttaaactgaaaaagaaacaagtaaaagtctttgcctaatata

SEQ ID NO: 95223 - DNA, 864 bp, Homo sapiens
tcctttcagaaccggcgatttcttttatttagacaacacctttttgcttttcttccacatcttcacactccttcaggatcaaaaacctaagccacatgactggatgagccgtcacttggccttcattcgggtagtgatggtcctcactgtagtggatgttttgcctccagatatgcttgaatcactgcattttgggaataacttcaaatgcaagtccttgatctaaataaacagagtgacgaggggcctatgtatctataccacctgtctcctgagtatacaccaggccagcataatcagcctcagcaacttctggttggaaagctttaaacataaatttacaaataacattgtcagtgtcctcttttttcttttttgttccctcaatttgtctttcagtagtgacataatattcttcactgtggcttcttccattgtgacccagaccaatctacttaaggtccgcaaatactgctcacgttctcccatgaagtccatcatgtggggagtgttttccttgtaggattacgctgctctcaagtgcatacatgatgatctttttgtccaagcatcagaggtgatcccagcatcttcacagtaccagcctttccccaagatcctcgccagagaaaagtgttacccagatcatactgccactggttccagcatttggaggcaaacatgaagctccatcctctccaattctggggcaaccgtgtggagatgatcaaaatgcttcaccttcaaaactttcaaaggaagagttaatacagagtatggatcgtgtagatcgagaaattgcaaaagtagaacagcagatccttaaactgaaaaagaaacaagtaaaagtctttgcctaatata

SEQ ID NO: 95224 - DNA, 1018 bp, Homo sapiens
  misc_feature (912)..(912): n is a, c, g, or t
  misc_feature (980)..(980): n is a, c, g, or t
  misc_feature (1017)..(1017): n is a, c, g, or t
tcctttcagaaccggcgatttcttttatttaggtagccctatacatacattaagcatattttcccatttctatgatatagtagtgacataatattcttcactgtggcttcttccattgtgacccagaccaatctacttaaggtccgcaaatactgctcacgttctcccatgaagtccatcatgtggggagtgttttccttgtaggattacgctgctctcaagtgcatacatgatgatctttttgtccaagcatcagaggtgatcccagcatcttcacagtaccagcctttccccaagatcctcgccagagaaaagtgttacccagatcatactgccactggtgagttgctttgttgtcatgtactgggtggaccttatcatctcatcctcttcatccctgttatggacgtataacccagtcatcctgagcatctagaaccttgtagcctgtgtctatgccactctcgttccattggtacaaatccgctctgataaaagaatagttaatattctccaaaaaatggaattaaagtgctataattttttaatgtgttggtgatgaaaaatatttctaaaaattagtctcattctatagttaaattgttcaagtagccccagatttagcttactgagtttaaataaaatgcgtggaattacacttttattatatttttatgcttctgaaactgaggcatctaaggactatgtagtttcttcagttcaatgttcaccatagattgacatttcagatatcaagtcttttgcacttttatttttatgttaactttgtacaagaaaatgtttctctctttttgaagtacattcttaaaaaatttgttttggtatcaatctctcaatgtttttacttttgaaaatatttacttactctgtttatgaatgatactttagctnaatattcaattctagcttttaagccatgcttgctcattgtacctccctgactaaaaaaaattatgtcnatttggattttaaatttaatctagaattcattttaang

SEQ ID NO: 95225 - DNA, 211 bp, Homo sapiens
gaaatcatgccattgcaatgcagactgggcaacaagagtgaaactcatctccaaaaaaaagaaaaaagaaaaaagaaaaaacccagaagaaacatggggctgtcttaacaactcatatttccaacttaggtggatcaatataaatatgttactagctaaggagatgcctagagatctaatagttgtaaagccttcttggacttaaggtggg

SEQ ID NO: 95226 - DNA, 1604 bp, Homo sapiens
  misc_feature (578)..(578): n is a, c, g, or t
  misc_feature (675)..(675): n is a, c, g, or t
  misc_feature (679)..(679): n is a, c, g, or t
  misc_feature (702)..(702): n is a, c, g, or t
  misc_feature (711)..(711): n is a, c, g, or t
  misc_feature (771)..(771): n is a, c, g, or t
attatagtatgtgtagtgaaatggtgggattttatttttattttttattttttagagacagcgtctcattctgtcacccagggtggaatgcagtggtgcactgatagctccgtgcttgaagagccttgaattcttgggctctagcaatcctctcgcctcagcctcctgggtagctaggactgcaggcacaggccaccattcccagctaatttaaaaaattattttttttgtagacacagggatctctctgtgttgcttaggctagtctcaaagtccttggctcaaaggatcctcccacctcagcctcccaaagtattgggattacctggccaataatggaattttagaactggcaggaacgtcagagataatccaatgtgagctcttaatgatacagattaatgaagtatcaaaagatgagaggtatctaaaattcacaaaacttgttagtaacagaacgagtattagaaccagctatctaactcttagtccagtggtgtcctgtatcatacggtttcttagaaaatagatgtttccaggccaggtgcggtggctcacgcttgtaatctgagcacttngagaggccgaggtgggtgggtcacttgaggtcaggagttcgagaccagcctggccaacatggtgaaactctgtctctactaaaaatactgaaaattngccnggcgtggtggcgggcgcctgtantcccagctnctcaggaggctgaggcaggagaatcgcttgaacccgggaggcggaggttggagtgagccnagatctcgccattgcactccagcctgagcaacaagagcgagactccatctcaagaaaatagatgtttccacaaatgtaaagtctatatgtatttatatttcaacagataattttaagaaaattaaaatggatgagggctgttccaaagaaaatattagtaatctaaagtgtatgctgaatttttttttttttttttttttgagatgggagtctcgctctgtcacccaggctggaatgcagtggtgcaatctcggctcgctgcaagctccatctcccgggttcacacaattctcccgcctcagcctcccgagtggctgggactacaggcgcccaccaccacccccggccaatcttttgtatttttagtagggacggggtttcaccgtgttcgccaggatggtcttgatctcctgacctcgtgatctgcccgcctcggcctcccaaagtgctgggattacaggcgtgagccactgcacctggcctgaatttgttatttactatagtccaacacaagaattaagatggtatatatacagtttaaaatgggacttttttactcttctgactttttgttttaaatatatagtgaaaactgttaaaagtttctcttcagatatgtggtaggtatttgagaggccttattattggctttggttgacatgctggttttggaatcttacctcctagcctccaaatgtccacagaatctgacaattcagaaaagctttatactgagaaactatacataggcaacaggcatatgccacgccagttcatgcttctgagttagacactctatggtaggggaggttggcaatccatttttgtttttt

SEQ ID NO: 95227 - DNA, 515 bp, Homo sapiens
cgccgctgttgccgggcaacgcggtgagcctaccccgcgtgtgatgttttcagagacgggttgttttagagactgctcttcttgtggtcttattactgtttttaccctccttaccctaacaacacgctaaggggctatcggagagagtagagaagttttgttaggcattgggcagcttgggtcggggcagcaggttggcagtgtggtacttgagcaagtgtcagtgcatcttccattctggttgctcctggtggctccacagcactgctctatctagcaggctgtgaaagagtgaccgcaagctgctacagagtttgtcctgtcctgcgcttgacaacactgctgttaccattaatctcgtcgtacggagaccatgtcgcggcctggtcttattgggaattgtcttaaatatttggaattttaccctcatagcaaaaaagtcagggggaggggataccctttcagttattcaggattttaccaaacgtcttccaagtacagtctcagtggcaagc

SEQ ID NO: 95228 - DNA, 224 bp, Homo sapiens
tacctcttaggatccaagcattgtgccaggtggctggaaacagaggggcagaccgaagttaaccctcctctgtggatcttgggcttcctgtcttgagtctggttcatcagtcatagttcttcttgcctcaaggttattttgtttctagagcttcattaccctttcttaccacctgaccttgtccagtccacacccataactttccttaatttcaaatatcagtg

SEQ ID NO: 95229 - DNA, 579 bp, Homo sapiens
atgtgtggaggcagaggatatgggtgacattttaacaatcttgagtcttccaatctgggaatacaggatgttttttctttcattcagatctttaatttctttgaataatttttttgtagtttccagagtataggttttatacttcttttgttaaatttattattaagtatctcattactttttatactattataaatataattgttttaattttgtttttggatcgttcaatacaagtatataaaaggtgtattgatttttgtatattgagttagtattctgcaactttgctgaactcatttattagttgtaatgtattttcagtgtattccttagaattttctatatacaagatcaagacatctacaaatagagttttattcttcctttccaatctggatgccttttatttctttttcttgccttactatcctggctagaacttctagcacaatgttaaattggagtggtgagagcagacatgagtattttattcctcatcttaggggtaaagcatctatctttcacctttaagtatgatactagccatggttgtttttttttttttttttttccccc

SEQ ID NO: 95230 - DNA, 426 bp, Homo sapiens
ggcgtgatggacaggggagtatgcctggaagccctttctacactggatggctctcagtaacttacagagaaatgtgactgcaaaccctattgaagcaaagttagttcatctactcagcttatctttagcccacactggctgtatccacgccagtgccacctgatgcaaagtctgatggaaggacagtttaagtggaaaggcacaaggttagatctacagtcaaaacagctgacttttgcccattacaaaaggggtttgtgtacggctttgtgaacactttgttagggtcccttgcaggcaagtgggggccttgatgcttaagcgtcattagcttcacaggaaattcatctctgtttacttgtaacaaaatctcaggacaaagcagaaaaagaaaaacccagcactgacctcaggaccgcagacttc

SEQ ID NO: 95231 - DNA, 339 bp, Homo sapiens
gtgaggttgtacatcatcccatatatggtctcagattacagagtagagttttagaatccagtttcattccccattgtcttttgctccgcatattcagatggaaaaaccaaggatacaggtaagtgttatgaaaacaaaaacacagattccctggaggtcaggttagaaagagtgaacccacccaagtaaccactctccttccagaaagtgctgagagcatgcttcctcgcctgccctggtctcctgtcagcacccacatttgaccttcaaccttcatttctgccttaaagagcatcaagaaactgtagcagcttggaacatgcctgccaactgagtcct

SEQ ID NO: 95232 - DNA, 346 bp, Homo sapiens
ctctactggtggacaattaggcaatttcctgctttgggctattacagatagtgctgtaatgaacttcttttgaaatacatctttgtacacatttgcaagtatttctgtaaacacttaaatgtgacatgattatgtaaaagacatttacatttaaaatattgataactactttctagttatgctttcctcttcaaaagtatcctttttttctatatcctcacaaacactggatgttgtagtcttttttttgtttgtttttttgagtcttattatgtcacccaggcttgagtgcaatggcatgattttagctcactgcaacctctgcctcccaggttcaagcaattct

SEQ ID NO: 95233 - DNA, 359 bp, Homo sapiens
gggcaacatttgcaagaccccatcagtacagaaaataaaagaattagctgggtgtgatggcatgttcctgtagtcctagctacctaggaggctgaggcagaagtattgctgtagcccagaaatttaaggttgcagtgagctctgatcacattactatactccagcctgagagacagagcaagaccctctctttgaaaaataagattaagtaaagtaaaatgacaaacactaagctttagtgctcttcttcctgttctgtcctatcgccccaccaactagtaagtctggggaaaaattgcaaggataataatttgaattctctctacttctgtggtttgtaatatagatatgtaagttat

SEQ ID NO: 95234 - DNA, 648 bp, Homo sapiens
aaaaacataaccacttggaaggatccacaaaggaggtagaaatagacaagggttttcaaaggctgtgactcttcacagaaagggatacgaagggctttccaggaaggagcagtaccttgatctctttgcaacacaatttcaaattatccattagaatgacttattttatagatgtctactgtccttgacattatagtgatttcatttagcttctgatcgtttccaaattctaaaacttcctatgctatttagatgaccctaaaagtagacaaccctaaaagtgtaatagtgtcaagtcaaatatttgggaggtaggggtgtgtgtgtgcacgcgcatgcacacacgcatgtgaatttaaccactccaagagtattactgactcggcttttgcatgtactgttctatcttcttgtaacattcttccttcaggtcttcatatacatgtgtcctttgtaaccactcaattctgctgtcacccccggagctttccctgactgcctgtcacccagttgctccctgtcacacttccccatgtttttttcatagcttttgtcagcttctgaaattatttatttgacttctgccttttcccaagtgaagtataagctcctcaagggcagggtcttacctgtcttgttcactgccta

SEQ ID NO: 95235 - DNA, 692 bp, Homo sapiens
agtccgcattccccgcacccacccacgtcttcccgggagtcgtatcccgagcatggaggttactgagaccgttatttcttcatggcctgcctagcttaagcagtagctggaaaagatgtctcgggctgttcgtcttccagtcccctgtcctgttcaacttggtaccttaagaaatgactccctggaagctcagcttcatgagtatgtcaaacaagggaactatgtgaaagtgaagaaaattcttaagaaaggaatttatgttgatgcagttaactccttgggccaaacagcactttttgttgcggcgttattgggccttaggaaattcgttgatgttctggtggattatggatcagatccaaatcaccgctgctttgatgggagcacccctgtccatgcagcagcattttcgggcaatcagtggatccttagcaaactgctggatgcaggaggtgacctgcgactccacgatgagaggggtcaaaacccgaagacttgggctttgacagcaggaaaggagcgtagcacccagatagtggagttcatgcagcgctgtgcctcacacatgcaggccatcatccagggcttctcttacgacctcctgaagacgatagactccccgcagcggcttgtctacagcccgtcctggtgtgggggcctcgtgcaggggtgagtactgccttgagcagagt

SEQ ID NO: 95236 - DNA, 813 bp, Homo sapiens
agtccgcattccccgcacccacccacgtcttcccgggagtcgtatcccgagcatggaggttactgagaccgttatttcttcatggcctgcctagcttaagcagtagctggaaaagatgtctcgggctgttcgtcttccagtcccctgtcctgttcaacttggtaccttaagaaatgactccctggaagctcagcttcatgagtatgtcaaacaagggaactatgtgaaagtgaagaaaattcttaagaaagctctggagttgccacaaacagcgttgagatcagaggaagagtggagaagcaaggaggagaattaacagagcattgctgcatcctgcagtgcggaggagggaagaaattggaatcggcctgggaatttatgttgatgcagttaactccttgggccaaacagcactttttgttgcggcgttattgggccttaggaaattcgttgatgttctggtggattatggatcagatccaaatcaccgctgctttgatgggagcacccctgtccatgcagcagcattttcgggcaatcagtggatccttagcaaactgctggatgcaggaggtgacctgcgactccacgatgagaggggtcaaaacccgaagacttgggctttgacagcaggaaaggagcgtagcacccagatagtggagttcatgcagcgctgtgcctcacacatgcaggccatcatccagggcttctcttacgacctcctgaagacgatagactccccgcagcggcttgtctacagcccgtcctggtgtgggggcctcgtgcaggggtgagtactgccttgagcagagt

SEQ ID NO: 95237 - DNA, 123 bp, Homo sapiens
gttaggattgtaggcattagccaccacactcagtctagtacactgtttataaaattttccctgtacactgaggctgtcacaccctctcagctaatgaagtgtagtaggacaggccatactgtg

SEQ ID NO: 95238 - DNA, 383 bp, Homo sapiens
tgatttcacccctgaccaatcagcactcctggctcactggcttcccccacccaccaaattgtccttaaaaactctatgggtagactgatttgagtaataataaaactccggtctcctgcactgcatgaattactctttctctattgcaattccgcttgtcctgagaaatcggctctaagaaattggcaggcaaagtgaacccattgggcggttacaatcccagcattctgggaggctgaggtgggcagacagcttggggccaggagttcgagaccagccaggccaaagtggtgaaaccctgtctctactaaaaatacaaaaattaggcaggtgaggaggtatgggcctgtaatcccagctatgcaggaggctaaggcaggaaa

SEQ ID NO: 95239 - DNA, 345 bp, Homo sapiens
tcacgcccaggcatccacttggccggacaactttcttcctccaggttccagacagcctgctttgcgggcctgttcgccccataaaaggacctagacgtccagctaaactcctgctgcatgctttttttcttccttaggaaggatggggtgcgatggagagaggagccttcttcctgctttattcctgcatctgattattgggctgatgtgtgctaaagctcccgcaccgggaaaactgccgaggttttagggctcactagccctttctttggtgggcgctccctctcctccgcccctcgagatgggttgcgggaagcgggctgtggagctgaggagttggtagta

SEQ ID NO: 95240 - DNA, 748 bp, Homo sapiens
aagagcaaccccaagacacataattgtcagattcaccaaggttgaaatgatggaaaaaatattaagggcagcgagagagaagggtcgggttacccaccaaagggaagcccatcagactaacagcagatctctcagcagaaaccctacaatccagaagagagtggaggccaatataaagcattcttaaagaaaagaattttcttttttttttaaaggctaaaatatttaattatgtttttaaagcacatgaattctttacatttcaataaaatatttccaaactatattatcccagaaaacaaaacatgattgcattttcaacccagaatttcatatccagccgaactaagcttcataagtgaaggagaaataaaatactttacagacaagcaaatgctaagagatttcatcaccaccaggcctaccttacaagagctcctgaaggaagcactaaacatagaaatgaagaaccgataccagccactgcaaaaacataccaaatttgtaaagaccatcgacactatgaagaaactgaatcaactaatgggcaaaataaccagctagcatcataatgacaggatcagattcagacataacaatattacccttaaatgtaaacagactaagtgccccaattaaaagacacagactggcaaattggatgaagagtcaagacccatgggtatgctgtattcaggaggcccagctcatgttcaaggacacacataggttcaaaataaagggataa

SEQ ID NO: 95241 - DNA, 188 bp, Homo sapiens
ctctacaggaggtaagaagacgacagaaggggaagctgagagggagctgcccatcggagtgcccagccaggactgagtcactagcccttgccctctaggttaaggggaacagagggcctccctttgcccttccccatttagggtggctgtggcaagtgagagtgtgtgtgtgcatgtgtgtgtaaact

SEQ ID NO: 95242 - DNA, 291 bp, Homo sapiens
tcttaccaatctgacattcactatcaaccacttcttgacacatgtcatagaaaagtgacatctctttcccttcaaccaatatatcctccaacaacatcaacctcaacaggtagctagcattgtcttctgttgaaatttagagctggaagaaaggatttcacaatctctctgtggagacccaggaatccgttaccttctgggattttagagagtgtggagagagatgagcaggcagtgagccggggaccaactccgataagaatatgaagtcaggaagtgagagaggaaacg

SEQ ID NO: 95243 - DNA, 412 bp, Homo sapiens
tatgattacacttcagttaaaaataaaacaaaacccacacttagaaacaggggctgaatattaatattccaaaatattaacacaattatctttgactggttggttttggaagattaaacttttttatactttccaataagcatgcattatatgtaatggaaaaataggaaaaggtagaaacctatacctgagtatatgcctttactacaattgataatctgattctctgtatctattcttaacaatggtgaatttttatcatcacatatactgtcttcctacactttctctcacctcctcccaactccagctgtaggctacagccagactaggggactcacaatgccttaaactcccgtctgtgtgactttggctccagcctgcaattccatctgctctctcactatcaagc

SEQ ID NO: 95244 - DNA, 1576 bp, Homo sapiens
ctgctcactctccccacccaccctttcgcatgcccagactggatccttccacagaatcaggacttcttcctctacttgggcaacagcagtaataacatctggggaccccgtctcagccgaagctctccctcctagccaagccatcttgaacgtccctcttgcttttggtgccactcgcggctttgctgctcctggaaatcctggtcccgttacctctcaaaggtttccctagtctttcccatcctcctcgagactttttacctacttaaagccatacggttctctcttttctcgcttttatccccgggtacccgctaggacccagccccggcccctggacgaccctcgggcagccaccttcaagcctccagccgccagactgcagcgcgacagaggcggctgctggacggagggagggctacgggaggaggtggtgcggctgctgcagtgcccgcggcgcacactcccccgcactcctcggccggccacacccttttccggactgtgggctgcgcttgttccgttggggcagagacccttatttctgcggcggccgcgtctcctgtgctgaggcggatgccttctctctagtcttgcagaggcgaagccggttacccggcccctcccagcagaggtgccagtctagggggagaatggcagcagagaggaatcaaaattgacactagacagacacagccaagcttcccaggccctggactggaaaggggaggagaaagagggccaaatggctctaggggacctgtagcctaggcagcaagtgtttgtctcctcctcatcatcatggaaaccaatcttcctacccccaatacaaagcgcaggtgtcctttcccttaaaaggagtcacacagagaaagatagaggaaaacacacacacacaccccaaaaaacccacaaagccaggcctaattaggtcttctggcccctccctgactcaaggaaggacttgcttccctcttcaccttcctgctctagaagccccgtctgaggggagttgagaaggctggaaaaggggactttttttttttcttttttgagacggagtctcgctctgttgccaagctggagtgcagtggcccgaacttggcacactgcaacctctgcctcttcaagcgattctcctgcctcagcctcctgggtagctgggattacagtcacgcgccaccacgcccggctaattttgtatttttagtagagacagggtttcaccatgctggtcaggctggtgtcgaactcctgacctcgtgatccgccgcctcggcctcccaaagtgctgggattacagatgtgagccaccgcggccagcctggaaccaggactttttaaatcccaggattccctcaaactccaatttgactggacctccccctccagaaagaatgcgcccttctcctcctcccgctcctctctctctcagcagctgtcatttcaccacgtccctgagctatccacagggcaacagcgtgacctctaccttgtcagctccccttattagagagacatcagcccccaaactctgtgaggaatgaacctttggggcatcctcgcccctcgccca

SEQ ID NO: 95245 - DNA, 937 bp, Homo sapiens
gatcgacatgtccataatgttaatgaagcgcatagcagtcactagtaaattaggagttatacattgcttctatagcatcagaaattgtatatcaggccaggtgcaaaagctcactcctgaaatccaagcactttgggaggctgaggtgggcggattgcttgaggtcaggagttcaagaacagcctggccaacatgatgaaaccccaggtctctactaaaaatacaaaaattggtcaggcatggtggtgcatgcctgtaattccagctactcgggaggctgaggcaggagaattgcttgaacccgggaggcagaggttgcagtgagccaagattgtgccactgcactccagcctgggcgacagagccagactgtctgaggaagaaattgtatatcaggctgggcacagtggctcatacccgtaatcccagcactttgggaggcccaggctgggtatcacttgagcccaggagttggagaccagcctgggcaacaaagtgagacccctctctctacaaaaaataaattagccaggcatggtggcacgtgcctgtaatctcagctacttgggaagctgaaggaggatcgtctgagcccaggagtttgaggctgcaatgagctacaatcacacccctgcactccggcctgggcgacagagtgataacctgtctaaaaaaataaaaataaattgtataatcatattgcaattttctttgcattactgatgaggaaaaatctcaaagtaattgtaaaaaatcctggatatcacatagttgagaaacaaagttattttaaacttacaggactctgtagttcacagttgaacactgtggcttcctgaaatatcaaagaataatgtacattaataagccagctactatcggcatcttgtaaaaattaaaaaattaaacataaataaaagttcaaactatgtgttga

SEQ ID NO: 95246 - DNA, 433 bp, Homo sapiens
gatgatagctcactgcagcctcgatctcccaagctcaagtgatcctcccacctcagctacttgggaagctgaaggaggatcgtctgagcccaggagtttgaggctgcaatgagctacaatcacacccctgcactccggcctgggcgacagagtgataacctgtctaaaaaaataaaaataaattgtataatcatattgcaattttctttgcattactgatgaggaaaaatctcaaagtaattgtaaaaaatcctggatatcacatagttgagaaacaaagttattttaaacttacaggactctgtagttcacagttgaacactgtggcttcctgaaatatcaaagaataatgtacattaataagccagctactatcggcatcttgtaaaaattaaaaaattaaacataaataaaagttcaaactatgtgttga

SEQ ID NO: 95247 - DNA, 400 bp, Homo sapiens
cttgtctgtcccgtttcgaccatattttatttttgagaaggtcttgctctgtcgccagactggattgaggctgcaatgagctacaatcacacccctgcactccggcctgggcgacagagtgataacctgtctaaaaaaataaaaataaattgtataatcatattgcaattttctttgcattactgatgaggaaaaatctcaaagtaattgtaaaaaatcctggatatcacatagttgagaaacaaagttattttaaacttacaggactctgtagttcacagttgaacactgtggcttcctgaaatatcaaagaataatgtacattaataagccagctactatcggcatcttgtaaaaattaaaaaattaaacataaataaaagttcaaactatgtgttga

SEQ ID NO: 95248 - DNA, 370 bp, Homo sapiens
ccctagagaacagggttcttgctttgtcgcccagttgaggctgcaatgagctacaatcacacccctgcactccggcctgggcgacagagtgataacctgtctaaaaaaataaaaataaattgtataatcatattgcaattttctttgcattactgatgaggaaaaatctcaaagtaattgtaaaaaatcctggatatcacatagttgagaaacaaagttattttaaacttacaggactctgtagttcacagttgaacactgtggcttcctgaaatatcaaagaataatgtacattaataagccagctactatcggcatcttgtaaaaattaaaaaattaaacataaataaaagttcaaactatgtgttga

SEQ ID NO: 95249 - DNA, 1307 bp, Homo sapiens
ttggggggaaatgatttaaagcatatttacatatatatgttactggtttcttgttataaacagagaattagaaaattctaaatgttttctgaacgatatttcaaaacccagaatattgcatgaatcaatattaatgaagtttgcatttgacagtaatcattctgtcttgtctatttctagatggttgtacttatgtacataaggatttatgtaatgtaatagcatttaaaattaagaaacacattttaaactaaaatagatctatgtttgtgagcatatcttgccttctatttccattttatactctttagacattctagggaacttttcaaaagactatatcaagttggatttactactttttcatggtggttttatataggctgttaaaaaaaaaaggttgaaaaatagaataaacatatcagtttcatctaatgacattgtgtacctttctgtattttttatgactttgtatagccttctgacatagtcctttatctcattggtgagaatccatgtgacatttctattctttttcatctactttgtgaatattccagatttattaagaatagtcaaagcatgttatgacacaacatgctttattagaaggatatttaaaaccatgttatgacacaacatcttatttttaaaactggactatagggctgggtgcagtggctcatgcctgtaatctcaacactttgggaggccaaggccagaggattgcttgaggccaggagtttgaggccagtttgggcaacatagcaggaccccatctctaccaaaaaaaaaaaaaaaaaattagctgggtgtgatgttgcctgtagtctgagctactagagaggccgaggtgagaggatcacatatacccgggagtttgaggctgcattgaactatgttctcaccactgcactcagcctggagaatagagtgagaccctacctctaaaaattttaaataaataagtaaaaaaataccgagctattgtgcaggctcagttatgctgactacaacttatgttactatgttttacattatatagtctaaagttacttatagtccaagtaagccatatggtagtttcttctgtaattaaagtataatttggtgctattgaacattgctgtactctgttctgtagaaaattatatttgaaacaatataaaaccgggtgtggtggcacacgcctgtaatcccagtactttgggaggccaagccaaggaggatctcttgaggctggcctcaagaggattttgagatgagcctgggcaacatagcaagacccaatctctacacaaaatgta

SEQ ID NO: 95250 - DNA, 168 bp, Homo sapiens
tcttagcttcgtggcagatgtgataagcatgcctttgtgtctttctctaagtcactgacttttcagtaacatctaaatcataaaacataggtctggccaggtgaagtgcttgtgcctgtaatcccaaggggccaaggcgggaggattgctttagtccaggagttggag

SEQ ID NO: 95251 - DNA, 565 bp, Homo sapiens
cggtaccgtacgcccacaggactcagcctgggcgacagagcaagatcgtctcaaaaaaaaaaacccttgcttacaagacactgggaggtcaggatttaaacaatggctgcctggtcctccttccttggcaccctacaaataaatgccttctcttctatagctgtaagaagccttgatgtagatacctggatttactgtgccaggcgagcagaccccagttcagttaaccctccaagggtgttgtgagtggacaaggcaaacacagaattgggccaggtggattgtaatgattttgtaatgattctcattgtggtgtgagtattcacacctcctgaaatggccgggaaatggatttttttagtcacttggtgacccagggtcacaggctttctttgtgtctggctgggtttccactaaaatgcttatgataccaaagctcaccttcaactaatttttagttaccttcaagatgtggagtgaatgtactatttgaagcctggcattgttgccctgtgtcagaccttctctcagggcgcaggtcttgtcaaggtccacatccctcggc

SEQ ID NO: 95252 - DNA, 311 bp, Homo sapiens
cctcctgggttcaagcgattctcctgtctcgccctcccaagtagctgggactacaggcgcgtgccaccacaccctgctgatttttttttttattttttagtagagatggggtttcaccatgttagccaggatggtctcgatctcctgaccttgtgatgtgcctgcctcggcctcccaaagtgctgggattacaggcgtgagccactgcacccggcacagctgggcagtcttttactggggcaatgtgtcttctgttggacgcatcttggagcagcacagctgagcaacgcatcctcgtgtctgtcatgaag

SEQ ID NO: 95253 - DNA, 468 bp, Homo sapiens
ggcgagtgatgtccgtacagctcacaccgcgtccatcagtccacccaccatggcgagtgatgtccgtacagctcacaccgcgtccatcagtccacccaccatggcgagtgatgtccgtacagctcacaccgcgtccatcagtccacccaccatggcgagtgatgtccgtacagctcacaccgcgtccatcagtccacccaccatggcgagtgatgtccgtacagctcacaccgcgtccatcagtccacccaccatggcgagtgatgtccgtacagctcacaccgcgtccatcagtccacccaccatggcgagtgatgtccgtacagctcacaccgcgtccatcagtccacccaccatggcgagtgatgtccgtatagctcacaccgcatccatcaatccacccaccacagcaagtgtctgcgatgtctgtagtgtctgcgatgtctgtagtatctgcaatgtccatgc

SEQ ID NO: 95254 - DNA, 500 bp, Homo sapiens
cacggtggctcacgcctgtaatcccagcactttgggaggccgaggagggcagatagtgaggtcaggagatcgagaccatcctggctaacatagtgaaaccccatctctactaaaaatacgaaaaattagctgggcgtggtggcgggcacctgtagtcccagctacttgggaggctgaggcaggagaatggcgtgaacctgggaggcagagcttgcaaagtgagctgagatcgcaccactgcactccagcctgggcaacagagcaagactccgtctcaaataaataaataaataaactaataactaaatgttgtaacacaaaagaggataaatgcttaaggtgatggatatcctgtttaccctgatgtgattattacaaattgcatgtctgtaccaaaatatctcatgtacccgataaatatatatacctactatataccgacaaagttaaaaatagaaactggaagacaaaaaataaataaaaatcaaataaagcttctc

SEQ ID NO: 95255 - DNA, 518 bp, Homo sapiens
  misc_feature (3)..(3): n is a, c, g, or t
  misc_feature (17)..(17): n is a, c, g, or t
  misc_feature (36)..(36): n is a, c, g, or t
  misc_feature (40)..(40): n is a, c, g, or t
  misc_feature (65)..(65): n is a, c, g, or t
  misc_feature (88)..(88): n is a, c, g, or t
  misc_feature (98)..(98): n is a, c, g, or t
  misc_feature (104)..(104): n is a, c, g, or t
  misc_feature (139)..(139): n is a, c, g, or t
  misc_feature (174)..(174): n is a, c, g, or t
ggnaaaacttaaacagnaagcagacccaactgtgtnatgnatccaattacaaaaaagttatctgnattttatttcttatatatttggncacaaacagncagagnactgtaaagtctactacacatgttggaactgctgnacaggtaaaagtaacccagttagataaatctaggnctttccactccatatattagctgaggcaggagaattgcttgaatctgggagacggaggttgccgtgagccaagatcacgtcatgcactccagcctgggcaacagagcaagactccgtctcaaataaataaataaataaactaataactaaatgttgtaacacaaaagaggataaatgcttaaggtgatggatatcctgtttaccctgatgtgattattacaaattgcatgtctgtaccaaaatatctcatgtacccgataaatatatatacctactatataccgacaaagttaaaaatagaaactggaagacaaaaaataaataaaaatcaaataaagcttctc

SEQ ID NO: 95256 - DNA, 918 bp, Homo sapiens
  misc_feature (730)..(730): n is a, c, g, or t
  misc_feature (751)..(751): n is a, c, g, or t
  misc_feature (754)..(754): n is a, c, g, or t
  misc_feature (791)..(791): n is a, c, g, or t
  misc_feature (829)..(829): n is a, c, g, or t
  misc_feature (835)..(835): n is a, c, g, or t
  misc_feature (847)..(847): n is a, c, g, or t
  misc_feature (863)..(863): n is a, c, g, or t
  misc_feature (878)..(878): n is a, c, g, or t
  misc_feature (882)..(882): n is a, c, g, or t
agcggattaacatcacttccccatggcgaggaactccatgtgaggctctgggggaacctgactatgtgcagtcgtttacagcctgggtctcctggagcctatgaaatgagaagcagtcattagcacagcaagcggccctcatccttccttctcaataataacactgtcaccagaggatggaaaattaccctgacgtctctgtatctccaaattgcacttcagagacagactgcgtaaggcaaacagaccctgagtgaaaacctcctggctagacttccaagccaaggcctaataaataaccctgaaatatacaaagtgatggcagctttgctctgtggctcgtggcttctgccctgggaaggaccatgaatttcagcgtctgacagatggggtcagaaagtggagtctgcctggtgggttgaggatctgcaaattaaccccatggtggtggtttcagaacaagtgtgcctgctcacgcaaagactaacctctaagaaaggagcaggcccggaggtgaggccccctgggcgtgaaagaatcaaccccagtccacaaagtccggagatgagacatcctgcctggaggagggagccctgtgcatcgcaggatcaaagaagccaaacaggatctttagtggtgaccgaaaatgctcatgaggagaaaggctgcatggcattaagtgaaccccattgaaagggcccagtgaacagagcccctggacattgccggnaggaaaggagaaagccagcanagnacacaacgtatcaggctttcatgtgtcattgggtganagggagtcacatgggccaaggaggggaagcaggtgtcntcagancagttccaaagncctctaggcacagtancaggcatgcttctgncctnctctcctttaaatgtaagtaccccaagtccttctca

SEQ ID NO: 95257 - DNA, 117 bp, Homo sapiens
attggagagagcggctgcagggggtggtggagatgatgccaggtttcagtgggtgagaagtggatagaagtgaaggaggagaaatgacgacattaaaatctaggtacaacatgttgg

SEQ ID NO: 95258 - DNA, 1241 bp, Homo sapiens
gatcagaggtaaagctccgtactttattccacaggacagatcctatgtagatggcagaccatagatagccttaaggctcttggctgctttcatgtcctactgctgccataacaaagtactgcatactgggttggttagaacaacagaaacgtgtcctcttacagttttggaagccagaagcctgagatcaaggtgctggcagggtcatggtctctctgagggcaccagggaggatctatccccatgtctctaaggcttctggggttccctggctgggcagcaccactgcagtcctcacacagtcactccccagggcctcttctctgtgtccagccatattggactaggacccacaccctatgtgagaatgaccacatcgtaccttaattacatcacaatgaccttatttccagataagggcaatctgaggtactgggggttaaggcttcaacctgtgaatttgcgggacaccattcagcccagagcactgactggtgctagttatatttgtgtgtctggctgtaccctgtgatcacctggttgatgtcatgttcctgaacttttgtgagtgcaagagaagagaaggtatgtggactggccccgtcgccactctatggaataagccacacctcacagccgggaggagacgcaggtctgtggcatggatgaggagttccggacatctcagcgtatctgggagggaatgtgcctttgggtggttaagtctgtgacatctgctgaatcagagtagaacctgttggctgaggaaggcttgacttctgccatgctgcaggtggtactccagctcaaatacaaacgctcacagccgatgcctgtgctttccacgcaccatgttttgttctgggcctagtggaagtgagtgagcctgagaggtgagagtttgaccatgcaactctgtagggagggaggtgtcctcatagtctcacgttgcaccaggtgctgtgttcttcgtggagtttagtcctcttatggagaactcctgatctcattgccggataagcacaccaaggcctaaagcagtttgagtaatttactccaagcatcttagccaagtaccaggtgtcgaccatcagtctggggccctgagagctactgccagccacagtgctataaactctccccaccaaaaccgcaataaaaatttcagaaggacgagttaacaatggcagagaggggacaggatgtctggggtgggtctggcgagggtgaagcaaaaggcc

SEQ ID NO: 95259 - DNA, 974 bp, Homo sapiens
gatcagaggtaaagctccgtactttattccacaggacagatcctatgtagatggcagaccatagatagccttaaggctcttggctgctttcatgtcctactgctgccataacaaagtactgcatactgggttggttagaacaacagaaacgtgtcctcttacagttttggaagccagaagcctgagatcaaggtgctggcagggtcatggtctctctgagggcaccagggaggatctatccccatgtctctaaggcttctggggttccctggctgggcagcaccactgcagtcctcacacagtcactccccagggcctcttctctgtgtccagccatattggactaggacccacaccctatgtgagaatgaccacatcgtaccttaattacatcacaatgaccttatttccagataagggcaatctgaggtactgggggttaaggcttcaacctgtgaatttgcgggacaccattcagcccagagcactgactggtgctagttatatttgtgtgtctggctgtaccctgtgatcacctggttgatgtcatgttcctgaacttttgtgagtgcaagagaagagaagaatagcagtatgaggtgggccatggcccaagaggtatccagcaggaagtggtggcggggaagaaatttgaaacgcctcccgtgcctagagcctctggtggattctggggaaggaagaggacggggtgtgcctcacgcagatctctggagaaacgttgaggagctgaacgtggtggcagcctggtgtggactaaacagagtcggttagaaaagtgttctgatgcagtcacagctttcaaggcctcagcttgcataattacaaggggcaggagctgaaatttcatctgtgcgacatcagctcaaaaggagccgagactggaagaaaccgggagctatgatttgcactttgataacttaagtgaaataaatcgatgattccaaatggaaaaa

SEQ ID NO: 95260 - DNA, 436 bp, Homo sapiens
aatccataaggaaaaaataactaaaattacctcgcataaatttatcaatgtttaataagaaccattttgggtatttcaaacaggatgcaggaaatgtgttgcaaaggtgttgaaagacctggaaaaacaaaatagaatatatggttatacaaaatcgatgatttatgtgcttttgggatgccactgtcatgcctttgctgctactgccatcactgccagagtcacagccagaagcactggtagaggccaggagaaagtagcttcttccttcctctggcttccagtctcttattagtgcctctcactggcagacccaacaggaggacagctggaaagggagtctgggaagtgtaattgcaggcttccagtcctgggcattagaaagaacatggctgaagagcaaatgcaggacagtagacactgttcagcacaatcc

SEQ ID NO: 95261 - DNA, 410 bp, Homo sapiens
aaatgctacagaagatgttttccatcactagtgatatatttaagtgagttatccatataatattgggttcctttgtaaccaacacacacttgggtgaagggctgagttaatagttcattttgtggccatgaaacactttttctatgtgaagctgatgtgccgatcgatgacttcagtttctgattttgaccttgtcactagttcctagccaagtgataatactgacactagggccatatctctttagactctaaagtttggagaccctattagttttcttggaagatatatagttctgccagcaaacttggacacttcctcataaatatggtcatctagaagctgccaaaatctaataagattgatcagtttcatgctaatgggtaaatcagtccatttagagaattctt

SEQ ID NO: 95262 - DNA, 409 bp, Homo sapiens
ccttattccttttttgttcacatacttccttaaaaaatttctgaaagctgtgtatgtgggaagaggatgtgactctaaagggatagcacgaggggcatgtatctactctgtgtcctgtacaagcaggtggtgagtccataaatctgtgcatgtattaaaattcatagaactgtacacaaaaagaaaatagctatctactctgttgcacatgctttgcaagagcatctaagagctttgggtgacatctaaaacctttttcactacaagttttaaaaagtgctaattctatcatttttgttgtgttataaatacagtcagtccttcacatctccaggttctgcatcttggttggattcagccaagcacagattgagaatatttgagggacaaaaaacaataaaaaatatac

SEQ ID NO: 95263 - DNA, 228 bp, Homo sapiens
aggctgagatgatgagaaacctttttcctttcttctgtggtgcttcactccacctgggagctcactgcctagcatctaacatgaggagccccggcacttttcattttctagtcctcacaaaagtgctacaaataaatattattttgtgcccattttatagatcagaaaacctaagtctcagttaagttcacctgctcacaatgaaaattagtgacccatgaagccaga

SEQ ID NO: 95264 - DNA, 181 bp, Homo sapiens
tctcaaggcaaagagaaagaatgtaagttcttttgttgtttttgagattggttctccctctgttgcccagtctgatctcaaacacctgacctcaagagatcctcccacctccagcccccaaagtgttgcgattgtaggcgtgctggcctactttctgttctggttttctttcttttctttt

SEQ ID NO: 95265 - DNA, 345 bp, Homo sapiens
aagaaaacagggctggacatggtggttcatgcctataattccaacactgtgggaagctgagaagggagggtaacttgagcccaagagttgaagaccagaccagatgacatagtgagaccccatccctacaaaaaattaaagttggctgggcatggtggcacacgcctatattctgaactactcaggagacttatgtgagaggattatttggaacgaggaagtcaagactgcggtgagctgtgattgcaccactgcactccacctgggagacagaatgaaactctgtctcaaaataaaaataaagaaaaaaaatgacacctgagatattaactgtgatcatcagtg

SEQ ID NO: 95266 - DNA, 707 bp, Homo sapiens
ctgctttgaacgtgaagacaaaagaacccggtttctgttcatacttttatatcctctcttatgcagtctatagcctgggcttggaacttagagccttaacagactttaagacagtaccacgtctgaacctagagttatattgtattctttctattagcagagagctttctgattcctaagaatttccttactctacaagaaatgggatttctgctttgcaaagttcccttcagtggaatgaagttattgttgcccagagcttccctggtacaactctatggacttgggcatgattctccctaaaaatccgtggaagccgtgatcagagcccttggaaaattgctctggtgagccaagtgggcagtggcagtagagcagttttcagtagtggtcccacggtggcaagttggctgtgaagcagttgaggatgacatgaatgatggctcttcaagctaagactgagtagttgtaatggaaaacaaggtcagtcacctggctagttgatgatggtgggagcctttttttttttttttaaaggagaagaggagccatttattaatccccactttgggcatgattcattggctcattgtcagcgcctagctcagcttggctttaagtaggtgatggccaaactgatatgatcgttgtatattcactggcttcaagaaaccaccagtgggaaatcttatttatggagatgatgg

SEQ ID NO: 95267 - DNA, 421 bp, Homo sapiens
acattttaggaagggtataaattaggcatggccacaggcaggaagacctgagggatctcatacagtcagggataagagtctaaacgacaaggtagccatgaacattcaaagaaagaagactgaagagactttagagggcagtccccatgggacctgagtgaaggggtttgggagattcacagctttctgctgtgaagtcaaggatatcacaaactatcggaataaaagaaacagtcctatggctgggggtaggtggatgaatgtggttccattttgaacaagaggagaaaattcaggtaattcatttggattgattaagcaaaagaatttgaagctgaacattatagaagcaacaacaattcttatgatattggggtataggaaacaggcccaagaaagcacaatatttcctgtttctctt

SEQ ID NO: 95268 - DNA, 253 bp, Homo sapiens
tactaaaaataaaaaattagccaggtgtggttgcaggcacctgtagttacagctactcaggaggctgaggttactgtgagccgagattgcaccactgtactccagcgtgggagacagagtgagattccgtgccctcccccccaaaatcttattcttttcactatgaattttaaggaaataaattaaaactccatatatcaatgcttaattctcttcttcccatcctcatgcctcaccccacaacttgattttg

SEQ ID NO: 95269 - DNA, 206 bp, Homo sapiens
ctatacaatggcagtttaatgtcaatagctattacctagaacttttatactattcaccagagaactttccaagttatgtgaactggaatgaaatttctagaacaaatatctgtaacttgcatatttggaataattaaagatgaccatttaaagtagcctttatttaggccagtccatatatacacattttatatttaatcaatgat

SEQ ID NO: 95270 - DNA, 189 bp, Homo sapiens
aaaggtggagttaccatcatgagagaatataaagtacaaagattctaagactagaaaactttattatgggccgggcatagtggctcatgcctgtaatcccagcactatgggaggctgaggcaggaggatcacttgaggccaaaaactcaaaactagcccaggcaacatagtaaaataccatctctagta

SEQ ID NO: 95271 - DNA, 613 bp, Homo sapiens
gtgtaacaagagactaaaaaaagcaatatggttcctccaagcagatagtggtggctgggggtagaagtgaaccagagacagttagtttatatacctctgaagagaacatctcctgtgatcccattattgcattttttcctaagtctgaaatatttaccctggtttctatgatttaatggaaagaaaaaacgctgaaatgcataaaggttttcatttctgatagaaatttggtgattatctagtattgaaatttggctattttttgacatgtgcttgtgtgtgtgtatgtgtgtgtgtgtagagggagagaggagatggggggatctcatgctgatgaataattctgaatttttacttgaaagatatttaaagtaaaggttcttgaggaggtgatttgtgtctttaatcttgctcaaatgtaaaataaagtgtaattctaaacatctttaaatgttcctaatttcagatctcactatcctcattaacttaaaatcaaggaacaaatataggcttggcattttctatatattttttctgtatctgctaaactattttaattcataaattctatagcataaaataaaatggaaataccatttgttaagcagggtaa

SEQ ID NO: 95272 - DNA, 446 bp, Homo sapiens
ctttcctgctactgctggggcattggcagcgctaatcatcactcacaaacaggctgcttcgcattggaacttggttgtaaaatataactaatgagaacttttccaggagtttaagctgcataatatcttatcctctttatataatacacctgtatatttttagggattaggcaactttgatgcctgaaaaagtattatcagaacacatttcaaaacaaaattatacaactgtgcattgtttccatagacttccttagcacactcctctgagctcagtggggcctaactgcttcataaaacaacctgaaaatagaatacatggcctctctcttcctcactaggctagtgttgatcagggaggacaagtggagtgctcaagaagtcaaacatggaaaagaggatgacagaaaccagtttgatgaactgggagagacagaacagagaca

SEQ ID NO: 95273 - DNA, 141 bp, Homo sapiens
ggtagtatggctaatctcaggttaaacaacacgctaataaaagtaaactaggcagcctccattttttttttcctcttttttcttttttttgatatggagtctcagtctgtcacccaagacggagtgcaacggcacgatctt

SEQ ID NO: 95274 - DNA, 374 bp, Homo sapiens
ccagggaaaggctgaaaaaaacccaaagattagcacacagactaaaacctcttagtcccttaagcaatgtttgtattcttgggaacatgtgggaaaactgcgtaagtggtgtccttggagtttgctttaaaagtaagatcttttgaaaaatgtttattcatgttctttgcccactttttgatgggatttttttcttactgatttgtttgagttccttgtagattctggatattagtcctttgccagatgcatagtttgcaaacatacttgggtgacgggtgcactaaatctcagaattcaccactatagaattcatccgtgtaaccaaaaaccacttgtacctcaaaagctactggaataaaataaaataaatg

SEQ ID NO: 95275 - DNA, 908 bp, Homo sapiens
agcggaggttatgcacatatattggtaggagctatatgggaaatctctctactttcagctcaattttgctgtgaacctaaaattgctcttaaaaaataaagtgtgtaatcaaaaaatactccttgttaactaacatgatccatatcttacagatgggaaactgccccttcttttacaggaggatacaatatgttagctgtagagccagtactgtaaccttgaccttcatttcaaggccaggtttctctaagctttactaggctactcaaaactcataacctgtaccatgatggaatttgatattgtttttggactgatctgtaaataaatacatttgtaatttagatttccatttagacagttcgttattcatgatagacttactaaagaatctctctttttaatgctagtgttcctgaataacactatttataacaacagaagaaaaaatactactactaatagatgcatctgtcgattttgtaccatatgtgaggtagtatgctaagcatccattgtttatggttctagtaataaccctcaaaggtgggtattatattatatttttggaaaacaccaaaaatgaagcttagagagattaagatatacatcaaaagaacacagaactgtgatctgaaatgaggtctcttggtcttcaaagttcatattttttctaaagggcaggtgtagaattcttacattgaagatgtcctttaagattctggagcaacttggaagaaatgaaaaagggaagagaaacatagagattaagactgggccaggtgtggtggctcaagcctgtaatcccaacactttgggaggtcaaggtgggcagatcacttgaggtcaggagatcgagagcagtctgaccaacatggtgaaacgccatctctactaaaaatacaaaa

SEQ ID NO: 95276 - DNA, 332 bp, Homo sapiens
ggtccactctgcgcggcagcaccgcaccccggagccgcagctcttcctcccgcttgcccgacagccctggtgccaagccctgtctgagccccaccaggaggaagcgcgtgctggctgctctccatctgctctgggactctggcctgctgcttcctctgcctgccactccccaaccccgtttcctcctctgaaaactggagctacacctgccccaacagggcagaattaccttaaatggcacaagacaattgtacagcagacccacctcttctccaaagttttcagggcccaaacccagacacctccttgcaggactcatggctaccgtgggc

SEQ ID NO: 95277 - DNA, 635 bp, Homo sapiens
aatgtctctggacattgccaaatgtctcctgaggttgggggagtgagaatcactgccccacagttacatcctggcagagttaagcaatgaaacaaaatcactggccattaataatactatatgattttcaattaagagcttatttacacaccaagtaccttagaaacctgatctcatcccatcctcatcaaaaccttatggtgtgtacaagctggaatgatgcctattttataggttagggcactgaggcacaaagagtttagtggatgcctagctgcacagtagtgaccgatagagcaggcatttgaagcctgccctgccatcttagtcagtgcaccgagatatgaagagcatttttaaagtgtgctaggctctttcattttcattacatgtccactgatatggtttgactctgtgtccccaccgaaatctcatgtcgaaatgcaatccccaccaggcctctcctccaacactgagaatcataattcaataagagatttgggtggggacacagagccaacttatatcaaaggaagaggaagaaataaaaggcatcaaaattggaaaggaagaagtgaaattatctctgttcagactacttgatcttgtatgtagaaaacctgaagattccacca

SEQ ID NO: 95278 - DNA, 762 bp, Homo sapiens
atttggaacaactcccatgtccttcctggtactaagtcaaaaactatgttcttgaagaatccaaatggcaggtcagggtacaagcaggactttttggttttttctttcctcatcagcctcactctcttcttttcatatctgcctcaagcggtcctaaggaattctctgattgatcgaagtcaagagagtgacttggaaattatgctgtaaggagtgatcaatattagcaaaagaaaggcttgtcttgtagaggtatcactcagaaacctctaatgagcctaaagctccttccataaaagcacaggacctcaaaggatgaagcagcctcttcagtatgtaccctagacacagaaagaatccagaagtagaagacagaagggatcaaagtacacggagagatacgaggccaaggagggactctcagctgcccaggcgcggtgatcttataataggcagacaaattccttggtactcctcttttcaagaggtagtaccctccccttgagtgcaggctgtacttagtggcttacttttgaaaaacaaaacacaacataaatactggtgtgtgatttctgaggctcaactgtaagaggcattgtggcttcctctttgcattttctctcattgatgaggacaacacaaggacactcagcagcccaatggacaggtccacatggtgaggaactgaggcttcctgacaacagcccacaccaatgtgccagcaacataaaggaactgtcttggaagtggatcctgcagccc

SEQ ID NO: 95279 - DNA, 689 bp, Homo sapiens
  misc_feature (629)..(629): n is a, c, g, or t
  misc_feature (633)..(633): n is a, c, g, or t
  misc_feature (638)..(638): n is a, c, g, or t
agcggggcatccaatcaacactttaaatataaaacttctaccttttatactatttcagtgataaaactaaaactacctctcagaatagcattttatgtttgtattattaaactcagcttttagtattatacatgtagattgaggcatgtaacataagaaatatgtaaataacttacaacatgctttggaaggacgtttgtatgtgtgtctttggttgagagagtggagcaataaaaaaagtgtaaatatagcatgctgaagacctgcatggataaaagatttcgcttctgtccctgatcgtatctttattcaattcagttctccacattgtgctatattttttcaattttgctttatgtttttcttttgtttgtttttaaagttaaaaggaaccttggaggttctccagtctatttttgcataaacagcaagtagtgccagaatcacacatagaacttctacaagttgttagatatgcccaggcttccgttcagtaaatgtggcttggaacccaggtatctggtttgttttgttttttaactttagaagtgattccgatgagcagtctgttgaggactaatacctttattaaaaggtttaataaaatcaaaccttttcatagaacaaanaccnaaaanacaccaccacaaaaaacccccccggggggggagcccgcaaagggggcgacc

SEQ ID NO: 95280 - DNA, 410 bp, Homo sapiens
agcggacagggtgtgcactatcatcgtaacagcagagacggagagcaagatgtgaggaggttaaaagtcagggtcagaagttcaggttgctctgaccctcaaatcaatttcaagcactgtttgtgacattttcctgtgttccctcgcttgatgttagtctttgcaatgaaccaccgaatcagacttcagggctcatgggactttggggtttcagtagggtcaggtcaatttctacctaccagtgtactgtcacctatgaggcaaaccattatctaggcgtttgagaacctcaaagttttgaagctctgaggggaaagagagaggatgaagcgctggggcccctgtgtctttggggcctgacatagctcaacctgtggcttcagggggaccgtgtgcagccaggtcacagt

SEQ ID NO: 95281 - DNA, 386 bp, Homo sapiens
gccatagtctagacacagtcccaacagtgagagactcaaaatgcctcaggaaaacagaccatgtgctgtcaggtaccaccaagagtcagacgcacagaaatagtgcatgtgtgagctgaggattctgtgccttgcacatggggtggagcatggagacccaggagcacatgaagcactgaccaagctgagggcctacagtgtaccttgcacatggggtggagcacagagccccaggagcgcatgacgcactgaccgagctgagggcctactgtgtgccttgcatgtggggtggagcacagagccccaggagcgcatgaggcactgaccaagctgagggcctactgtgtgccttgcacatggggtggagcacagagacccaggagcac

SEQ ID NO: 95282 - DNA, 735 bp, Homo sapiens
aatttaataaagatagtgctgaaagaattccttaggtaatctataactaggactactcctggtaacagtaatacattccattgttttagtaaccagaaatcttcatgcaatgaaaaatactttaattcatgaagcttacttttttttttttggtgacagagcaagactccatctcaaaaaaaaaaaaacctgcctgagaaagctcaatgctgttctgaaaacatactgttccagccaaaacctgtaaatagtgataggtccttaagccccctcttaaagcagttactttagaaagcttgcaattataaaccatttctctgcccctttgagatgcaaatctaccaccaagagctgtctcctcagctgagtttgaaatgcaaacattcagagagccagctcttgctccagcctctcagttgctgtgggagtgtaagggcctaactttggtggctgtcttgctccaactttcacaactacctcagtcgtaaagatacaagaagtttgtttctactctggataaataccaattagttaaaaaaaaaaaaaaaaaaacctgatgccttagtcatatggaccaaactcccccgtaacacctttcagtgtcttctttagtacaccccaacattttcaacaactcctgatttttgtttcccaaagtggagctcagttcacactggattctgttccctaatgcagtagttattactgaataaaatctgtctttactgcctttta

SEQ ID NO: 95283 - DNA, 294 bp, Homo sapiens
gaagacaggctgtgaggaagggtgtctcaggtggggagcgcaagccagagtaaggggagggtgtactgggccttttgtattaataggaaaaagacacaagttcaaaaagaaagtaaaacttaaaaacaaacatcctcacaaaggttgataaatattggcctggtcgtaggtgccccctggagaaaaatttacttgctactcacttgaacaatccaccgctccagtaaatagccattagtagtatgaggtctggtaatgaacatattacttaaaaccttcaccgtctgtcccact

SEQ ID NO: 95284 - DNA, 570 bp, Homo sapiens
ctttctcctaaggctgacaacaaggcatgtatgttcacattcaccacttattaaacacagtgctaaaagttttagtgcaaaaggcaaataatggaaataaaaagcatacagattaaaaagtaagaaataaaactgtccctatttgcccatgccagaactatgtaaaaaatcccagcaaatctaaaacaacaacaaaaagataaccacaacaaaactcctagaacaagtgagttcagcaaagttgcgtgataaaagataaacataaaaaaatgtattttatgtgctaatgatggacaccaaaattaaaattataattctatgacatgaaaaacttaaatgtatatctagcaaaatacgtataagacttagatgatcaaaactatacaatgctgaggaaaggaatcaaaggtgatctaaataaatgaagagatataccatgttcataaactggaagattcaataaagatgtcagttcttccaaaattgatttacaaatttaatgcaattcttatcaaagtcccaacaagatttttgtagatatagcatgttgtaaaatatatatgaaaaggc

SEQ ID NO: 95285 - DNA, 759 bp, Homo sapiens
agcggccggaccctgagagacacattaagggagcaataacctgttaaagaacaatagatgatagtcacagtctcaatctcatttgcttctcctgggaaggaaacactgagatgttgtaggactaaggacctcaggttgcatttggggcattgttcgaggggtttcccatgacccatgcaaccagcattttagctgcactagacttctcatggtttccagaatatatgtgaaattgtatgttatgttgccttacttctttgcttgaattcttataaatatcaccttttctctttagcttgatagtttcctcccctcaaagtgagcctaatggctttctctcctgtatgaaaccttatacacaattgtatctgatgtttagcatcttataggtatttgttcactaaatactaagccatgcactcagggatcacaaagagactgtaatactataaataatatctaatactccaaatattgatgaaattgaatggaactgaatgtgtgaacactaagccaagccttcaccagttaacaaaaaattatcttttgtgatctgagattcatatattttgtctacttttcattaagaataaagtgagaagcacattaacaatctcaccgttttagtagtaatcattttcaaagggacgttctattgggaaaggaagaatttgtatttaaggcaaggcaaattaatagatattaacttgtttcaaagcccacggtgaatcattgttaaagaatttattaataggccat

SEQ ID NO: 95286 - DNA, 382 bp, Homo sapiens
ccctctcaaaggtaagtattatacccatttcattcacggcaaaattgaagctcagggaaattttaaaatttgcctcagttcatataagcagtcaaaccaggattcaaaccaaggcaatctgactccagtctatccttaaatcccattattctataatatgtcctctaaaataatcattttcatagatcatgattcaccttctaaagtaaattttagttcacacagaagttatttagctattcagtaattaaaaggaacttgatggctttacatcaaattatattttatgaaaatgttgaggaattttatcagtatttgctttcctttcattttactctataacatgactgatgaaactgtgaacagatctccatggaaagtc

SEQ ID NO: 95287 - DNA, 378 bp, Homo sapiens
gtgctcctggacgcgctaatatgctcagtcactgcggctgtgggtgaggggacggacggaggggcttggggctccctcttcgggagctggatgctgaggggtagaaaaaagggggggtttatcataacacaacccccccccccgaacacagccttacactgaaaatagtgacacacagcgtcacacaggacatgatgtcacacacatacacacaacagccctagtggcccagatacactgggaggtgccacacatacctagccttgcagctgccacaggtcagaaccatgcacagacacacaggggcaccacgtcgtgtacacctagtaagatgtcacttacatggcgatccacacacacacagttatgtcatccaag

SEQ ID NO: 95288 - DNA, 675 bp, Homo sapiens
agcgggctgtgtcttccttgcccttttctccacttcataccttgttcatagtagagcctcagtaaatgtttatcgagtgaatatactaatgtaaacagagcgaattaatcggaatcagtagcaaccaagacatcaatgagaatattctgctttttagaaatagcatttattcaataaatatttactttttaatttaagttgtaaataggtaatatatgttcatgattgacaattcaggaactgtaaaagggtatacaggaaaaaatctccctcccagcacacttcagctacctcattgccctcctcatagacaacccaggtttcagtttattgtgtctccacccagtgatagtttaggcctatacacttaactgattcacatgccttcccccttaaccctaatggtagagagctatatacactgtcatgtacctatttccatccaccaatagacattgcgcagtgaatgtgcttctccaccctatgatcttcattccatgtactaccttaattcctcattgccatatatggtaacgtaacacaggtttgagggattaggacatggacatctttgggaagacattcttcttcttatttttttaaacagagtcttgctctgttgcccaggctggagtgcagtggcacaatctcagctcactgcaacctccgcctccc

SEQ ID NO: 95289 - DNA, 167 bp, Homo sapiens
tgttgcccaggctggccttgaactcctgggctcagacaatccttctgcctcggccccgcaaagcgctgggattgcaggcgtgagcctctgcttggcctaggagtgtgaattaagtccccactcagtgcccaggcctgagccccatgttgggaacacaggagtaagtg

SEQ ID NO: 95290 - DNA, 124 bp, Homo sapiens
catgattttccaaggagaaaacgcaaagccagcaggtatttagccttatccaagtgaaggcaattattaaagcacaaacagtccctctcaaagctgtgcattcacattctctttctctctcttt

SEQ ID NO: 95291 - DNA, 447 bp, Homo sapiens
ttctgtctgcctttccggcctgttgacgtggagacgcgcggggccttttcccttctgtctgcctttccggcctgttgacgtggagacgcgcggggccttttcccttctgtctgcctttccggcctgttgacgtggagacgcgcggggcgttttcccttctgtctgcctttccggcctgttgacgtggagacgcgcggggccttttcccttctgtctgcctttccggcctgttgacgtggagacgcgcggggccttttcccttctgtctgcctttccggcctgttgacgtggagacgcgcggggccttttcccttctgtctgcctttccggcctgttgacgtggagacgcgcggggccttttcccttctgtctgcctttccggcctgttgacgtggagacgcgcggggccttttcccttctgtctgcctttccggcctgttgacgtgg

SEQ ID NO: 95292 - DNA, 193 bp, Homo sapiens
tccagactcatggatccatccagtcatctatctttccactcattcatcttcccatacatttttccacgcatccatgcattttcccatctatccttctatctttcatcatccatcccgtcatcctccacctttccaccgatccttccatctttccatccatctttccttttttttttttttttttggagacgga

SEQ ID NO: 95293 - DNA, 826 bp, Homo sapiens
caatacttagagcacagggtttgttgcaagggtaaaacaaggctcaggtctcagcgtggtgcctgtcacctggtgtgcttcccagtacaggctggcattgtaggatgggcaaagccgacagtagctcttagccatcatgtgggagccaaattaaaattggcctgtggcatatggtgacagtattgttctgaatccacaattggaattcatggtctgacgaatacttttctctcttatttataaattcatttaattgcaaagtttctaaaagtacacacatcaaatcacatttagttatccacttaacaaatcatctcagtatagtgttaaatttatatgaagttgtgattgtcctaggaaagctaggggtaatggtccctttccatctgggccattttggggccactactagcatttgggcaactatctcttaccttttcttccctttcctctccctcaacccaacgcccagtttctgattttgttgcagagagctattttaattagccatgttaaatgttaattgttttggcagacaaaagaaacttgaataagcttttccttccaaaactcaagaactttgctttctaagagttaacattggaaagaatgtttctggcctggaaaatttaggtagcaacctgaaaaggaattcatgtcctacaggaattggaagttgggtagagagctcaatttcttttgagagagattaaaatatatacttctgtctgaaatagtaataaaaatctattttttcatctttttgctaacagcctcaaaatatgaatgattaaattcaaaatagatttagcactaaaaaaaaaaa

SEQ ID NO: 95294 - DNA, 267 bp, Homo sapiens
agaatcaaaaacttgtatgtatgggagtaactgagattattaacaaaaaaatatataactggtttccagactgactagtagtcagaatcatcagtgagactttgaaagtgtggatccaaggactttgacacagactttgaatttaggatatttagggattcattagattccacatttttaacatgctttctagatgtttcacctgcaccagttgggttccattttgtatacttatgtttgggaaccatatgtagctttgcttttgta

SEQ ID NO: 95295 - DNA, 712 bp, Homo sapiens
ggcgtcgcggacctttctccaggttttcagcctgtgatttgataaccgccgccgggtggcgtggagcgtcccgagacttcttccttcattgcagcccctcttcttttagttctagactgaagttcgaggaacgcaccacttggctgaaattaggatccagatttcccaaacttccttcggaggaaaaagccctaacgatggaggacagtgaattcctagcttatgtggaactactagatgaagtggaacaaggctcagtgagagcaaaagcatcttctgttagtctacatgcagaaagaacctggatggagaaaatgaaagttgaagacctaaatgtatgtgagcctgcttctcctgcccctgaagcaccagctacctctctgctgaatgacctcaagtacagcccatcagaggaagaggaggtgacatacacagtcattaatcaattccagcagaagtttggtgctgcgatactccatatcaagaagcagaatgtcctgagtgtggcagcagaaggagcgaatgtatgtcgccatggcaaactgtgctggctgcaggtggccacaaattgccgagtttacttatttgacattttccttctgggaagtcgagctttccacaatggacttcagatgatactagaagacaagagaattttgaaggttatccatgattgtcgttggctttctgattgcctctctcatcagtatgg

SEQ ID NO: 95296 - DNA, 404 bp, Homo sapiens
gaggtcctgattgtccttttccctacggtggtaccaatactaagaataatgcccacatctggcaaggactcactgtctaattggagagagagaggaaagcagggagatgaagagaaggggagggaagggaggaaaaaatgaagtaagaaaacattgtgaagcctctactggcatgtttaatcgtttgctatgtttgatgtgaacatcccagatcccagaaagccacagaagggaggacagaaaaaaacatgataaagatgtttgtgggaaagtaaaatcaatccggtgatactgtaagcaaaacatcctgcaatattaggtttaatgctaaataacgttctatgaaatatttatttaaaatctgtcatcttaattgggaaggtatttcagaatgcttcatatgc

SEQ ID NO: 95297 - DNA, 424 bp, Homo sapiens
gtgtgtgtatgtgtgtgtgtatgtgtatattctcactccaactgcattgtaagctccaagggcaacattctgtctcctatttctttttcttcctctaccacatggctggtgcatgattctgcaaaaaaaaaattggcactcagtacatgtggctgactgacagacacatatatttcagcctgcaagtcccacaggactataaattgctgcacgaggtatttgagttagaagagacagaagaagttatatttattaaaagtttgctctagccccgtgctatcatagatgctttctctctaatcctctaaacaatcccatgaggtaggcatcaccacccctacttcacagatggggaagccgtgccatgcccagggtctctgctggcctccagtgatagcacactgcagttctcatggcactcctg

SEQ ID NO: 95298 - DNA, 446 bp, Homo sapiens
ctacccagattactacaacttttaggtaaataatgtatatgccattttttctaaggctatctagccatttttgatatagaaaacaatattgtgtaagataagctgagcatatttttcacttcgtttttgttttgcaaaacaattttattggttttgttaatgccccaatcatcagtactgcttggtataagagccgagtttgaagaattatcatgttgcaaatgtattttgctcagttatttcaaattagtagacagaattgagaagtggaacattttagaaaaatattggttaatcatacttggaatttggttatgtaatatctctttctcttttggggaatacaaaggttcataaactagtgataatcttcactcttggaaccattagatgctatcatgatgttagcacagaagataaatttataatgttgcagtgaggtaagg

SEQ ID NO: 95299 - DNA, 336 bp, Homo sapiens
accatgtgggacactggtgggaagccccttagaaagtgcaggaagggaacacgtatagaatttgagttttttgtctgaaggggttgtttttttctttggtcattatggtgacttaggatttgcaagatggaactaatgcgtgacttaacatatattatttggattgctaatatttcagttaccaagttccaagtacctttcaaatgaaagcttttgctagtaataagatttacagaggtaatataagcaaacactaccctttaggttggtttgccaaactccctatcttcttaaatatgacatgttaatattctggatttaaaggacattaccaaa

SEQ ID NO: 95300 - DNA, 475 bp, Homo sapiens
gtggcgcgatctcagctcactgcagcctctgcctcccgggttcaagtgattctcctgcctcagcctcccaagtagctgggattacaggcatgcgccaccacacctggctaattttgtatttttagtagagatggggtttctccatgttggtcaagctggtttcaaactcccaacctcaggtgatccgcctgcctcagcctcccaaaatgctgggattacaggcatgaaccaccgtgcctggccccggccaattttttcattgttaaaaccctctcaggccctgccaatagatgacagtggtgtgcgtgtggggagaaggtggcctgccccaggtatctctacttagtggtggagtgatgcttcaaggactgaaagtgtagacccttagccagattactgcctgcctggagtcacctgatgaaatgctgaacctgttcggctgtcttgtccatctgtctctcccgcctgtaaaatg

SEQ ID NO: 95301 - DNA, 707 bp, Homo sapiens
tgcgtgtcttttcttctcccttgtcccctgcacctggcagaacctctgctcaatggaagataaagcgataagatggggatgtggccagtgctagtaaaagaccccttttaatcgctcacatttttggcacttgctatgtgctagacactggattaagcagctaacctgcattattttgcttaactcggtcagtgtttcatacagcagatagtagcgctattctcatttgatagacgcagaaagtgagcctcagagaggttagataagtggcccaggctcctccgtgagtaggtaatggccggggttcatcccaggtctgactgaagagtccatattctttacatctttgcctcactgcctcttcatgtaagctctggacctgccatcataagacaaatgggaagaggtgtcctaccttcctaaaggcattttccaaagtgatttctgaagatatctgatatgggcaactttccagaattagttcagttgttaaaggtttcacggatgaataaatggtgtgggggatgggggttgagaagaggtcagaaggagagacagcgtggagaatgatttccaaggctggatcttttctttatttgattctagtaaattttaacgaggcccttaataaaatcccagtgcttagcagagcctccacatttacaagttgccagacctggggcggaagaagggaagttggaatcctg

SEQ ID NO: 95302 - DNA, 435 bp, Homo sapiens
ctaaaatatccttcccactaaccaaagcaagttgaattaatgttcatttaactaccaaattactgcttcatccattaaaagttaacatattaaatgtgcttatgaaataatattttggcagtcgcattagaacacatatgaatgactattgttctcagaagaccaatcaataataacctgtgacaatcacacacgtcgataaacttttttctgtataagagccagatagtaggccaggtgcagtggctcatgcctgtaatcccggcactttgggaggcccaggcgggcagatatgttaggtcaaaagttcgagaccagcctgaccaacatggggaaatcccgtctctactaaaaatacaaaattagctgggtgtggtggcacgtgcctgtaaccccagctactcaggaggctgaggcaggagaattgcttgaacc

SEQ ID NO: 95303 - DNA, 344 bp, Homo sapiens
agcaatgaaacaatgcctacgtacagttttatttcatggcaacaacatactggtccttgggtcagatgtgtgaaactatttctcaaagaaaccgcatacataattgaggccctccgaagggttcccagttgaagttgccaggctacattcatttcaaaagcagagccatttgttatcatatttaaattaactctctgcacactgaacttgaattttagagtcctgcttacttataattcttaaaatagttgagaaaggggaaaacatgtgtctggaaaatggaaataaggtagtccccacaagggacagcagtggttctcatgcaggcctgaggtgaaacagcc

SEQ ID NO: 95304 - DNA, 158 bp, Homo sapiens
atcttggacaggctggtcttgaactcctgacttcgtggtccacccgcctcggcctcccaaagtgctgggattacaggcgtaagccactatacctggcccaaaatatttttaaaaatataaatagtacagcacacaacaatgtcaattttacatctggc

SEQ ID NO: 95305 - DNA, 317 bp, Homo sapiens
ccctcatttattttttttcattcattcattcattcattcattcattcattcatgatgttttggctgaatgcctggtatgtgtggtaaggagagaaaggaaaaaagcaagtcataattgcttcattcagaaactatggaacccggattcgaatggggagacaactcttggatacttgtagagttaagaataaaagtttaggattcagggccagaataataacagtaacagttaattcgacaggaatttctcaaaaggggtactcagggtgaggaggcactttcagggagtaaggtataacttaggttcatcctggaat

SEQ ID NO: 95306 - DNA, 637 bp, Homo sapiens
agctcaggctttagcgagcctggagggaagggaaggctgaggtctcctctgcctccgcagccacacggcccggcgcggggcgggccggcagtaaacctaagaaggctttattcatttcctggaaacgtttcctggaagcctggcatgtgctaacgatacaacattgaacaatacaaaggtccctgacacggagcttacgttgcgtccaccaggtagacaggacacatacaagatatgaagcatagtacatgtttaatctggatgagaagaggagaaaaataaaacaaggagggagaggcgacctgtcaggggccagggtggggtgagtggaagaaacggtgtccctgacaaggtgcctggtggcctcacccggaggaaagcacggtgcagaggaaacggttcagtctggtgcttgaagccccaggacccccgagagagccggacctggacgagcatgaagtcccgcaggaggaaggcggcccagagccttggaaaatccatctgtgctgagcctgggctgggctgcttcactggggcctccgggggcaggatcagccctggaaagggcacttttaaaccacgtgtgcagatgcccaccaagggaacaaggtcagaaggagccatggctccagaaggg

SEQ ID NO: 95307 - DNA, 556 bp, Homo sapiens
tccaaggagcctcagccaggatggcagttggtccccaggagcagaaatgaaatgtgctcccacccctggggaaactcaggtgtggaggccgtgggccaggcaagatccaggaaccacactgggcttgggaaacttggtgatttctaagaagactcaatgtcctttatttcctctctctgcagccttttgatatttaatcaagttaggggtgctaggaaggtggcagagcaaagcgtatgacctttggagggccttaaaaggccaggtactagatccctgtgtaatccccgggaagctacttcacctctctgagcctcagttgttcatgtattaaatgatgttattaatgtccgccacagggctaccggtaggatgaaataaaagtgtatctaatgtgttgagtacagtgcctgattcataataactggttaataaatggcaactgctatcattatgattaatttcaaatgctagtcaatctcagttgtccttaaaggaacaaaggaggttttgtggtccattctttggtggggtttgaagctggggggcaggtgca

SEQ ID NO: 95308 - DNA, 729 bp, Homo sapiens
cgcgcacgcgcaccggcccgcgcccagcctccgctaggggaccccctccgtggcttcccaccgggttgttccaggcctcagcttcgccgaaaggcctcaccacctccgacctccgcctgccccggggatgctcccagccctgctgcggcagaacgcgacgtgctaaccggaatccctaggccgcctgtctcctacccatacttggaggccccgctcagacggtcctgaaaacgtctgaaaggcggttcctgccagagtccctgctacctgttacctccacccctatttagtcctagtggacagcttcgctcaccttccctgggatgacacttctggcggctgagatgagcgagcctctctgggctctgccgccgggcgtgggctgacctgcctacagctggggcctgataaggcagcagcaaaagggtggaggggaggcagtgttgaagctggggcaagtaattttccccaatttacagggaaaaaccgaaattcagaaaagtttaatgtcagccaggggctggaacccagacctctggcagctgtcactttcacaatgcccttgggctgactaggctgcagaggggtttcaccccaaccccagggcacctcaagtggccccaccaaaccttcctaacacctgaccactaagtagggaggcctctcagggggctagctgtgctaggcccttgcaactgacctgtgggacctgaggcctggcccctcatg

SEQ ID NO: 95309 - DNA, 586 bp, Homo sapiens
ggccggctcttgaggatccccccgcggcgtgttcatgcacagaatacatgcaatggaaactgcatgtgcgaaggccttgagctgggaggaacatgacttcaggaactgaaaagtggccaaggtagccagacattgactgtgtgttgggagggtcttaaatgactccctcttgcctttagggtcaagtctaaccaactcatctctcaccacacttcccctctccgctccagccacactcaagtgaaggtcaggctccaactcctagtaaaagtgggggactgaccctgcaaggaagaaatacttcagaaaggctcgaagggtagggtggctttgggctttgggcctgactagggagcgaataacgaggttgagtttaaccgtctctcaacagaaggaaggaaaggatgcgtctacgccacaggcgtactccagtgcaaacagccaagttcatccattcatacacttcactcaagacatcctcatcctggtgtgacgggtggataatgagaaattacttaatggatacaatgtacattatttcagtgatggatacactaaaatcccagacttcaccatatgcaatata

SEQ ID NO: 95310 - DNA, 159 bp, Homo sapiens
ttagcataatggcgtcattaacacatacaatatataactcatacaaagcagctttgcagagtgccacaactgaggcataaacagagaggctgaaggcaaggaagagattaattatgacttgggcactcctagaaagtgtacaggaaagaggtcaagcag

SEQ ID NO: 95311 - DNA, 421 bp, Homo sapiens
gttaaaatgagagagcttctgattcataggagttataaaaataatatagtaattacaaagttcactttcgtgactcactttgctctaaattctggcactctacagggaaaccttctctgagttaaaatcccacttgctgtttctagtttgaaagtgtcaatgggtccacaattttgaggttgaatcattctgcaacacgagggcttgagggggaagcttggggacctgaagaatgacagttttcagtgtttgtatatgtctctttaaaaaagtaggaaataaattggctgatttgtcatgattacatcatgtgtaatacttgatcacagagtaccttgttttggatttgtatttatttttctccctcctgctcctatctaattgccctctccagaatgaaggcttccactgccttttggct

SEQ ID NO: 95312 - DNA, 812 bp, Homo sapiens
agcggggaatccccggccgtggagaacggaaagtggcctcgaccgtgctgccgagtgagaccgcgaggctggtgcctcgcacaggcggccccgcgcttcctccccaccctgtgggaggagagagtgtgtgcccggtttccccgttccacctcccctggtccgacgagcgataggggcaggtgggcgggggcggctggtcgcctggaagggagtcgccgccacgcaccggccgcccgccgctctccgggccctggcgcggggctgcggcctccgggtaaaatagaactgcacgggaaacccatagaagttgagcactcggtcccaaaaaggcaaaggattcggaaacttcagatacgaaatatcccggcctcatttacagtgggagataacctttggttgaattgagactgaacaggacttaccctcttaaaagaaatgcgtgttcaatttttccatgtgactcagcactagagatgttcacccaaaatgacggtgctggatagtttactagtccagtatggagtggtggagagctgtgagcaagtgaacactgactcggaaactgcagttgtaaatgtaacctattccagtaaggaccaagctagacaagcactagacaacctgaatggatttcagttagagaatttcaccttgaaagtagcctatatccctgatgaccatggccgccagcaaaaccccttgcagcagacccgaggtcgccgggggcttggggcaaaggggctcctcaaggcaggggtctcaaggatccgtatacgagcagacacccatgtgatctgcctctgagcctgccg

SEQ ID NO: 95313 - DNA, 359 bp, Homo sapiens
caaatttgagaaccactgctaaaagctcaagcttcagattgaccagcttttccatctcacctatcgcctaaagaccaaattggataaatgtgttcattacgacagatgggtactatttaaagatgagtaaacacaatatacttaggctcgtcagactgagagttttaatcatcactgaggaaaaacatagatatctaatactgactggagtattagtcaaggcttatttcacacacaattttatcagaaaccaaagtagtttaaaacagctctccccttattagtaatgcattggagggtttactttaccatgtaccttgctgagcactgtaccttgttaatctcatttacttgtaatg

SEQ ID NO: 95314 - DNA, 296 bp, Homo sapiens
tttaatcttaacatgattcagggtttaaagccaggtacactggtgcacacttatagtcccagcctgggcaacatagcaagattctgtctctaaaaaaataattaaaataaaaatactatatttagtgcatcattaaataaaaataaagatatgtaagtggttgtagtggcaaatgattatatttctgtatattcataatttattcctatgatataaattgaataatttaatgaatgcattttctctaatggtatattcaaaattaggtcatctcattagcaactgctaaagaaaac

SEQ ID NO: 95315 - DNA, 314 bp, Homo sapiens
ggagaaaacctagataatcttggattcagtgatactctttagatgccacaccaaaggcacagtctatgaaataaacaattgataacctgggcttcattaaaatttaaaacttctgctctgtgaaagacaatgtcaagagaataagagaatgagaagacaagccagagactgaaagaaatgcatcaaaagatacatctgatagaggcctgttatccaaaatatatcaagaataatgtacaaagtactcaacaataagaatgtctttgctttaatctgattttaaaaatgggccaaagaccttaacaaacacttca

SEQ ID NO: 95316 - DNA, 148 bp, Homo sapiens
agaggttaaggctgcagtgagccctgattgtgccactgcactccagcgtgggtgacagagcaaggcccatatccatgttcagactgattgaatcagtctttcatgggtagagcctggcatcattatttgggtaaaactcctttgaagt

SEQ ID NO: 95317 - DNA, 1176 bp, Homo sapiens
ccaggaggtatttgaacctcctcattatgagttatgcactctcagagggacaggagctacagctgactttgcagatgtggcagatgactttgaaaattaccataaactgcggaggtcatcttccaaatgcattcatgaccatcactgtggatcacagctgtccagcactaaaggcagccgcagtaacctcagcacaagagatgcttctatcttgacagagatgcccacacagccaggaaaacccctcatcccacccatgaacagaagaaatatccttgtcatgaaacacaactactcgcaagatgctgcagatgcctgtgacatagatgaaatcgaagaggtgccgaccaccagtcacaggctgtccagacacgataaagccgtccagcggttctgcctcattgggtctctaagcaaacatgaatctgaatacaacacaactagggtctagaaagaaaattcaaggtaagcagatgcccttggttccttttcctactttgtcgtattctgttttgttgcaactgtcttgtagttttttagggaatgtgctatttatccattatttcttgagatatgtgtttcatgacatttcacaattagaaatacgatgggttcagtgtttataggagagatgattctcgggatacatacctttaaaacaaatcttagtattcttaacatcaagaattgtactaaaatgtaatttagaaggacgtcaaattaataatctaaactttacatgttttaaggtaaagttttaatgaactatctccaaagaaatactcgaaaaaaaccaaggtttttaaactaagaaaatagaatattcagtctcagtatagctgaagttaatatttaaaactggtaactactttctttatgtaatttggcaacaattgtactcaaaattcgtacactaaatatttttggtactgacacaatttatagactcttatttttgcatgaatatgtagctcatctcatcaaaattaaatgcagcatgttaagtcaaattttatactataaaatttgaatgcaaaaggtttcattaatcccagttgtctacgtgtacatcgattttgtcatcagatatcacaatggctttactttttgctcttgattgtttatatctatattagcctaatttgtctccaattgaatctgcttgacagctaatct

SEQ ID NO: 95318 - DNA, 952 bp, Homo sapiens
ccaggaggtatttgaacctcctcattatgagttatgcactctcagagggacaggagctacagctgactttgcagatgtggcagatgactttgaaaattaccataaactgcggaggtcatcttccaaatgcattcatgaccatcactgtggatcacagctgtccagcactaaaggcagccgcagtaacctcagcacaagagatgcttctatcttgacagagatgcccacacagccaggaaaacccctcatcccacccatgaacagaagaaatatccttgtcatgaaacacaactactcgcaagatgctgcagatgcctgtgacatagatgaaatcgaagaggtgccgaccaccagtcacaggctgtccagacacgataaagccgtccagcggttctgcctcattgggtctctaagcaaacatgaatctgaatacaacacaactagggtctagaaagaaaattcaagagaagaactatttatacaaacatggggactgtgaaaagaaaattctatagtgaattgtgaaaagtggacatatttctaaattcattccactgcctttatccaaacttaagaattacagacatttgttattccttcggcaagacatccccgctgcacactgatatgttcatttcgtaatttggttgctggccaccaagtgctccttagtttttaaatacattttgagattaactggaaacttgaagaagaaattagttcccgattaagactatcccaactttatttttattgtcagtttcacttttgtttctatgttgttttatgtctttgttatataattgtacattgtgtgatatgtgaaaaaaaaacacgaattggatgaaccttgtgttacatgtacattgttttcattatatagacagttgagaatagtgcgttcctgaatgatttgaacatgctacagtgaaaagtgacagtgtggaccatg

SEQ ID NO: 95319 - DNA, 528 bp, Homo sapiens
agaagcacactgcaacatagtgaggcctgtctctacaaaaagtttaaaaaattatttgggcatagtggcacacgcctgtagtcccagctacttgggaagctgaggtgggaggattgcttgagcctggaagctggagcctgcagtgaactatcattgtgccactgtactccagcctaggcaacaaaatgaaatcctgtctaaaaataaatacatatgtgtgtgtaaggttgcagctgggcacaatgctttatgcgtgtaatcctagcacttttggaggcccagatgggcagattgctatagcccagtagttcaagatcagccctggcaacatactgagactctctaccaaaaaaaaaaaaattagctgagcatggtgatgcatgcctatagtcctagctactcaggagcctgaggtgggaggatcacttgaacttggaaggtcaatgctgccgcggtgagccgtgagctgtgagccatgagccatggttgtgccactccagcctgggtgacagagcaagaccctgcctc

SEQ ID NO: 95320 - DNA, 341 bp, Homo sapiens
cccagcgcaggcccagtggccggtgaggggagacgtggctctgggacgggggcctccacctgggtggggggatgctccagcttccagacccttggggagggggcactgcccaaactaagctggcactggggctgtgcatttgaaggtgatggtggttctaggtctgaggaggacaccctcctaacagcctcatccccaagctccgggctgtgttgtggcaatgggagggaggaagtctgaggagaccctggtgactgaacggaggagggagtgagttagacgctctcaagggctctgccacctcccggagccagcggcctgttactacatttaaaaaagcc

SEQ ID NO: 95321 - DNA, 450 bp, Homo sapiens
ggcacgaggggctgtgttttctttttgatgtcctttgcagtggatcacagctacctgctgagacagacaaggggagtggttcctgtgatgggatcagtcagatgcctgcctggccgcatcccctgaggggacttgggctcctcttagcattggcaggccggtataaacttccggctcagatcgagctatgcctgatgctgccttaagccttatgaggtcgccaaggaaccgcagaaactcctggagggcagagctgtgtctgccatcttcatcattgcattaccaccacccagcacagtgcctggcacaaaagagttgctcaataaataaatccggatgaatggataaatacatggataggcactttgaactacagatgagtttaaatactttgtgtttttcttagtcaaacatgtgcaattaagcatgtgataaatgatatgatgacca

SEQ ID NO: 95322 - DNA, 259 bp, Homo sapiens
gtcattcatgagggcctccacagcagctgtgcaaattagttgggaaagagatgcaaaggcacacagaggcctccagactccggaacagcgtaaaccacagtatctgacgacacagccaggaaacatgctcccctggaagggtaaataagaacccccacacagcatgtgaacagccacctgtagggacacgccatgtggccctccagtttcatcaggttatgaatgcagtgtgggttatgagaagcaccacacagaaatg

SEQ ID NO: 95323 - DNA, 464 bp, Homo sapiens
ccacggtggtgaaggcggtcatcctcttgtagcctagggttccttggccaaattgctagttgccgatgacctcggggctcggcttgcgagcaacactgggctggaatctgtctccaggaaacccaggcccttttattgttgctgtgtcccccagagggcagggccaagctgaggccattctgtcatgctcaggaaggtagaagatggcccaaagggaagcacacctgcagtaggagggggggcagcggtgggcagggcacagcttccctgcaggttagaccccctcgcaggccagctgcctgcccctgcaggaaccgtgggtctcgggagaggctgccatccctgcacatgacaggtaggcacattgccgggttctggacatgcccccagagcagcctctgcccaccccttcctgggtccctgactccgtccccctccgtgtgcccctccccagatcacgcgct

SEQ ID NO: 95324 - DNA, 605 bp, Homo sapiens
aggcagtgtgaagaaattaagagcagcaattggaccaaagtgtttgtagtgcactaaggttctacctaaggaatcgaaacacaactaaaatgcaattcttctaaatttttcgataacaaaccacaaaccacgactgggtgattctcattcataaatcaccatatgttcaaactgtttaatttttaacagtgcctcagtttaatttttttgtttacctatatattgtaaaggacattacaaaggatatagctgaacagccagatgaggatgatagagcaagatgtggagtagggggatacagagcctccctgctctctctgggtgtcccaccatcccagcctcgccatgtgttcagcaacccagaagctcccttttttttttttttttttttttgagacggagtctggctgtgtcgcccaggccggagtgcagtggcgtgatctcggctcactgcaagctccgcctcccgggttcacgccattctcctgctgcagcctcccgagtagctgggagtataggcgcacgccaccacacccggctagttttttgtatttttagtagagacggggtttcaccatgttagccaggatggtctcgatcttccg

SEQ ID NO: 95325 - DNA, 983 bp, Homo sapiens
acttggctatgtggcagatgctggccttgatgggagtccacagaaaatggggcctcactgactgcttgtccaggtatctcagtgggagggaatgggagtgggaaatggagtactcaaggccacaagacaggccgccatagaactttggccttggggaatgaaccaaagctagtttggagagtagggtgattggggtgatcacttttccctttaaaggtggcatgctgcaagaagaaaggctttgaagagtgatgggtagtcactaaccatggcactatgctatcttctaaccaacgttatggggtcctggaatgatcctaggtctgcactagaagaggtagacccagaggaccttgtctaacataccccttgcttcttgacttcttcccatacctgcgttctttccggcctcaattactgcctgagatgttacacccttccagcataaatgatgaaccgcttcatggtgcctgtagaggcctcttgcagagcaccctgcagtggtatggtttgtgtatgcctcactgcactgtagagaaatgaagagcatgaggggaaaaatgagtagggcctggacttttagctagttttgaacactgcagttgctatgacttggggttgttagcagccaaaagaggagctttcatgagagggcacagaatacataacttgtctgtttctttactatgacccatgagggttttagtaaaccaaaatgccaagtctaagataaactgccattccttggagtgagggttccatttacagcctgaatcacgacttttattttcctaatgccttctcttgcatcctcttagctgaaggttcctttaactggagtcttcacttagctgaggggactgaagaattgattctttacccttttacgtgggaaaaattaaagcaacatgttcgttcaggctgacaggacaaataagaggcagtagagggatagccagagcaggctagatcagaaaatatct

SEQ ID NO: 95326 - DNA, 245 bp, Homo sapiens
ctatgttgtccaggctggaactcctgggctcaagcaatcttcctgcccctgcctctgcctccctaagtgctgggattacaggcatgagccaccgtgcccagcagaattgctgttgattgagatggggagggctgtgagtggctcaggattgtggggcagggcatagatcaggagtattgttgagctgtaggcgctcatcagacctttaagtggagatgtagagtaagcaatagaatttaagtcta

SEQ ID NO: 95327 - DNA, 323 bp, Homo sapiens
tctctgtttggggcagagtatggcgtgagacgtattgagatggagcttgaggttaattaaagatgaagcatttgggtaaacagtccaggcacctgaccgtgtgcccagatctgtgccaggcactgagccaagaaggtaaattaatgcagcttgtaattactgagcacatgcaatgccaggctctgtattagagctgaatctaaccactctccttggcccagaggaactcattatcaagatgggacaagcagtgcaatgctagattacgtcgtcctggcccctaacttcaggaagattcagccttagtctttcccagatccctc

SEQ ID NO: 95328 - DNA, 526 bp, Homo sapiens
cggccctggtgggaggagactggatcacgggggcagtttcccccatgctgttctcgtgatagtgagtgggctcccaggagatctgatggctttgtgtttgacagttcctccttcacatgttctctctcctgtcgccttgtgaagaaggtgcctgcttcccttttcaccatgattgtaagtttcctgaggtctccccagccatgcggaactgtgagtcaattaaagctcttttctttgtaaattacccagtctcagggaagttctttatggcagtgtgagaacggactaacacagatgcgatttcagacaaaaccaaaactgcatataaatctaacatcacaggactgttactttaattccatttccaaattggaaactcttcatgggcttatagtaaactgtaaggaggggatcatttccaggcacctcctggatgctctgcgattagctggattaaccctaaactccatggtggggcccattataaacgcctccctgctctacaggatctaacgcacaccggaca

SEQ ID NO: 95329 - DNA, 721 bp, Homo sapiens
ggaattatatagcaataaggattattatgctacttagttcttaaataaaatatcttttgcatgttttatatctatatactcatttcccttatatacatgaatattttatacgtacatattctagaagatgtcatcagcccaaacttaacaaatcatgcttttgttttgtcagttcctgtaatgcagtgttttttctttttcattatcatcgccagtggggactctttagacagtttttttctaattactccctttcatgaaattttaatgtcacatatgtactgtatactattatagtatatcttttgaaggccacaaaccactgtaatgtctaagattttctgccccacaagagctcatttgtgtccctttggagatatcttccccattgaaaatgtatgctagagtactttctctcaattctacgccagtgaaataaatcaggtcgactctactggcttaagttattggttgtcccagacaagtaagaaagttataatccccaccttttttttctactttatgtagtcctgcttcaaattatttttatacagaaaggaattcaccctcttttcttcctagattaacaaaattaagaagtttgtcattttgtttcattttatttttaattgagaggcccgtaggagtgatgcactgattaaaacttgctttccattagccaggtaggattttgatgcccacttgctttcccagatgttga

SEQ ID NO: 95330 - DNA, 197 bp, Homo sapiens
atctgcccacctcggcctcacaaagtgctgggattacaggcgtgagccactgcacccagccgagtcacttgtttttcttgtgtgtttgttctaagtttctccatcacagtgtaagctccttgggaatgtggactctgtccacattgctagtcattgtgtctgcaggttctagagcagcacatagtgactattcctat

SEQ ID NO: 95331 - DNA, 358 bp, Homo sapiens
cttcaagtacttattattaaggaggcacagaaactacacacattctatgacttttctagccctgtttcctgaaggtaactaaaatttctacccttgaaaatactggttcttaatgagtataaatgcttttctcaaaactatggaagatcatactaatccttttattatagttaaagcattcagtgggacttggagtccacattcagtagtatcttgtttgaatgagaaattgtaaaataaaggcctttcctcacatgccaacttacggtcagggtggatttctttttggagaccgggtcttactctgtcacccaagcttaagtgcagtggcacaatcacaactcactgcagcatcaga

SEQ ID NO: 95332 - DNA, 413 bp, Homo sapiens
gtttgtcagagggttttttttttatacctgtcttggtgtatctgagagtaacatatctatgtctgggtgtgtttcagagacagagattgaaattcatcatctccatagccctcatctagatcaatatttcatgtttttaaatgataggcatttcaagaaaagaagataccaattttgaggagtatagtagacaaagggcatgactcactgcttgttcatgtaaatcttctacctttatcacaggacagaatatgctcagagcaccaggattctccttttccctccttaccaccctccatgtgcatggttggtgtgatggtcattttgatgtatccacttggctaagcagtctccagttattctatcaaactctaagtgttactgtgaagtattttatagatgtgattaaagga

SEQ ID NO: 95333 - DNA, 290 bp, Homo sapiens
aaaaaaacctccataaaaaaactccagacctagacagttttaggggaagttttactaagccttaaaacaacaggtatttctcttatctaactatattgtttcaaatagtagaaaaagaaaaacgctctatagtatataggtctggtacaatttggtatacaatctagacaagaacagtatgaggaaagaaaaatataactgaacctcaatatgaagataaatgtgacaactgcttataaaatattagcaaattgaatatatatatatatatatatatatattcaatctaa

SEQ ID NO: 95334 - DNA, 357 bp, Homo sapiens
gtgatgtaccccagcactagggaatgatgtgagtaagacctaatccctgctctcagggagcttatagcctatggcagcagcaacactagtaaaaatttactactttgataggtgcacatcttcctttggtcagcaattttctcaaaaccactgtaacattttactaaaatgctaagctttgattgtttttcaactacttcttgagagtttctgcatgtatgataagggcaagacattacactgaggtattgatgctgatgagcagcaaggctcactggctggtgaagggatactgattagcacaccaatgtgctgctcttgaacacacacctccacaaaattacaaattatcttcca

SEQ ID NO: 95335 - DNA, 940 bp, Homo sapiens
tcagtttcccctggcgtaaaacaaggctgcagatcttctatgtctggcattctccaacaagcaatacagggtgatggaaagagagctggagacaagagggacttggggctgaatccccgttccatctataccagcatcacactctattgggcgagtcacatctctgagcctctgtttcctcatctgtaaagaggggatattgtgaagtcacaggattattgtggttaataaatggtggggaggggggaggagtttacagttatagcccaataactggctcatcacttcacaggtagtcaaatgttcattacacttcggaaacttgcagcatgatttgcaaatattctgggtggggcgggggctgtctttccttttttatagggtccaaatgaagaatttctagtttttaattctgagaaagcccaatttatgtacttttttgttgcttgtgcttttggtgttatatttaagaaggctttgccgaaaccaaggtcatgaagatttactcatattttcttcaaagaggtttatagttgtacttcttacttctaggtctatgatccattctgaattgatttttacatgtggtgtgaagaagaggtcaaacttcattcttttacatgtgaatattcagtcgttccagcactgtttgttgaagaggctattctttccccattgaagagtcctggcactgttgaaaatcaattggccataatgtgaggattagtgtctagacactaaattccattcagttgatttatgtctgtccttatgacagtactacacaatcttgattgttgtagctctgtagtaagttctgaaattgggactcacagtgtgagtcctccaactttgctcttctttctcaagattgacaatttccatatgaattttaacatcagcttgtcaatgtttacaaaaaaaaaaggcctgctggaat

SEQ ID NO: 95336 - DNA, 476 bp, Homo sapiens
agcctcggcttcaccactgggcacacgtggagatgctcctcgtcttattccctctcgagctgctcttaatgcccagatagaccgaatttgcccccagaacaggagttccccatgccttcctcttccagggagatttcagtgagagcagcaagtcgaagcctgatgcagtttccaggtgtatagggcagaaagggatcgtctccccagcatggctttttgacagatagaaggcatcggtgtgacagagaaggaggctggatcctgggctacccatcaagctgcgggttactcagggaggaccgggggctgacagcccttagactaccctgactcatgcctggagtcagacataggagctcccttccccccaggccacctctgctgggatgtgcttgcccctccccaccccacctcagtttccccactgcacagtggacaccaagccgaagtcatagggtgtgggagcagtgagtctg

SEQ ID NO: 95337 - DNA, 314 bp, Homo sapiens
gagatggtgtcttgctctgttgcccaggctggagtgcagtggagcgatcttggctcactgcaacctccgcctcctgggttcaagcaattctcctgcctcagcctcctgagtagctgggattacaggcccgcaccaccatgcccggctactttttgtatttttagtagagatggggtttcaccatgttggtcagtctggtctcaaactcctgacctcatgatctgcccgccttaacctcccaaagtgagtaaaaatatttttagatatacaaaacccaaaagaacttatcaccagcagaaccacactgtaaaaaa

SEQ ID NO: 95338 - DNA, 712 bp, Homo sapiens
agcgatctagtaactttcagttaatcacccacagctggaaataggctcgctttcctctgaactgtaacacttggcttctaacagacttttatgccttatccccaccatgttcaccgtagaaaaatgagcaatgcagagaaacaagaaaggtagggataaaaaagagaaaaaaaagactcattatctcacccccagagacaaccaccatgaatgttcaagaatatgcctttcttgatgtttcctcttttcatatacatcatcgtcttccttgtcataattaaaagaagaaaagtagaaaatgctatcattattttctcaggtgccagatactatgttaagattttacaaccattatattctttaatcttcacaactactgtatgagtattttatttttatcttcatttgatagaaaaagaaacccagaggccactcgaggtggctcacacttgtaatcctggcactttgggaggctgaggtgagtgtatcatttgaggtcagaaattcgagaccagcctgaccaacatgatgaaaccccatctctacgaaaaatacaaaaaaattagccgtgcatggtggcacatgcctataatcctagctacttgggaggctgaggccagagaatcgcttgaacctgggaggcagaggttgcagtgagccaagatcgcgccactgcactccagcctaggcaacagagtgagactccgtcttc

SEQ ID NO: 95339 - DNA, 701 bp, Homo sapiens
  misc_feature (518)..(518): n is a, c, g, or t
tttttaaaaacgctgttggaaatctcgcgatggagggaggaggaggtatacccctagaaacacttaaagaagaaagtcagtcaagacatgttctacctgcaagttttgaagtcaacagtttgcagaaaagcaactgggggttcttacttactgggcttgtgggtggcaccctggtggctgtgtacgctgtagccacgccgtttgtaacgccagcccttcgaaaagtctgtttgccatttgtacctgcaactacgaagcagattgaaaatgttgtgaaaatgttgcgatgccgaagaggatcccttgtggacatcggtagtggggacggacgcattgtcatagcggctgcgaagaaagggttcacagcagttggttatgaattaaacccatggctagtttggtattccagataccgcgcttggcgagaaggtgtgcatggatctgccaaattttatatttcagatttgtggaagacatatgtaaagtgtgtcggtcagaaggaacacctgagaaaccgntttatcatccttgggtatgtactggcagtattaaagttatccatcatgaatggtaagtatacttttagaaaagtatgtaagtctgagctttagtttcgtcatgtatacagtaacagggatcatttcaaggacctttctcttggaatatttttaaaagttttggtttttcctggcacggctggc

SEQ ID NO: 95340 - DNA, 3371 bp, Homo sapiens
tttttaaaaacgctgttggaaatctcgcgatggagggaggaggaggtatacccctagaaacacttaaagaagaaagtcagtcaagacatgttctacctgcaagttttgaagtcaacagtttgcagaaaagcaactgggggttcttacttactgggcttgtgggtggcaccctggtggctgtgtacgctgtagccacgccgtttgtaacgccagcccttcgaaaagtctgtttgccatttgtacctgcaactacgaagcagattgaaaatgttgtgaaaatgttgcgatgccgaagaggatcccttgtggacatcggtagtggggacggacgcattgtcatagcggctgcgaagaaagggttcacagcagttggttatgaattaaacccatggctagtttggtattccagataccgcgcttggcgagaaggtgtgcatggatctgccaaattttatatttcagatttgtggaaggttactttttcgcagtactcgaacgttgttattttcggtgtgcctcagatgatgctgcagttggagaagaaacttgaacgtgaacttgaggatgatgcacgagttattgcttgccggttccctttcccacattggactccagaccacgtcacgggggaggggatagacacagtgtgggcatatgatgcaagcacttttagaggccgtgaaaagaggccctgtacatcgatgcatttccagctgcccattcaagcataaactttactgggagtgtttttctgaaatattgtagtcttccctgatcttgtagagacttacagctgtgtccttagcaaaggagcataattgtctttggtttggaatgagaaattactattactttccttaactgttggagaaaacaaacgaagaaaaacaggtagatttaaaatctgcttttgatgctattttcttaaaaattgtacttactgcctttccatgcacctggatgcatgaaaagatgaataagtgatggtcatggttatgggtaggaaaataagatgccaatagctcttcacattataaacaatatggcttaatgcctcgataaggagaaatgatttttaaagacagtatatattaccaactgtttgtagtatcctataactttgttcatacttaagttgtatctctttcctttttgtacttcatggcaaaattaattttctaaaggattcagagaggcgtttatattttataacatttattagaaataatttgttccaccactagattactgtattttatggaatctaagctgtatatgtgtacatttgtatacatgtatgtgtaaatgtaagcctgacgtgggttcagattccagttttgtcatcagcaagaggcctcggacccatgacttactgcctctgagccttggctttctgtgtatctctgccactgggataatggtacacataacagtggagtggggaccaatttctaaaactcatggcacctagtctttggtccataaatggtgtttgttattttagacactgagaaaaatcttattcacagaagttgcagattatttctgctagtcacttttttatttcttgagagctgccactcatttaatatttctcatttatgagaagagacttgactgatttagataaaagacgaattaaggaaaacctttgaacgtgagtagacaagcttcatatatctgtaaagtgaatattgaatggtagcttgagtcattcgtacttatcacagaaaagaattgaactcccagtcatacacctgtaactgaaataccaaactgtcttaatggagatgtaatgaagtaagatggtcacatctttaactaaacttataaaaattggtcagtttgatcattttcatttaaatgagaaacatctggggacacattcattcattcaacaaatatgtattcagtatctactgtagaagaagctctgagattctgcggtaaatagacatgcaaagcccctggcctcatggaattcctattctggaaaggagagacaaacaaataagcaagggaatcttagtgtgtgtggagttctctgaagtaaacagtgtgatggtgtagagagcacctgtgtgagtctgagatgaggggatgtgatgttgtggacttcagccaggtttttggcagctagtgtctgtccctttttcagtagctccagtcttcttatgaagaatgagttctttctgtggtgtgtgactttagtgggagggcagctcttgctctatgcctctcagttgccttccactgtaaccagtcctgtaactggtctgggcacactcggagggggatccatggtagctccttgccatgaagatgtgggtagaggagggttctgtggggcctcggaggtgttcaacattttctagaagtgttccttacggtagagtgccaactgtacatctagaagaaaggacagaattagcagattgattcaggccagaatcatccgtgagtgctatttcaagtgtagggactctctgatgagtaacaggatttacatcatcccaaagcatctccccacaaactactcattataaaagcaaaaatagcaactgcacaatggagacaccggatcccaccttcactgtgtggttactgccatcatcaagagcagaagggcctcctgggtgtctgtggagccctggtaagttcacagcttcacaggtggggtgttgccaaagaccacacaccgcactgctcatgagcacacatcagaggacccaccgccagggccactcggtccgataactgaagaatgttattgtcacgaaaaccaaagaaagactgagcaactgttttccgtctaaggagaccaaaggaatgttatggctaaatgcaaaaatggtcctggactggatcatacccttgggaaatgttatacagaacattattggggcaatgacagaatcacagtgttatttggaattattatattggaatacaatgttaaatttcctgaatataactgtgctgggattatgtatgaaaatatttttcttagaaaatacacactgaagtattaaggaagtaaagtagcatattgtatgcaaccttttctgcaatggtttaggaaaaaaatgttcaaagagaggaagagaacaaatgtgacaaaatgttgaaaatcggtaaacctgtaggccagctgcagtggctcacgcctgtagtcccaacactttgagaggctgaggtgggcagatggcttgagctcatgagttcaggaccagcccgggcaacatggtaaaaccccatctctacaaaattaggaggttgaggtgggaggatgatttgagtctaggaggcggaggttgcattgagccaagatcacaccaatgcagttcagcctgggcgataagtcttgtctc

SEQ ID NO: 95341 - DNA, 3347 bp, Homo sapiens
tcgcgatggagggaggaggaggtatacccctagaaacacttaaagaagaaagtcagtcaagacatgttctacctgcaagttttgaagtcaacagtttgcagaaaagcaactgggggttcttacttactgggcttgtgggtggcaccctggtggctgtgtacgctgtagccacgccgtttgtaacgccagcccttcgaaaagtctgtttgccatttgtacctgcaactacgaagcagattgaaaatgttgtgaaaatgttgcgatgccgaagaggatcccttgtggacatcggtagtggggacggacgcattgtcatagcggctgcgaagaaagggttcacagcagttggttatgaattaaacccatggctagtttggtattccagataccgcgcttggcgagaaggtgtgcatggatctgccaaattttatatttcagatttgtggaaggttactttttcgcagtactcgaacgttgttattttcggtgtgcctcagatgatgctgcagttggagaagaaacttgaacgtgaacttgaggatgatgcacgagttattgcttgccggttccctttcccacattggactccagaccacgtcacgggggaggggatagacacagtgtgggcatatgatgcaagcacttttagaggccgtgaaaagaggccctgtacatcgatgcatttccagctgcccattcaagcataaactttactgggagtgtttttctgaaatattgtagtcttccctgatcttgtagagacttacagctgtgtccttagcaaaggagcataattgtctttggtttggaatgagaaattactattactttccttaactgttggagaaaacaaacgaagaaaaacaggtagatttaaaatctgcttttgatgctattttcttaaaaattgtacttactgcctttccatgcacctggatgcatgaaaagatgaataagtgatggtcatggttatgggtaggaaaataagatgccaatagctcttcacattataaacaatatggcttaatgcctcgataaggagaaatgatttttaaagacagtatatattaccaactgtttgtagtatcctataactttgttcatacttaagttgtatctctttcctttttgtacttcatggcaaaattaattttctaaaggattcagagaggcgtttatattttataacatttattagaaataatttgttccaccactagattactgtattttatggaatctaagctgtatatgtgtacatttgtatacatgtatgtgtaaatgtaagcctgacgtgggttcagattccagttttgtcatcagcaagaggcctcggacccatgacttactgcctctgagccttggctttctgtgtatctctgccactgggataatggtacacataacagtggagtggggaccaatttctaaaactcatggcacctagtctttggtccataaatggtgtttgttattttagacactgagaaaaatcttattcacagaagttgcagattatttctgctagtcacttttttatttcttgagagctgccactcatttaatatttctcatttatgagaagagacttgactgatttagataaaagacgaattaaggaaaacctttgaacgtgagtagacaagcttcatatatctgtaaagtgaatattgaatggtagcttgagtcattcgtacttatcacagaaaagaattgaactcccagtcatacacctgtaactgaaataccaaactgtcttaatggagatgtaatgaagtaagatggtcacatctttaactaaacttataaaaattggtcagtttgatcattttcatttaaatgagaaacatctggggacacattcattcattcaacaaatatgtattcagtatctactgtagaagaagctctgagattctgcggtaaatagacatgcaaagcccctggcctcatggaattcctattctggaaaggagagacaaacaaataagcaagggaatcttagtgtgtgtggagttctctgaagtaaacagtgtgatggtgtagagagcacctgtgtgagtctgagatgaggggatgtgatgttgtggacttcagccaggtttttggcagctagtgtctgtccctttttcagtagctccagtcttcttatgaagaatgagttctttctgtggtgtgtgactttagtgggagggcagctcttgctctatgcctctcagttgccttccactgtaaccagtcctgtaactggtctgggcacactcggagggggatccatggtagctccttgccatgaagatgtgggtagaggagggttctgtggggcctcggaggtgttcaacattttctagaagtgttccttacggtagagtgccaactgtacatctagaagaaaggacagaattagcagattgattcaggccagaatcatccgtgagtgctatttcaagtgtagggactctctgatgagtaacaggatttacatcatcccaaagcatctccccacaaactactcattataaaagcaaaaatagcaactgcacaatggagacaccggatcccaccttcactgtgtggttactgccatcatcaagagcagaagggcctcctgggtgtctgtggagccctggtaagttcacagcttcacaggtggggtgttgccaaagaccacacaccgcactgctcatgagcacacatcagaggacccaccgccagggccactcggtccgataactgaagaatgttattgtcacgaaaaccaaagaaagactgagcaactgttttccgtctaaggagaccaaaggaatgttatggctaaatgcaaaaatggtcctggactggatcatacccttgggaaatgttatacagaacattattggggcaatgacagaatcacagtgttatttggaattattatattggaatacaatgttaaatttcctgaatataactgtgctgggattatgtatgaaaatatttttcttagaaaatacacactgaagtattaaggaagtaaagtagcatattgtatgcaaccttttctgcaatggtttaggaaaaaaatgttcaaagagaggaagagaacaaatgtgacaaaatgttgaaaatcggtaaacctgtaggccagctgcagtggctcacgcctgtagtcccaacactttgagaggctgaggtgggcagatggcttgagctcatgagttcaggaccagcccgggcaacatggtaaaaccccatctctacaaaattaggaggttgaggtgggaggatgatttgagtctaggaggcggaggttgcattgagccaagatcacaccaatgcagttcagcctgggcgataagtcttgtctc

SEQ ID NO: 95342 - DNA, 3574 bp, Homo sapiens
tttttaaaaacgctgttggaaatctcgcgatggagggaggaggaggtatacccctagaaacacttaaagaagaaagtcagtcaagacatgttctacctgcaagttttgaagtcaacagtttgcagaaaagcaactgggggttcttacttactgggcttgtgggtggcaccctggtggctgtgtacgctgtagccacgccgtttgtaacgccagcccttcgaaaagtctgtttgccatttgtacctgcaactacgaagcagattgaaaatgttgtgaaaatgttgcgatgccgaagaggatcccttgtggacatcggtagtggggacggacgcattgttatttttattgcatattattacttgttcacaaaaccatcctcccagacactttcatttcactgctgctgtgctagcccactgatggagagatgcagtggattttcagcaatgttttgttcgacctccccgggggttggctgacctagaatcaattatggaggtgttccaagtgaacctgaatgtctattctgatacttgaggtcatagcggctgcgaagaaagggttcacagcagttggttatgaattaaacccatggctagtttggtattccagataccgcgcttggcgagaaggtgtgcatggatctgccaaattttatatttcagatttgtggaaggttactttttcgcagtactcgaacgttgttattttcggtgtgcctcagatgatgctgcagttggagaagaaacttgaacgtgaacttgaggatgatgcacgagttattgcttgccggttccctttcccacattggactccagaccacgtcacgggggaggggatagacacagtgtgggcatatgatgcaagcacttttagaggccgtgaaaagaggccctgtacatcgatgcatttccagctgcccattcaagcataaactttactgggagtgtttttctgaaatattgtagtcttccctgatcttgtagagacttacagctgtgtccttagcaaaggagcataattgtctttggtttggaatgagaaattactattactttccttaactgttggagaaaacaaacgaagaaaaacaggtagatttaaaatctgcttttgatgctattttcttaaaaattgtacttactgcctttccatgcacctggatgcatgaaaagatgaataagtgatggtcatggttatgggtaggaaaataagatgccaatagctcttcacattataaacaatatggcttaatgcctcgataaggagaaatgatttttaaagacagtatatattaccaactgtttgtagtatcctataactttgttcatacttaagttgtatctctttcctttttgtacttcatggcaaaattaattttctaaaggattcagagaggcgtttatattttataacatttattagaaataatttgttccaccactagattactgtattttatggaatctaagctgtatatgtgtacatttgtatacatgtatgtgtaaatgtaagcctgacgtgggttcagattccagttttgtcatcagcaagaggcctcggacccatgacttactgcctctgagccttggctttctgtgtatctctgccactgggataatggtacacataacagtggagtggggaccaatttctaaaactcatggcacctagtctttggtccataaatggtgtttgttattttagacactgagaaaaatcttattcacagaagttgcagattatttctgctagtcacttttttatttcttgagagctgccactcatttaatatttctcatttatgagaagagacttgactgatttagataaaagacgaattaaggaaaacctttgaacgtgagtagacaagcttcatatatctgtaaagtgaatattgaatggtagcttgagtcattcgtacttatcacagaaaagaattgaactcccagtcatacacctgtaactgaaataccaaactgtcttaatggagatgtaatgaagtaagatggtcacatctttaactaaacttataaaaattggtcagtttgatcattttcatttaaatgagaaacatctggggacacattcattcattcaacaaatatgtattcagtatctactgtagaagaagctctgagattctgcggtaaatagacatgcaaagcccctggcctcatggaattcctattctggaaaggagagacaaacaaataagcaagggaatcttagtgtgtgtggagttctctgaagtaaacagtgtgatggtgtagagagcacctgtgtgagtctgagatgaggggatgtgatgttgtggacttcagccaggtttttggcagctagtgtctgtccctttttcagtagctccagtcttcttatgaagaatgagttctttctgtggtgtgtgactttagtgggagggcagctcttgctctatgcctctcagttgccttccactgtaaccagtcctgtaactggtctgggcacactcggagggggatccatggtagctccttgccatgaagatgtgggtagaggagggttctgtggggcctcggaggtgttcaacattttctagaagtgttccttacggtagagtgccaactgtacatctagaagaaaggacagaattagcagattgattcaggccagaatcatccgtgagtgctatttcaagtgtagggactctctgatgagtaacaggatttacatcatcccaaagcatctccccacaaactactcattataaaagcaaaaatagcaactgcacaatggagacaccggatcccaccttcactgtgtggttactgccatcatcaagagcagaagggcctcctgggtgtctgtggagccctggtaagttcacagcttcacaggtggggtgttgccaaagaccacacaccgcactgctcatgagcacacatcagaggacccaccgccagggccactcggtccgataactgaagaatgttattgtcacgaaaaccaaagaaagactgagcaactgttttccgtctaaggagaccaaaggaatgttatggctaaatgcaaaaatggtcctggactggatcatacccttgggaaatgttatacagaacattattggggcaatgacagaatcacagtgttatttggaattattatattggaatacaatgttaaatttcctgaatataactgtgctgggattatgtatgaaaatatttttcttagaaaatacacactgaagtattaaggaagtaaagtagcatattgtatgcaaccttttctgcaatggtttaggaaaaaaatgttcaaagagaggaagagaacaaatgtgacaaaatgttgaaaatcggtaaacctgtaggccagctgcagtggctcacgcctgtagtcccaacactttgagaggctgaggtgggcagatggcttgagctcatgagttcaggaccagcccgggcaacatggtaaaaccccatctctacaaaattaggaggttgaggtgggaggatgatttgagtctaggaggcggaggttgcattgagccaagatcacaccaatgcagttcagcctgggcgataagtcttgtctc

SEQ ID NO: 95343 - DNA, 1004 bp, Homo sapiens
tttttaaaaacgctgttggaaatctcgcgatggagggaggaggaggtatacccctagaaacacttaaagaagaaagtcagtcaagacatgttctacctgcaagttttgaagtcaacagtttgcagaaaagcaactgggggttcttacttactgggcttgtgggtggcaccctggtggctgtgtacgctgtagccacgccgtttgtaacgccagcccttcgaaaagtctgtttgccatttgtacctgcaactacgaagcagattgaaaatgttgtgaaaatgttgcgatgccgaagaggatcccttgtggacatcggtagtggggacggacgcattgtcatagcggctgcgaagaaagggttcacagcagttggttatgaattaaacccatggctagtttggtattccagataccgcgcttggcgagaaggtgtgcatggatctgccaaattttatatttcagatttgtggaaggtatgtaaggcagagaatggccctagagaaatccaagggaaaattttattattcaaaattagtatgactgagaactgaaaaatgtattaaaagaaaaataattaaaatccaagtgaatattctggcataatgaaatatgtaaaattgatacgttttacaaatagtctcctttagagagaagcttaaagtttttatatgataggtcttgtgaattccaagaatttatttactaaattaaaatgttgtcatttctgtttcttacaaaataatgagatttttcatctcatttggaaatcctataaattattattgataaatattagacttttccatttgtgtgcctgtgtgagtgtgtgtatgcatattcgtatatttagagagacacagagatggttgctggagaatcgtgctatcacggttatttcttatcctcataaagtataagatacttccaaatttatttgtactctaaaaactctaaaaatgccctgtaattttgctttaggaatgttccataaaatgctttttctt

SEQ ID NO: 95344 - DNA, 507 bp, Homo sapiens
ccagagtgctctttttaacaagtagtaatttttgctcaggtattttcagggactcttaaaaacaggaaattttgggatcatttcctctgactcactgctcactaaaataatagctgttactctccacagatgctgcagttggagaagaaacttgaacgtgaacttgaggatgatgcacgagttattgcttgccggttccctttcccacattggactccagaccacgtcacgggggaggggatagacacagtgtgggcatatgatgcaagcacttttagaggccgtgaaaagaggccctgtacatcgatgcatttccagctgcccattcaagcataaactttactgggagtgtttttctgaaatattgtagtcttccctgatcttgtagagacttacagctgtgtccttagcaaaggagcataattgtctttggtttggaatgagaaattactattactttccttaactgttggagaaaacaaacgaagaaaaacaggtagatttaaa

SEQ ID NO: 95345 - DNA, 661 bp, Homo sapiens
gacaaacaaataagcaagggaatcttagtgtgtgtggagttctctgaagtaaacagtgtgatggtgtagagagcacctgtgtgagtctgagatgaggggatgtgatgttgtggacttcagccaggtttttggcagctagtgtctgtccctttttcagtagctccagtcttcttatgaagaatgagttctttctgtggtgtgtgactttagtgggagggcagctcttgctctatgcctctcagttgccttccactgtaaccagtcctgtaactggtctgggcacactcggagggggatccatggtagctccttgccatgaagatgtgggtagaggagggttctgtggggcctcggaggtgttcaacattttctagaagtgttcctggtgggtttatagaggcattgatatggtttggctgtgtccctacccaaatctcatcttgaattcccacgtgttgtgggaaggacctggtgggaggtgattgaattatgggggcaggtctttcctgtgctgttctcatgatagtgagtaagtttaatgagatctgatggttattttaggggggagttttcctgcacagctctttttgcctactaccattcacgtaagatattccagccacatggaactgtaagtccaattaaagctctttcttttgta

SEQ ID NO: 95346 - DNA, 1839 bp, Homo sapiens
tttttaaaaacgctgttggaaatctcgcgatggagggaggaggaggtatacccctagaaacacttaaagaagaaagtcagtcaagacatgttctacctgcaagttttgaagtcaacagtttgcagaaaagcaactgggggttcttacttactgggcttgtgggtggcaccctggtggctgtgtacgctgtagccacgccgtttgtaacgccagcccttcgaaaagtctgtttgccatttgtacctgcaactacgaagcagattgaaaatgttgtgaaaatgttgcgatgccgaagaggatcccttgtggacatcggtagtggggacggacgcattgtcatagcggctgcgaagaaagggttcacagcagttggttatgaattaaacccatggctagtttggtattccagataccgcgcttggcgagaaggtgtgcatggatctgccaaattttatatttcagatttgtggaaggttactttttcgcagtactcgaacgttgttattttcggtgtgcctcagatgatgctgcagttggagaagaaacttgaacgtgaacttgaggatgatgcacgagttattgcttgccggttccctttcccacattggactccagaccacgtcacgggggaggggatagacacagtgtgggcatatgatgcaagcacttttagaggccgtgaaaagaggccctgtacatcgatgcatttccagctgcccattcaagcataaactttactgggagtgtttttctgaaatattgtagtcttccctgatcttgtagagacttacagctgtgtccttagcaaaggagcataattgtctttggtttggaatgagaaattactattactttccttaactgttggagaaaacaaacgaagaaaaacaggtagatttaaaatctgcttttgatgctattttcttaaaaattgtacttactgcctttccatgcacctggatgcatgaaaagatgaataagtgatggtcatggttatgggtaggaaaataagatgccaatagctcttcacattataaacaatatggcttaatgcctcgataaggagaaatgatttttaaagacagtatatattaccaactgtttgtagtatcctataactttgttcatacttaagttgtatctctttcctttttgtacttcatggcaaaattaattttctaaaggattcagagaggcgtttatattttataacatttattagaaataatttgttccaccactagattactgtattttatggaatctaagctgtatatgtgtacatttgtatacatgtatgtgtaaatgtaagcctgacgtgggttcagattccagttttgtcatcagcaagaggcctcggacccatgacttactgcctctgagccttggctttctgtgtatctctgccactgggataatggtacacataacagtggagtggggaccaatttctaaaactcatggcacctagtctttggtccataaatggtgtttgttattttagacactgagaaaaatcttattcacagaagttgcagattatttctgctagtcacttttttatttcttgagagctgccactcatttaatatttctcatttatgagaagagacttgactgatttagataaaagacgaattaaggaaaacctttgaacgtgagtagacaagcttcatatatctgtaaagtgaatattgaatggtagcttgagtcattcgtacttatcacagaaaagaattgaactcccagtcatacacctgtaactgaaataccaaactgtcttaatggagatgtaatgaagtaagatggtcacatctttaactaaacttataaaaattg

SEQ ID NO: 95347 - DNA, 3296 bp, Homo sapiens
tcgcgatggagggaggaggaggtatacccctagaaacacttaaagaagaaagtcagtcaagacatgttctacctgcaagttttgaagtcaacagtttgcagaaaagcaactgggggttcttacttactgggcttgtgggtggcaccctggtggctgtgtacgctgtagccacgccgtttgtaacgccagcccttcgaaaagtctgtttgccatttgtacctgcaactacgaagcagattgaaaatgttgtgaaaatgttgcgatgccgaagaggatcccttgtggacatcggtagtggggacggacgcattgtcatagcggctgcgaagaaagggttcacagcagttggttatgaattaaacccatggctagtttggtattccagataccgcgcttggcgagaaggtgtgcatggatctgccaaattttatatttcagatttgtggaagatgctgcagttggagaagaaacttgaacgtgaacttgaggatgatgcacgagttattgcttgccggttccctttcccacattggactccagaccacgtcacgggggaggggatagacacagtgtgggcatatgatgcaagcacttttagaggccgtgaaaagaggccctgtacatcgatgcatttccagctgcccattcaagcataaactttactgggagtgtttttctgaaatattgtagtcttccctgatcttgtagagacttacagctgtgtccttagcaaaggagcataattgtctttggtttggaatgagaaattactattactttccttaactgttggagaaaacaaacgaagaaaaacaggtagatttaaaatctgcttttgatgctattttcttaaaaattgtacttactgcctttccatgcacctggatgcatgaaaagatgaataagtgatggtcatggttatgggtaggaaaataagatgccaatagctcttcacattataaacaatatggcttaatgcctcgataaggagaaatgatttttaaagacagtatatattaccaactgtttgtagtatcctataactttgttcatacttaagttgtatctctttcctttttgtacttcatggcaaaattaattttctaaaggattcagagaggcgtttatattttataacatttattagaaataatttgttccaccactagattactgtattttatggaatctaagctgtatatgtgtacatttgtatacatgtatgtgtaaatgtaagcctgacgtgggttcagattccagttttgtcatcagcaagaggcctcggacccatgacttactgcctctgagccttggctttctgtgtatctctgccactgggataatggtacacataacagtggagtggggaccaatttctaaaactcatggcacctagtctttggtccataaatggtgtttgttattttagacactgagaaaaatcttattcacagaagttgcagattatttctgctagtcacttttttatttcttgagagctgccactcatttaatatttctcatttatgagaagagacttgactgatttagataaaagacgaattaaggaaaacctttgaacgtgagtagacaagcttcatatatctgtaaagtgaatattgaatggtagcttgagtcattcgtacttatcacagaaaagaattgaactcccagtcatacacctgtaactgaaataccaaactgtcttaatggagatgtaatgaagtaagatggtcacatctttaactaaacttataaaaattggtcagtttgatcattttcatttaaatgagaaacatctggggacacattcattcattcaacaaatatgtattcagtatctactgtagaagaagctctgagattctgcggtaaatagacatgcaaagcccctggcctcatggaattcctattctggaaaggagagacaaacaaataagcaagggaatcttagtgtgtgtggagttctctgaagtaaacagtgtgatggtgtagagagcacctgtgtgagtctgagatgaggggatgtgatgttgtggacttcagccaggtttttggcagctagtgtctgtccctttttcagtagctccagtcttcttatgaagaatgagttctttctgtggtgtgtgactttagtgggagggcagctcttgctctatgcctctcagttgccttccactgtaaccagtcctgtaactggtctgggcacactcggagggggatccatggtagctccttgccatgaagatgtgggtagaggagggttctgtggggcctcggaggtgttcaacattttctagaagtgttccttacggtagagtgccaactgtacatctagaagaaaggacagaattagcagattgattcaggccagaatcatccgtgagtgctatttcaagtgtagggactctctgatgagtaacaggatttacatcatcccaaagcatctccccacaaactactcattataaaagcaaaaatagcaactgcacaatggagacaccggatcccaccttcactgtgtggttactgccatcatcaagagcagaagggcctcctgggtgtctgtggagccctggtaagttcacagcttcacaggtggggtgttgccaaagaccacacaccgcactgctcatgagcacacatcagaggacccaccgccagggccactcggtccgataactgaagaatgttattgtcacgaaaaccaaagaaagactgagcaactgttttccgtctaaggagaccaaaggaatgttatggctaaatgcaaaaatggtcctggactggatcatacccttgggaaatgttatacagaacattattggggcaatgacagaatcacagtgttatttggaattattatattggaatacaatgttaaatttcctgaatataactgtgctgggattatgtatgaaaatatttttcttagaaaatacacactgaagtattaaggaagtaaagtagcatattgtatgcaaccttttctgcaatggtttaggaaaaaaatgttcaaagagaggaagagaacaaatgtgacaaaatgttgaaaatcggtaaacctgtaggccagctgcagtggctcacgcctgtagtcccaacactttgagaggctgaggtgggcagatggcttgagctcatgagttcaggaccagcccgggcaacatggtaaaaccccatctctacaaaattaggaggttgaggtgggaggatgatttgagtctaggaggcggaggttgcattgagccaagatcacaccaatgcagttcagcctgggcgataagtcttgtctc

SEQ ID NO: 95348 - DNA, 2265 bp, Homo sapiens
agcatcctggccgctgagcgcagcggccttggccgggctcagctcgcgtcctgccgcagtccctccgccgctagtcggagcgagcgcgagtgaggagacccccgccgggccactggcacttgcttctgcggcgagtcccacccacgaccgcagcccagcaactcgcaaacgcaacctgaagcctgggctgcgcagtgtgggagggcttcgcgatcttgggggacccattccgaacttgcagaggaccgtagctctcctggcctggagagtgtgaacaggattgtggactcttccaagattcacaatgatatggtgaatccaaagactggaaccaaaaagatttactcagtgctttagttttaacaacagtaaattgtctaccaacacccatcatggctaaaagtgcggaggtcaaactggcaatatttgggagagcaggcgtgggcaagtcagctcttgtagtgagatttctgaccaaacggttcatctgggaatatgatcccaccctcgaatcaacctaccgacaccaagcaaccatcgatgatgaagttgtttccatggagatactagacactgctggtcaggaagataccattcagagggaggggcacatgcgatggggggaaggctttgtgctggtctacgacattactgaccgaggaagttttgaggaagtgctgccacttaagaacatcctagatgagatcaaaaagcccaagaatgtgactctcatcttggttggaaacaaagctgacttggaccactccaggcaggttagcacagaagaaggagagaagctggccacagaattggcttgtgctttttacgagtgctctgcctgcactggagaagggaacatcacagagatattctatgaattgtgtcgagaggtgcgtcgccggaggatggtgcagggcaagacgaggcgacgcagctccaccacgcatgtcaagcaagccattaacaagatgctcaccaaaatcagtagttaggcagcccagctgaggtggaccaactaattggaaacactcttccccttctgttcccctttcaaaaataaaactctggcctctaataggttgggaagttttagcgtgttttatgcaatttcagtgctaacaatttcttcctttcctgcttgaataagatacactctaatggcatttgaacatgtaatcaccagagattctgaaatgactggtttatgttaagctatttttaggcatcttcaccttgctttaagtaggttgaagtttttgcaaaggcatttaaaaattcaatttcttgtcagatactacaaataattttcttaaaagtctaagatagcagaaaatacagtaaaaacacaggagaagaagctgagctattggaacaggaaatagaaggaactctagtttctgtttgaagtgaggattttctgaattatctaatatcatctaggttttctttaaaattttattttgttcttcagttcaagcatcttctcactaatgtttttcactataacagagaattcatttcaatttgagttggttctctcaatgatctattgatcattacaccctaactctccttccttggctcaaacaatattttccctataacaaaggcaataggacacaaaattcacatcctgctgggccttttttcatcaagtcagggtgatataaaaacattggaagtcttttcaccaaaccctgactttattgaatgctagtagaagatgtagaattagagacatctgatttgtttatcaccttagcagaaaaaccacagtccaaaagacaagcaaattaagaatggagcttaaccatgcctccattgggaagtctagactttgagccaggtacagtaagaaaaattagcctctgattcattaagtttgccacatgacttattttgatattttggatacattaactcacttaggagaattcagaaaagaatgggtgattaaagttcattacagctgaataaatgtgtctaaaacagactcttgtattctgaaagtacagtctacaactgataaaaccttatgattcttttctcccccattatgcccctatatatatcaagatttgggtactttattttagtagaaaatatatatcttttacatatgtatgtatttataaatgcatagatatatgtataaaaatttgtaagcgttagcggcattaattcaccaatgcatttggacaacttgatgtaactgactttattttatgtgactataataaaaagcataattttctcattctgtca

SEQ ID NO: 95349 - DNA, 1862 bp, Homo sapiens
taattagttataataataatgacacattataataaaaaaaaagaagagaggctaatcaacctaccgacaccaagcaaccatcgatgatgaagttgtttccatggagatactagacactgctggtcaggaagataccattcagagggaggggcacatgcgatggggggaaggctttgtgctggtctacgacattactgaccgaggaagttttgaggaagtgctgccacttaagaacatcctagatgagatcaaaaagcccaagaatgtgactctcatcttggttggaaacaaagctgacttggaccactccaggcaggttagcacagaagaaggagagaagctggccacagaattggcttgtgctttttacgagtgctctgcctgcactggagaagggaacatcacagagatattctatgaattgtgtcgagaggtgcgtcgccggaggatggtgcagggcaagacgaggcgacgcagctccaccacgcatgtcaagcaagccattaacaagatgctcaccaaaatcagtagttaggcagcccagctgaggtggaccaactaattggaaacactcttccccttctgttcccctttcaaaaataaaacaaaatattgcattctttgtttggattctgagaaatgtctgggcttcccattgtttctggcctctaataggttgggaagttttagcgtgttttatgcaatttcagtgctaacaatttcttcctttcctgcttgaataagatacactctaatggcatttgaacatgtaatcaccagagattctgaaatgactggtttatgttaagctatttttaggcatcttcaccttgctttaagtaggttgaagtttttgcaaaggcatttaaaaattcaatttcttgtcagatactacaaataattttcttaaaagtctaagatagcagaaaatacagtaaaaacacaggagaagaagctgagctattggaacaggaaatagaaggaactctagtttctgtttgaagtgaggattttctgaattatctaatatcatctaggttttctttaaaattttattttgttcttcagttcaagcatcttctcactaatgtttttcactataacagagaattcatttcaatttgagttggttctctcaatgatctattgatcattacaccctaactctccttccttggctcaaacaatattttccctataacaaaggcaataggacacaaaattcacatcctgctgggccttttttcatcaagtcagggtgatataaaaacattggaagtcttttcaccaaaccctgactttattgaatgctagtagaagatgtagaattagagacatctgatttgtttatcaccttagcagaaaaaccacagtccaaaagacaagcaaattaagaatggagcttaaccatgcctccattgggaagtctagactttgagccaggtacagtaagaaaaattagcctctgattcattaagtttgccacatgacttattttgatattttggatacattaactcacttaggagaattcagaaaagaatgggtgattaaagttcattacagctgaataaatgtgtctaaaacagactcttgtattctgaaagtacagtctacaactgataaaaccttatgattcttttctcccccattatgcccctatatatatcaagatttgggtactttattttagtagaaaatatatatcttttacatatgtatgtatttataaatgcatagatatatgtataaaaatttgtaagcgttagcggcattaattcaccaatgcatttggacaacttgatgtaactgactttattttatgtgactataataaaaagcataattttctcattctgtca

SEQ ID NO: 95350 - DNA, 809 bp, Homo sapiens
gggtttcactgtgtttttagtagagacggggtttcactgtgttagccaggatggtctcgatctcctgacctcgtgatccgcccgcctcggcctcccaaagtgctgggattacaggcgtcagccaccgcgcccggcctataatttttttttttaactccttcactgttgttggcagaatttagtttcttcctgttacaaggattgaggtcgccatttccttgctggtagtcacctgaggactgttcccagattctagagactgcctgcataccttggcttatcaccttccactgcctgcataccttggcttatgccctttctcctgcatcttccaagccagcaatggaagaggtaaccatccatcacggttttcccagaacaggctgatttgcgtcttctgtcctggcataaggatcccttcactctcggaagtgttccggattgtggactcttccaagattcacaatgatatggtgaatccaaagactggaaccaaaaagatttactcagtgctttagttttaacaacagtaaattgtctaccaacacccatcatggctaaaagtgcggaggtcaaactggcaatatttgggagagcaggcgtgggcaagtcagctcttgtagtgagatttctgaccaaacggttcatctgggaatatgatcccaccctcgaatcaacctaccgacaccaagcaaccatcgatgatgaagttgtttccatggagatactagacactgctggtcaggtgaataaagagttcagctaaaatatttttctggatcaaataaaactgagaaatctatgctatg

SEQ ID NO: 95351 - DNA, 384 bp, Homo sapiens
ttttgtttgttttgtttttaaccttgtgactaaagcaacaaatctaattgttgactaatgcacaataaacccattcaaatattacaatggttttttggccataatatgaaattggaaaattacttgaataaacataaaaaaatttatttgttttatatatcaaggaaatataaagcatttatagggttgtgtggagcatttcgctttccttaaaaagataggtgtgctaagcaaattaacaaattattttttgaaatgttgctcttttcttccacagctcttgtagtgagatttctgaccaaacggttcatctgggaatatgatcccaccctcggtaggtcaaattttgtttccttctcctcttcaataaaaatttatggcccc

SEQ ID NO: 95352 - DNA, 2319 bp, Homo sapiens
agcatcctggccgctgagcgcagcggccttggccgggctcagctcgcgtcctgccgcagtccctccgccgctagtcggagcgagcgcgagtgaggagacccccgccgggccactggcacttgcttctgcggcgagtcccacccacgaccgcagcccagcaactcgcaaacgcaacctgaagcctgggctgcgcagtgtgggagggcttcgcgatcttgggggacccattccgaacttgcagaggaccgtagctctcctggcctggagagtgtgaacaggattgtggactcttccaagattcacaatgatatggtgaatccaaagactggaaccaaaaagatttactcagtgctttagttttaacaacagtaaattgtctaccaacacccatcatggctaaaagtgcggaggtcaaactggcaatatttgggagagcaggcgtgggcaagtcagctcttgtagtgagatttctgaccaaacggttcatctgggaatatgatcccaccctcgaatcaacctaccgacaccaagcaaccatcgatgatgaagttgtttccatggagatactagacactgctggtcaggaagataccattcagagggaggggcacatgcgatggggggaaggctttgtgctggtctacgacattactgaccgaggaagttttgaggaagtgctgccacttaagaacatcctagatgagatcaaaaagcccaagaatgtgactctcatcttggttggaaacaaagctgacttggaccactccaggcaggttagcacagaagaaggagagaagctggccacagaattggcttgtgctttttacgagtgctctgcctgcactggagaagggaacatcacagagatattctatgaattgtgtcgagaggtgcgtcgccggaggatggtgcagggcaagacgaggcgacgcagctccaccacgcatgtcaagcaagccattaacaagatgctcaccaaaatcagtagttaggcagcccagctgaggtggaccaactaattggaaacactcttccccttctgttcccctttcaaaaataaaacaaaatattgcattctttgtttggattctgagaaatgtctgggcttcccattgtttctggcctctaataggttgggaagttttagcgtgttttatgcaatttcagtgctaacaatttcttcctttcctgcttgaataagatacactctaatggcatttgaacatgtaatcaccagagattctgaaatgactggtttatgttaagctatttttaggcatcttcaccttgctttaagtaggttgaagtttttgcaaaggcatttaaaaattcaatttcttgtcagatactacaaataattttcttaaaagtctaagatagcagaaaatacagtaaaaacacaggagaagaagctgagctattggaacaggaaatagaaggaactctagtttctgtttgaagtgaggattttctgaattatctaatatcatctaggttttctttaaaattttattttgttcttcagttcaagcatcttctcactaatgtttttcactataacagagaattcatttcaatttgagttggttctctcaatgatctattgatcattacaccctaactctccttccttggctcaaacaatattttccctataacaaaggcaataggacacaaaattcacatcctgctgggccttttttcatcaagtcagggtgatataaaaacattggaagtcttttcaccaaaccctgactttattgaatgctagtagaagatgtagaattagagacatctgatttgtttatcaccttagcagaaaaaccacagtccaaaagacaagcaaattaagaatggagcttaaccatgcctccattgggaagtctagactttgagccaggtacagtaagaaaaattagcctctgattcattaagtttgccacatgacttattttgatattttggatacattaactcacttaggagaattcagaaaagaatgggtgattaaagttcattacagctgaataaatgtgtctaaaacagactcttgtattctgaaagtacagtctacaactgataaaaccttatgattcttttctcccccattatgcccctatatatatcaagatttgggtactttattttagtagaaaatatatatcttttacatatgtatgtatttataaatgcatagatatatgtataaaaatttgtaagcgttagcggcattaattcaccaatgcatttggacaacttgatgtaactgactttattttatgtgactataataaaaagcataattttctcattctgtca

SEQ ID NO: 95353 - DNA, 2067 bp, Homo sapiens
gaattcccaaatttcttttgtttaaggattgtggactcttccaagattcacaatgatatggtgaatccaaagactggaaccaaaaagatttactcagtgctttagttttaacaacagtaaattgtctaccaacacccatcatggctaaaagtgcggaggtcaaactggcaatatttgggagagcaggcgtgggcaagtcagctcttgtagtgagatttctgaccaaacggttcatctgggaatatgatcccaccctcgaatcaacctaccgacaccaagcaaccatcgatgatgaagttgtttccatggagatactagacactgctggtcaggaagataccattcagagggaggggcacatgcgatggggggaaggctttgtgctggtctacgacattactgaccgaggaagttttgaggaagtgctgccacttaagaacatcctagatgagatcaaaaagcccaagaatgtgactctcatcttggttggaaacaaagctgacttggaccactccaggcaggttagcacagaagaaggagagaagctggccacagaattggcttgtgctttttacgagtgctctgcctgcactggagaagggaacatcacagagatattctatgaattgtgtcgagaggtgcgtcgccggaggatggtgcagggcaagacgaggcgacgcagctccaccacgcatgtcaagcaagccattaacaagatgctcaccaaaatcagtagttaggcagcccagctgaggtggaccaactaattggaaacactcttccccttctgttcccctttcaaaaataaaacaaaatattgcattctttgtttggattctgagaaatgtctgggcttcccattgtttctggcctctaataggttgggaagttttagcgtgttttatgcaatttcagtgctaacaatttcttcctttcctgcttgaataagatacactctaatggcatttgaacatgtaatcaccagagattctgaaatgactggtttatgttaagctatttttaggcatcttcaccttgctttaagtaggttgaagtttttgcaaaggcatttaaaaattcaatttcttgtcagatactacaaataattttcttaaaagtctaagatagcagaaaatacagtaaaaacacaggagaagaagctgagctattggaacaggaaatagaaggaactctagtttctgtttgaagtgaggattttctgaattatctaatatcatctaggttttctttaaaattttattttgttcttcagttcaagcatcttctcactaatgtttttcactataacagagaattcatttcaatttgagttggttctctcaatgatctattgatcattacaccctaactctccttccttggctcaaacaatattttccctataacaaaggcaataggacacaaaattcacatcctgctgggccttttttcatcaagtcagggtgatataaaaacattggaagtcttttcaccaaaccctgactttattgaatgctagtagaagatgtagaattagagacatctgatttgtttatcaccttagcagaaaaaccacagtccaaaagacaagcaaattaagaatggagcttaaccatgcctccattgggaagtctagactttgagccaggtacagtaagaaaaattagcctctgattcattaagtttgccacatgacttattttgatattttggatacattaactcacttaggagaattcagaaaagaatgggtgattaaagttcattacagctgaataaatgtgtctaaaacagactcttgtattctgaaagtacagtctacaactgataaaaccttatgattcttttctcccccattatgcccctatatatatcaagatttgggtactttattttagtagaaaatatatatcttttacatatgtatgtatttataaatgcatagatatatgtataaaaatttgtaagcgttagcggcattaattcaccaatgcatttggacaacttgatgtaactgactttattttatgtgactataataaaaagcataattttctcattctgtca

SEQ ID NO: 95354 - DNA, 2480 bp, Homo sapiens
gggtttcactgtgtttttagtagagacggggtttcactgtgttagccaggatggtctcgatctcctgacctcgtgatccgcccgcctcggcctcccaaagtgctgggattacaggcgtcagccaccgcgcccggcctataatttttttttttaactccttcactgttgttggcagaatttagtttcttcctgttacaaggattgaggtcgccatttccttgctggtagtcacctgaggactgttcccagattctagagactgcctgcataccttggcttatcaccttccactgcctgcataccttggcttatgccctttctcctgcatcttccaagccagcaatggaagaggtaaccatccatcacggttttcccagaacaggctgatttgcgtcttctgtcctggcataaggatcccttcactctcggaagtgttccggattgtggactcttccaagattcacaatgatatggtgaatccaaagactggaaccaaaaagatttactcagtgctttagttttaacaacagtaaattgtctaccaacacccatcatggctaaaagtgcggaggtcaaactggcaatatttgggagagcaggcgtgggcaagtcagctcttgtagtgagatttctgaccaaacggttcatctgggaatatgatcccaccctcgaatcaacctaccgacaccaagcaaccatcgatgatgaagttgtttccatggagatactagacactgctggtcaggaagataccattcagagggaggggcacatgcgatggggggaaggctttgtgctggtctacgacattactgaccgaggaagttttgaggaagtgctgccacttaagaacatcctagatgagatcaaaaagcccaagaatgtgactctcatcttggttggaaacaaagctgacttggaccactccaggcaggttagcacagaagaaggagagaagctggccacagaattggcttgtgctttttacgagtgctctgcctgcactggagaagggaacatcacagagatattctatgaattgtgtcgagaggtgcgtcgccggaggatggtgcagggcaagacgaggcgacgcagctccaccacgcatgtcaagcaagccattaacaagatgctcaccaaaatcagtagttaggcagcccagctgaggtggaccaactaattggaaacactcttccccttctgttcccctttcaaaaataaaacaaaatattgcattctttgtttggattctgagaaatgtctgggcttcccattgtttctggcctctaataggttgggaagttttagcgtgttttatgcaatttcagtgctaacaatttcttcctttcctgcttgaataagatacactctaatggcatttgaacatgtaatcaccagagattctgaaatgactggtttatgttaagctatttttaggcatcttcaccttgctttaagtaggttgaagtttttgcaaaggcatttaaaaattcaatttcttgtcagatactacaaataattttcttaaaagtctaagatagcagaaaatacagtaaaaacacaggagaagaagctgagctattggaacaggaaatagaaggaactctagtttctgtttgaagtgaggattttctgaattatctaatatcatctaggttttctttaaaattttattttgttcttcagttcaagcatcttctcactaatgtttttcactataacagagaattcatttcaatttgagttggttctctcaatgatctattgatcattacaccctaactctccttccttggctcaaacaatattttccctataacaaaggcaataggacacaaaattcacatcctgctgggccttttttcatcaagtcagggtgatataaaaacattggaagtcttttcaccaaaccctgactttattgaatgctagtagaagatgtagaattagagacatctgatttgtttatcaccttagcagaaaaaccacagtccaaaagacaagcaaattaagaatggagcttaaccatgcctccattgggaagtctagactttgagccaggtacagtaagaaaaattagcctctgattcattaagtttgccacatgacttattttgatattttggatacattaactcacttaggagaattcagaaaagaatgggtgattaaagttcattacagctgaataaatgtgtctaaaacagactcttgtattctgaaagtacagtctacaactgataaaaccttatgattcttttctcccccattatgcccctatatatatcaagatttgggtactttattttagtagaaaatatatatcttttacatatgtatgtatttataaatgcatagatatatgtataaaaatttgtaagcgttagcggcattaattcaccaatgcatttggacaacttgatgtaactgactttattttatgtgactataataaaaagcataattttctcattctgtca

SEQ ID NO: 95355 - DNA, 598 bp, Homo sapiens
ggcacgagctgaatagctgggattacaggtggccgccactatccccagctaatttttttgtatttttagaagagatggcgtttcaccgtgttggccagctggtcttgaactcctgacctcaagtgatagccctcctcggcctccccaagtgctaggattacaggcatgagccaccacccctggcttcattcttcaggaaaccatctagttcaatttagcttcaaagaatgtctttccctttttggtacagtgggatcttacctctggttgcatctaaaaagcaattctgaatttaagaatctttaaactcttgggactggttaagtggtttgagtctcaaagggacctaagtcatggagtgtctggaggtgctcagggtggcatcttggaaaagtaaatggaatggaaattcaagagcccacagcaatcccagataactcagaaatctcaaagagaagctgctttcaggtcttttttgagacagtcgctctgttgcccaggctgaggcaggagaatcgcttgaacccgggaggcgaagatttcagtgagccgagatcgcaccattgtacttcagcctgggctagaaaagtgaaattcc

SEQ ID NO: 95356 - DNA, 462 bp, Homo sapiens
tctgtaatggtggcagcatgcagagacctgaatgaagggggagtgggccatgtgaacgtttgcagaacggcagtccatgcaggaggaactgcaggtgcaaaggccctggggcaggaacaggggcatgcatagcacagtggagccccagcgaggccagtgtagcagcaagcaagcagcaagcaagcagggagagccgaaggaatgaggccagtgggagggcagaccctgtggagccttgggcatggccaggcaggctcactgtatcctagaggcaatgggaacttgctggaggatttttagccgatcagattcattgtgaaaagatcaacttggctgcaatggcaagagagaggcaggcaccgtgtccggggagaaatgctgatgactgggcccaggtcgtagaagtagagatgggcaaggtggacagagaaaaggttttaaagtagcaataatagtacttgc

SEQ ID NO: 95357 - DNA, 1384 bp, Homo sapiens
ttgaaggaaaaatatcaaatgctttgaattttttttctcttttttcaaaccctctgcagaggtaggaaggtatgaatttcttttttatgtcaagatgcaaaaacaaatcatgatgcttttgttgggagaatttttgtattcagtattttgtatgtacctttttttttttaaattggaaagcacaattcggtttaacatttagctttgcttgactccagtgtaagatgaagatgaccttgtcacagctcccctgacctgaagcagagcccttcccatcactgacagtgttgggggttgagagccccccagcagagcccttcccatcactgacagtgtgtcggcagctgagagctcccccagcagagcccttcccatcactgaacagtgttggcggctgagagccccccagcagagcccttcccatcactgacagtgttgggggctgagagccccccagcagagcccttcccatcactgaacagtgttggcggctgagagccccccagcagagcccttcccatcactgacagtgttgggggctgagagcccccctagcagagcccttcccatcactgacagtgtctggggctgagagccccccctagcagagcccttcccatcactgacagtgttgggggctgagagccccccagcagagcccttcccatcactgacagtgtctggggctgagagccccccagcagagcccttcccatcactgacagtgtctggggctgagagccccccctagcagagcccttcccatcactgacagtgtcgggttgagagccacccccagcagagcccttgccacgtacagagattttctgtcagcagtttcccagtatttcagactcataatctgtgtttagcactccagtgttctcttgtaatagccaggtctggaaacgacccatggaaagaggggcctttgtattctgctagaacacagagcatagtagtagatcacttttctgaagagctttttaaaatacagctaatcaaggagtttgcgatttctcttactttctacagctcagcagtgactaatgatgtgtgactatgcgaatgagtttgatgaattcgtaaaaactaagcgcttaaatggttatagaaatgaaaacatggatatttagaagcctttctatatacacagtgcagttgagatggtttacagcaaatttcgttttatttctgaaaatgttgtaaacatgtaattagtgaaagattttgtaaaacattgtcctgtatttttgtctgtaaatatattgcataagttctaagtataaatatgtcagtatcatgtatgttattttaaattgcctgtacgccactttacacattgacattcaaataaaagccaacacttcagtggcgtgtaata

SEQ ID NO: 95358 - DNA, 1930 bp, Homo sapiens
ttgaaggaaaaatatcaaatgctttgaattttttttctcttttttcaaaccctctgcagaggtaggaaggtatgaatttcttttttatgtcaagatgcaaaaacaaatcatgatgcttttgttgggagaatttttgtattcagtattttgtatgtacctttttttttttaaattggaaagcacaattcggtttaacatttagctttgcttgactccagtgtaagatgaagatgaccttgtcacagctcccctgacctgaagcagagcccttcccatcactgacagtgttgggggttgagagccccccagcagagcccttcccatcactgacagtgtgtcggcagctgagagctcccccagcagagcccttcccatcactgaacagtgttggcggctgagagccccccagcagagcccttcccatcactgacagtgttgggggctgagagccccccagcagagcccttcccatcactgaacagtgttggcggctgagagccccccagcagagcccttcccatcactgacagtgttgggggctgagagcccccctagcagagcccttcccatcactgacagtgtctggggctgagagccccccctagcagagcccttcccatcactgacagtgttgggggctgagagccccccagcagagcccttcccatcactgacagtgtctggggctgagagccccccagcagagcccttcccatcactgacagtgtctggggctgagagccccccctagcagagcccttcccatcactgacagtgtcgggttgagagccacccccagcagagcccttgccacgtacagagattttctgtcagcagtttcccagtatttcagactcataatctgtgtttagcactccagtgttctcttgtaatagccaggtctggaaacgacccatggaaagaggggcctttgtattctgctagaacacagagcatagtagtagatcacttttctgaagagctttttaaaatacagctaatcaaggagtttgcgatttctcttactttctacagctcagcagtgactaatgatgtgtgactatgcgaatgagtttgatgaattcgtaaaaactaagcgcttaaatggttatagaaatgaaaacatggatatttagaagcctttctatatacacagtgcagttgagatggtttacagcaaatttcgttttatttctgaaaatgttgtaaacatgtaattagtgaaagattttgtaaaacattgtcctgtatttttgtctgtaaatatattgcataagttctaagtataaatatgtcagtatcatgtatgttattttaaattgcctgtacgccactttacacattgacattcaaataaaagccaacacttcagtggcgtgtaataaaagctgattggagcgtgttcatacctgaggtgtggttcccttggcaaaggtgaatcaaggaaagagcatctcatttccagagggaatgtcagtggaaatgggggcttcgggacaaacttttgagatcaaattcattttttaaggaagtacagatatcaagactgagctttatttggagttagatagaaggcttaattcatgaaatgtatgtgacacattaggacaactttgctcttggaaacctttagcatcccaaggcattgttttgactcatcaaggcaagcatgatctggtgggtgcattttttttctaggagaagagggagagtgacagctttcctatttgccaggcacaagttagatattttcacacacctgatttcttttcatcttaacactccataaagtggggattggtggctctagtgtttcacttgtcaaaaatatctccaaactagccttccagagaacctgtgtccccatctttatagtttgtaaagttgtatatcctaacatcctatttctagcttgtatttataatttgta

SEQ ID NO: 95359 - DNA, 1205 bp, Homo sapiens
ttgaaggaaaaatatcaaatgctttgaattttttttctcttttttcaaaccctctgcagaggtaggaaggtatgaatttcttttttatgtcaagatgcaaaaacaaatcatgatgcttttgttgggagaatttttgtattcagtattttgtatgtacctttttttttttaaattggaaagcacaattcggtttaacatttagctttgcttgactccagtgtaagatgaagatgaccttgtcacagctcccctgacctgaagcagagcccttcccatcactgacagtgttgggggttgagagccccccagcagagcccttcccatcactgacagtgtgtcggcagctgagagctcccccagcagagcccttcccatcactgaacagtgttggcggctgagagccccccagcagagcccttcccatcactgacagtgttgggggctgagagccccccagcagagcccttcccatcactgaacagtgttggcggctgagagccccccagcagagcccttcccatcactgacagtgttgggggctgagagcccccctagcagagcccttcccatcactgacagtgtctggggctgagagccccccctagcagagcccttcccatcactgacagtgttgggggctgagagccccccagcagagcccttcccatcactgacagtgtctggggctgagagccccccagcagagcccttcccatcactgacagtgtctggggctgagagccccccctagcagagcccttcccatcactgacagtgtcgggttgagagccacccccagcagagcccttgccacgtacagagattttctgtcagcagtttcccagtatttcagactcataatctgtgtttagcactccagtgttctcttgtaatagccaggtctggaaacgacccatggaaagaggggcctttgtattctgctagaacacagagcatagtagtagatcacttttctgaagagctttttaaaatacagctaatcaaggagtttgcgatttctcttactttctacagctcagcagtgactaatgatgtgtgactatgcgaatgagtttgatgaattcgtaaaaactaagcgcttaaatggttatagaaatgaaaacatggatatttagaagcctttctatatacacagtgcagttgagatggtttacagccaaccgtgacaagtggtacgagctcga

SEQ ID NO: 95360 - DNA, 2980 bp, Homo sapiens
cccagagacccaggccgcggaactggcaggcgtttcagagcgtcagaggctgcggatgagcagacttggaggactccaggccagagactaggctgggcgaagagtcgagcgtgaagggggctccgggccagggtgacaggaggcgtgcttgagaggaagaagttgacgggaaggccagtgcgacggcaaatctcgtgaaccttgggggacgaatgctcaggatgcgggtccccgccctcctcgtcctcctcttctgcttcagagggagagcaggcccgtcgccccatttcctgcaacagccagaggacctggtggtgctgctgggggaggaagcccggctgccgtgtgctctgggcgcctactgggggctagttcagtggactaagagtgggctggccctagggggccaaagggacctaccagggtggtcccggtactggatatcagggaatgcagccaatggccagcatgacctccacattaggcccgtggagctagaggatgaagcatcatatgaatgtcaggctacacaagcaggcctccgctccagaccagcccaactgcacgtgctggtccccccagaagccccccaggtgctgggcggcccctctgtgtctctggttgctggagttcctgcgaacctgacatgtcggagccgtggggatgcccgccctacccctgaattgctgtggttccgagatggggtcctgttggatggagccaccttccatcagaccctgctgaaggaagggacccctgggtcagtggagagcaccttaaccctgacccctttcagccatgatgatggagccacctttgtctgccgggcccggagccaggccctgcccacaggaagagacacagctatcacactgagcctgcagtaccccccagaggtgactctgtctgcttcgccacacactgtgcaggagggagagaaggtcattttcctgtgccaggccacagcccagcctcctgtcacaggctacaggtgggcaaaagggggctctccggtgctcggggcccgcgggccaaggttagaggtcgtggcagacgcctcgttcctgactgagcccgtgtcctgcgaggtcagcaacgccgtgggtagcgccaaccgcagtactgcgctggatgtgctgtttgggccgattctgcaggcaaagccggagcccgtgtccgtggacgtgggggaagacgcttccttcagctgcgcctggcgcgggaacccgcttccacgggtaacctggacccgccgcggtggcgcgcaggtgctgggctctggagccacactgcgtcttccgtcggtggggcccgaggacgcaggcgactatgtgtgcagagctgaggctgggctatcgggcctgcggggcggcgccgcggaggctcggctgactgtgaacgctcccccagtagtgaccgccctgcactctgcgcctgccttcctgaggggccctgctcgcctccagtgtctggttttcgcctctcccgccccagatgccgtggtctggtcttgggatgagggcttcctggaggcggggtcgcagggccggttcctggtggagacattccctgccccagagagccgcgggggactgggtccgggcctgatctctgtgctacacatttcggggacccaggagtctgactttagcaggagctttaactgcagtgcccggaacctgctgggcgagggaggtgcccaggccagcctgggccgtagagacttgctgcccactgtgcggatagtggccggagtggccgctgccaccacaactctccttatggtcatcactggggtggccctctgctgctggcgccacagcaaggcctcagcctctttctccgagcaaaagaacctgatgcgaatccctggcagcagcgacggctccagttcacgaggtcctgaagaagaggagacaggcagccgcgaggaccggggccccattgtgcacactgaccacagtgatctggttctggaggaggaagggactctggagaccaaggacccaaccaacggttactacaaggtccgaggagtcagtgtgagcctgagccttggcgaagcccctggaggaggtctcttcctgccaccaccctccccccttgggcccccagggacccctaccttctatgacttcaacccacacctgggcatggtccccccctgcagactttacagagccagggcaggctatctcaccacaccccaccctcgagctttcaccagctacatcaaacccacatcctttgggcccccagatctggcccccgggactccccccttcccatatgctgccttccccacacctagccacccgcgtctccagactcacgtgtgacatctttccaatggaagagtcctgggatctccaacttgccataatggattgttctgatttctgaggagccaggacaagttggcgaccttactcctccaaaactgaacacaaggggagggaaagatcattacatttgtcaggagcatttgtatacagtcagctcagccaaaggagatgccccaagtgggagcaacatggccacccaatatgcccacctattccccggtgtaaaagagattcaagatggcaggtaggccctttgaggagagatggggacagggcagtgggtgttgggagtttggggccgggatggaagttgtttctagccactgaaagaagatatttcaagatgaccatctgcattgagaggaaaggtagcataggatagatgaagatgaagagcataccaggccccaccctggctctccctgaggggaactttgctcggccaatggaaatgcagccaagatggccatatactccctaggaacccaagatggccaccatcttgattttactttccttaaagactcagaaagacttggacccaaggagtggggatacagtgagaattaccactgttggggcaaaatattgggataaaaatatttatgtttaataataaaaaaaagtcaaagagg

SEQ ID NO: 95361 - DNA, 1513 bp, Homo sapiens
cccagagacccaggccgcggaactggcaggcgtttcagagcgtcagaggctgcggatgagcagacttggaggactccaggccagagactaggctgggcgaagagtcgagcgtgaagggggctccgggccagggtgacaggaggcgtgcttgagaggaagaagttgacgggaaggccagtgcgacggcaaatctcgtgaaccttgggggacgaatgctcaggatgcgggtccccgccctcctcgtcctcctcttctgcttcagagggagagcaggcccgtcgccccatttcctgcaacagccagaggacctggtggtgctgctgggcgagggaggtgcccaggccagcctgggccgtagagcctcagcctctttctccgagcaaaagaacctgatgcgaatccctggcagcagcgacggctccagttcacgaggtcctgaagaagaggagacaggcagccgcgaggaccggggccccattgtgcacactgaccacagtgatctggttctggaggaggaagggactctggagaccaaggacccaaccaacggttactacaaggtccgaggagtcagtgtgagcctgagccttggcgaagcccctggaggaggtctcttcctgccaccaccctccccccttgggcccccagggacccctaccttctatgacttcaacccacacctgggcatggtccccccctgcagactttacagagccagggcaggctatctcaccacaccccaccctcgagctttcaccagctacatcaaacccacatcctttgggcccccagatctggcccccgggactccccccttcccatatgctgccttccccacacctagccacccgcgtctccagactcacgtgtgacatctttccaatggaagagtcctgggatctccaacttgccataatggattgttctgatttctgaggagccaggacaagttggcgaccttactcctccaaaactgaacacaaggggagggaaagatcattacatttgtcaggagcatttgtatacagtcagctcagccaaaggagatgccccaagtgggagcaacatggccacccaatatgcccacctattccccggtgtaaaagagattcaagatggcaggtaggccctttgaggagagatggggacagggcagtgggtgttgggagtttggggccgggatggaagttgtttctagccactgaaagaagatatttcaagatgaccatctgcattgagaggaaaggtagcataggatagatgaagatgaagagcataccaggccccaccctggctctccctgaggggaactttgctcggccaatggaaatgcagccaagatggccatatactccctaggaacccaagatggccaccatcttgattttactttccttaaagactcagaaagacttggacccaaggagtggggatacagtgagaattaccactgttggggcaaaatattgggataaaaatatttatgtttaataataaaaaaaagtcaaagagg

SEQ ID NO: 95362 - DNA, 2725 bp, Homo sapiens
cccagagacccaggccgcggaactggcaggcgtttcagagcgtcagaggctgcggatgagcagacttggaggactccaggccagagactaggctgggcgaagagtcgagcgtgaagggggctccgggccagggtgacaggaggcgtgcttgagaggaagaagttgacgggaaggccagtgcgacggcaaatctcgtgaaccttgggggacgaatgctcaggatgcgggtccccgccctcctcgtcctcctcttctgcttcagagggagagcagggtggtcccggtactggatatcagggaatgcagccaatggccagcatgacctccacattaggcccgtggagctagaggatgaagcatcatatgaatgtcaggctacacaagcaggcctccgctccagaccagcccaactgcacgtgctggtccccccagaagccccccaggtgctgggcggcccctctgtgtctctggttgctggagttcctgcgaacctgacatgtcggagccgtggggatgcccgccctacccctgaattgctgtggttccgagatggggtcctgttggatggagccaccttccatcagaccctgctgaaggaagggacccctgggtcagtggagagcaccttaaccctgacccctttcagccatgatgatggagccacctttgtctgccgggcccggagccaggccctgcccacaggaagagacacagctatcacactgagcctgcagtaccccccagaggtgactctgtctgcttcgccacacactgtgcaggagggagagaaggtcattttcctgtgccaggccacagcccagcctcctgtcacaggctacaggtgggcaaaagggggctctccggtgctcggggcccgcgggccaaggttagaggtcgtggcagacgcctcgttcctgactgagcccgtgtcctgcgaggtcagcaacgccgtgggtagcgccaaccgcagtactgcgctggatgtgctgtttgggccgattctgcaggcaaagccggagcccgtgtccgtggacgtgggggaagacgcttccttcagctgcgcctggcgcgggaacccgcttccacgggtaacctggacccgccgcggtggcgcgcaggtgctgggctctggagccacactgcgtcttccgtcggtggggcccgaggacgcaggcgactatgtgtgcagagctgaggctgggctatcgggcctgcggggcggcgccgcggaggctcggctgactgtgaacgctcccccagtagtgaccgccctgcactctgcgcctgccttcctgaggggccctgctcgcctccagtgtctggttttcgcctctcccgccccagatgccgtggtctggtcttgggatgagggcttcctggaggcggggtcgcagggccggttcctggtggagacattccctgccccagagagccgcgggggactgggtccgggcctgatctctgtgctacacatttcggggacccaggagtctgactttagcaggagctttaactgcagtgcccggaacctgctgggcgagggaggtgcccaggccagcctgggccgtagagcctcagcctctttctccgagcaaaagaacctgatgcgaatccctggcagcagcgacggctccagttcacgaggtcctgaagaagaggagacaggcagccgcgaggaccggggccccattgtgcacactgaccacagtgatctggttctggaggaggaagggactctggagaccaaggacccaaccaacggttactacaaggtccgaggagtcagtgtgagcctgagccttggcgaagcccctggaggaggtctcttcctgccaccaccctccccccttgggcccccagggacccctaccttctatgacttcaacccacacctgggcatggtccccccctgcagactttacagagccagggcaggctatctcaccacaccccaccctcgagctttcaccagctacatcaaacccacatcctttgggcccccagatctggcccccgggactccccccttcccatatgctgccttccccacacctagccacccgcgtctccagactcacgtgtgacatctttccaatggaagagtcctgggatctccaacttgccataatggattgttctgatttctgaggagccaggacaagttggcgaccttactcctccaaaactgaacacaaggggagggaaagatcattacatttgtcaggagcatttgtatacagtcagctcagccaaaggagatgccccaagtgggagcaacatggccacccaatatgcccacctattccccggtgtaaaagagattcaagatggcaggtaggccctttgaggagagatggggacagggcagtgggtgttgggagtttggggccgggatggaagttgtttctagccactgaaagaagatatttcaagatgaccatctgcattgagaggaaaggtagcataggatagatgaagatgaagagcataccaggccccaccctggctctccctgaggggaactttgctcggccaatggaaatgcagccaagatggccatatactccctaggaacccaagatggccaccatcttgattttactttccttaaagactcagaaagacttggacccaaggagtggggatacagtgagaattaccactgttggggcaaaatattgggataaaaatatttatgtttaataataaaaaaaagtcaaagagg

SEQ ID NO: 95363 - DNA, 1640 bp, Homo sapiens
cccagagacccaggccgcggaactggcaggcgtttcagagcgtcagaggctgcggatgagcagacttggaggactccaggccagagactaggctgggcgaagagtcgagcgtgaagggggctccgggccagggtgacaggaggcgtgcttgagaggaagaagttgacgggaaggccagtgcgacggcaaatctcgtgaaccttgggggacgaatgctcaggatgcgggtccccgccctcctcgtcctcctcttctgcttcagagggagagcaggcccgtcgccccatttcctgcaacagccagaggacctggtggtgctgctgggcgagggaggtgcccaggccagcctgggccgtagagcctcagcctctttctccgagcaaaagaacctgatgcgaatccctggcagcagcgacggctccagttcacgaggtcctgaagaagaggagacaggcagccgcgaggaccggggccccattgtgcacactgaccacagtgatctggttctggaggaggaagggactctggagaccaaggacccaaccaacggttactacaaggtccgaggagtcagtgtgagcctgagccttggcgaagcccctggaggaggtctcttcctgccaccaccctccccccttgggcccccagggacccctaccttctatgacttcaacccacacctgggcatggtccccccctgcagactttacagagccagggcaggctatctcaccacaccccaccctcgagctttcaccagctacatcaaacccacatcctttgggcccccagatctggcccccgggactccccccttcccatatgctgccttccccacacctagccacccgcgtctccagactcacgtgtgacatctttccaatggaagagtcctgggatctccaacttgccataatggattgttctgatttctgaggagccaggacaagttggcgaccttactcctccaaaactgaacacaaggggagggaaagatcattacatttgtcaggagcatttgtatacagtcagctcagccaaaggagatgccccaagtgggagcaacatggccacccaatatgcccacctattccccggtgtaaaagagattcaagatggcaggtaggccctttgaggagagatggggacagggcagtgggtgttgggagtttggggccgggatggaagttgtttctagccactgaaagaagatatttcaagatgaccatctgcattgagaggaaaggtagcataggatagatgaagatgaagagcataccaggccccaccctggctctccctgaggggaactttgctcggccaatggaaatgcagccaagatggccatatactccctaggaacccaagatggccaccatcttgattttactttccttaaagactcagaaagacttggacccaaggagtggggatacagtgagaattaccactgttggggcaaaatattgggataaaaatatttatgtttaataataaaaaaaagtcaaagaggcaagtgtgtcttagggagtctactggcattatcactctccaccaaggaaggggtcccttagacctgtcccaaggtccctcctctaccctagcctatgaggtggctgtaggagtaaaactgtgagcca

SEQ ID NO: 95364 - DNA, 713 bp, Homo sapiens
agcactgctccttctctcacgccaactgagtctcttgatctgtacatgcaatcccaggcagctcgcgaacacaaacccggggccagccgcctactgctgctgctgctgctgccgctgccgccgccgccgccgccgctgcctccgccggctctgcgaacccgggacttttcatgcaccacactctccgcctgcttccctccgtgtcctgaaaagtgcgaccgttctcccaaggaatttccacggcaagtcttaggagggaatgattccccagtaatattccctgccctgacccaaagtgctggttggcctccctcccaggaagactgcttcttgcgtaacgccggccacagaaagagactccgatggacttacaccgggcagccttcaagatggagaactcatcctaccttcccaaccctctggcatccccagcactgatggtcctggcatccacggctgaggccagccgtgatgcttccatcccttgtcagcagccacgaccctttggtgtacctgtctcagttgacaaggacgtgcatattcctttcaccaacggttcctatacctttgcctctatgtaccatcggcaaggtggggtgccaggcacttttgccaatcgtgatttccccccttctctactacacctccaccctcaatttgtcccccaaatctagattgcacccaatcagtatgctgaatcatagtggtgtggg

SEQ ID NO: 95365 - DNA, 431 bp, Homo sapiens
tggagatttataatgcacaatagcatggtaaagcctctaagatgagatacatatacttatttaactttttattgttattgttttctgttcttttcttttctcttttaatagagacagagtctcactcactctgtcacccagaatgctcagtgcattcttgaactcctgtcctcaagggatccgcccacctcagccccccaagtagctggaactacaggcgtgtgccaccatgcctggctgttagtgttttcaaaacaatttttcttacaacacttactgtagtatttttcaaattacatgtcttgggtcataaaatcaattgagcaggttaggatcagcatttttcttgatgaaataaaatgtctaatagaagtggtcactgtgcatcctttttattgacggttactagtgtttgatgaaactttggctcc

SEQ ID NO: 95366 - DNA, 165 bp, Homo sapiens
aacaaactaaaaaactcataataagcatgtgaatccttcaccagcaaccaggttctctcatcaaaattgactagaaggatggtgtgacccatggagagaaggaagaacagtgtggtgctgcggcccacctgagagccaggcggggaaggggagcctcctcctcca

SEQ ID NO: 95367 - DNA, 1679 bp, Homo sapiens
taccaggctcactatcattgaaggagaaaccatattcaaaattgttaggctataattgttctgaatcatacattcaaaagtgtatgtgtcttatcaacataaagtattttaaaagattggaacactagaaaactaaataggatggctattgaggacaacaggcatagttttaccattttggtaccttctactgagttaatcttggtataaacatatttactttaaaagtaatgtcaaataaaaacctaaatgaaaaatgaaatagttttctatcaaggaatcatcttactgtatctctgtatcatttatggtgtatgtgttacatacattacaaatgttatttgatgtcatgatttctgaatccaaactggtatttgtcagctaagatttactgcttgagtacagtaataaaaatgaaaatagttttctgaaattttatgtttaaactaatttgttagttttaagatacagacacttgtgatagttatgatactgttttttttcttaaatattgttaaaatttgtattttctattgtatttttatttgcattctggtcaaatcttggtttctgagtttttctctgtattatctgtattaatgttagataacatagctatttttctaatataaaagttattttaagcagtttattcagaggggatattatttacctctgttaccctgtaggtctctaaacttttaagtagacttattttttaaaaagctactatactcccttctttctgaatcaaaaacattcagagataagaattagatggaagtaaagctccctgtggtttgtgctccatcacaattttttttttttttttttttttttttagtagaggcagggtttccccatgttggccaggctagtcttgaactcctgacctcaggtgatccccctgcctcggcctcccaaagtgctgggattgcaggggtgaaccaccacgcccagccttcatcacagttttttatggaaacagaatacaaagcagcaggaagctctaagtgtccagattcaagttttcatgttggtgccttctttaaatttacttttttttttttttctttttttgagacagagtcttactctgtcacccaggctggagtgcagtggcgcgatctctgctcattgcagccttcgtcccctgagttcaaatgattcccagcctcagcctcccaagtaactgggactacaagtgtgcaccactgcgcctggctcatttttgtgtttttagtagaaatggggttttgctgtgttggccaggctggtctcgaactcctggcctcacatgatccacccacctcggcctcccaactaaatttacttttaaaatgggatattcatcacctgagtattgtcaggcttgttactcttatctctgtttacagatcacttataagtcaaaggtattgtgtaagaacaaagtggtattttaaatgacaaaagggctttcatccttagtgcagccttatataattgagcacagtgattctgtctttggtcatctgtaatccacacaggtggatggttttatagattgatgtgtaatttgtgggggttatagaaacgattatattcatatagcaaagtctatatgtattatttgtagttcagagctaggatgattcagtcttgtctagttccacaaatggaaggagggtgtctgcata

SEQ ID NO: 95368 - DNA, 460 bp, Homo sapiens
ctcttatctctgtttacagatcacttataagtcaaaggtattgtgtaagaacaaagtggtattttaaatgacaaaagggctttcatccttagtgcagccttatataattgagcacagtgattctgtctttggtcatctgtaatccacacaggtggatggttttatagattgatgtgtaatttgtgggggttatagaaacgattatattcatatagcaaagtctatatgtattatttgtagttcagagctaggaaaactcaatgcagtccttcctgatcttgactcaggaaatcagtagttccaaggatgattcagtcttgtctagttccacaaatggaaggagggtgtctgcataaaaagataaggggaatcagtcaggaagcccattttgaatagcttcatgaatcccttaaattgttgctcacttcagcagaactcattaaagctatcacaattttta

SEQ ID NO: 95369 - DNA, 590 bp, Homo sapiens
acgattaccttatttaagcttcgtaccactgctatctcccttttacagatgaaacaaccaaggcttcagatgttgagtagcccaaggccatacaactcttaaatagtggggctgggatttgaatccagatctgcttttctccaaagcaccaagctgtgcttggtacctccttatgtagttcctacatccccagtgtgagacaactgggttatataaagaaatactgggtgcagtggggtgcttaaacatcaacatgggcttttaaatgtgggccggagaactgggctagtctagtctgccttctttccttccttcaacaaatgtttatgagtgcatgctgtataccaagggcttatctagacattgagaaatcctaggaagcaaaacagaccacacttactaagctatgtgacctgagcaaatcaccaaatgtgctagttattaagcaattgactttcacaccaacttgccttctgtatgtggctttgagatggtgcatctaagactctgcaaaccacatttctcctttgccgctagtccctgtgaagctctgccagggtgctagatagagggagactcaaggaaggaga

SEQ ID NO: 95370 - DNA, 364 bp, Homo sapiens
ttaaggaagccccagcaggctctcaggagggaatcttgtcttcagttccaggtgatggaagaagccacgcccagcactcagccagccccgagggccctagctgtgggaacaggctgagcaggttgctgggaaacccagctaaaggtgctcgggcaagctcctgccctgcacctgctgccctccacagagcacacaattgcttttcttttctttttgagatagagtctcactctttcacctaggctggagtgcagtggcacaatcagagctcactgcagcctcgacctcccaggctcaggtgatcctcccatctcagcgtcccgaatagctgggactacaggcacgtgacaccacacccggctaa

SEQ ID NO: 95371 - DNA, 430 bp, Homo sapiens
cactccagcctgggtgacagagctagaccctgtctctaaagataagaaataataaaaaatatatatatattaatcaaactcatatataaaaggttttggtgggataaaggactttagaccacagagcaatggctcttctgtctgttatgttttatttgcttacattcattcattttgatgatgctggtagtctcaaaaattaatggattttcaaaagatgttggccttttattgttgacatatttctaggaaacaaagtcttaatatcattattaattattcttaatttaaaaagacatttatgtctcttgattaattacaagcttacttttttcaaaaataatttgagacaagatgcagacattcatacagtattttatatatagtacatgaaagaaaaataatcaaggtgaagatgtaaaaaaggaaa

SEQ ID NO: 95372 - DNA, 333 bp, Homo sapiens
aaagaggatacataaggcatagttttgtcccaatagacttacatgaaaaaagcaggaggacaaattttaaaaaagaagcctttagagtatgccaaatttatttctttttttgagacaagagtcttgctctgtcaccaggctggagtgcgatctttgctcactgcaacctccacctcccgggttcaagcgattctcctgcctcagcctcccgagtagctgggactacaggtgtgcacccccacgcccagctaatttttgtatttttagtagagatggggtttcaccatgttggtcatgatggtctccatctcttgacctcgtcatctggctgcc

SEQ ID NO: 95373 - DNA, 230 bp, Homo sapiens
gtcataaggacgcccgggatacagcaagagaaaaagcaaagctgggaggaagacatgagtgcttaaaaaacaaaatcattggctgggcgcggtggctcacacctgtaatcccagcactttgggaagtcgaggcaggtggatcacctgaggtcaggagtttgagaccagcctggccaagatggtgaaaccctgtctctactaaaaatacaaaaattagccaggagtggtgg

SEQ ID NO: 95374 - DNA, 314 bp, Homo sapiens
aatcagtggatacttggtgagggcaccaagtatccactaacgtttcttagcttctctgtgtgtgtgcccattcataggcagatcctggactctgtctctaggagattaaatttaaaagatgctgggtcctaaagctcgacccagcatcatttaaactggaccgtgtcaatctggggggactggattgtgagtgggatgattgtaaccagaagccatagcaaagggtggactagccgcctaaacatagaaagagcagggcttccttctgcgtttcacgggctgcactgacttcatctgctcctgtggtgtgggct

SEQ ID NO: 95375 - DNA, 166 bp, Homo sapiens
cttcttccccaggattacttgtatctcccatgtcagtttggtgcttctagccaaaaagtggtggtcaaccctctaccttataaggcatctcaaaaccaacctcccagctgggcacagtggctcacacctgtaatcccagcactttggaaggccgaggcgggtggat

SEQ ID NO: 95376 - DNA, 345 bp, Homo sapiens
gcgactcatttagctacctatatttagttttaaccacacccaagatattcctagttgtctgaattcttgattcagatttacttaaaaatatgtaagtatttaatactactttttgaatcagaattgggatattgatcaaagcgaggaaaaaatgcctcttgtcaggtaaagttaatgcattttctttttttgcatgtgttatcagaagttttcaaaatttcagcttagagacctcttctaggacctagataattatttggaaactgcaaaactgcacaaaatttaaaaaaaatgaaaagctaagaagttttgtgttgtgatttggggtggaggagtattcatttc

SEQ ID NO: 95377 - DNA, 812 bp, Homo sapiens
ttgaggcggagtctcactctgttgcccaggctggggtgcagtagcgcagtctcggctcgcaacctctgcaccctaggctcaagcaacactcgcacctccacctcctgaatagctaggactacaggtgcacgcaccataccacacctggctaatttttgtatttttttatagagacaggggtcttgctatgctgcccaggctggtcttaaactcctgagctcaagcaatctgcatgcccaagccattggcccatcttggccttctaaagtgctgggattacaggcgtgagtcaccatggtcagcccatattaatttaaagtaggcttcaaatataattattcactaattgggaatgcctggggatgtatatgaatgtattaccgttttgtgagtagtagtgtgtgcttgtgttcatggatggcattcatcagaatgtttgcaatggtgtagccaggttacactgccatcttcctgttctcctttgtgcttacttgctctgcctgtatttgctgcagtttctagcgagtgtatgtaggtgttggcccagaacttgcttttgtagagatcatacattgtgctaatttatcccaaatcagtttttgtgtattatctgtgggcccaatgtgtaatttgaactttaaggatactacttcagactgcagtgtagcataacctttaaaaaaaaaaatgctagttttgccctaatctgtgcatattccagttgttcaatgggtattagtaatacatgaattacttctgtgccctttttggtgtagagtctcatatgaataattactgttatttaaaaccca

SEQ ID NO: 95378 - DNA, 397 bp, Homo sapiens
catgagccaccgtgcctggtcacccccctccttttttttttgagacggagtcacgctctctcaatcaggctggagtgcagtggtactatcttagctcactgcaacttccgcctcctgggttcaagtgattctcctgcctcagccttctgagcagctgggactacaggcgtgcgccaccatgcccaggtaatttttgtaattttagtagagatggggtttcaccatgttggccaggctggcctcgaactcctgacctcaggtgatccacctgcttcagcctcccaaagtgctgggattacaggcatgagccaccgcagccggcctagtttgtctatatcttaaccaaccacatccactgtgggtcttcttttttttcttttttggaaaaactttaaaa

SEQ ID NO: 95379 - DNA, 523 bp, Homo sapiens
cctggagactaaaggtacaaacatggatttctttaaaataactagtgggatgcttttgttgtgtgttccataaaactcttgcacttccctgtgtgtttattcattgaggaaacatttacgaaggacctcctaaaggccaggcactgttctaggcatttagttttaaccaggaccctcaatttctggactacaggacctgtgaggaggagaccgtgcaaatcactgtcccttctgtgtcttctgtgctcagcagaggccatggcacaaagcagggaagtaaccaacatttgttgagtccagttactgagcatggaggacacgggcgctctggacctgcctggagcctggagtctctgccccaacttctggtgacagcagcccacttttcctggggacaactgtttctccctcgttcctcctacttctgtgggggggggcgtggaggggactgccaatcatgggacctgcccacccacctgatccaaactgggccaatggcttcctcttgctcagggatttcaat

SEQ ID NO: 95380 - DNA, 231 bp, Homo sapiens
tggttgtctcctttatttttcttgggtggtgggcttgtcgatcaattcagtgatttctttaatggtcctggtatgtcctacatctggcaaaaattcctcatgtattttgattggttaataacaccattcctgtgatattttattacataaaaatggctttggtcattttaacaggattttgggaaggaggaggattaaattcacgggcacaagtgaacatcttcaactcaa

SEQ ID NO: 95381 - DNA, 470 bp, Homo sapiens
tgtggctcaactcttcctcctgggttcaaggaattctggtgcctgagcctccaagtagctgggactacaggcacatgccaccatgcccggctaatttttgtattttttttctgtagaggtggggtttcgcccatgttccccagactggtattgatctcctgggctcaagcagtgcactcaccttgacctcccacagtgctggattacagacatgagccaccaagcccagcaaaatattgttaatatcttcattttatagttgagaaaactgaggcatagagaaaattttaaaatgagattttgttgtttgtatgaaaacccacttttgaattttttccaggaataaaaggaatttcttttcttcagtatttcaacatactgtcatggtagttatataagttttcttaatagcatattgacagcttcctgtgaatttgcttattatacaactaaagttactattagttccc

SEQ ID NO: 95382 - DNA, 836 bp, Homo sapiens
tgagacaaagtcttgccctgtcgccaggctggagtgcagtggtgcaatctcggctcactgcaacctccgcctccagggttcaagcgattctcgtgcttcagcctcccaggcagtttggattataggcatgtaccaccattcccggctaatttttttttatttttagtagagacagggtttcaccatgttggccaggctggtcttgaactcttggcctcaagtgatccactgcctcggcctcccaaagtgctgggattataggcatgagccactgcaccctgctgtcatggtggttgtgatttttatttctctgatggctaataatgttgagaaccttttcatgtggtttttggccatttgtgtatctttggagagctgtctattcagatcctttgcccattttaaaataaggatgtctttttattattgaattataagagttctttatatagtctaaatacaagtcccttgtcagatatgattggcaaatatgttctcccattctgtgtgttgccttttcactttcttgatggtgtcctttacagtacaaaagttttaaattttcataaagtctaatttgtttttaattttttaacttgtgcttttggtgtgataatctgaggaagatgtttttaaccctactattgagcaagaatatggatatcacagttaattcatagtaattggttatagctcgtgaatgattcggccttgtctcttactgcctcttgtaattgctgggcaattatgccttctctacctggctgctacctagcctttacacagagtaccctgtctacttggagttcccttcctcccatctcatatgttcaaat

SEQ ID NO: 95383 - DNA, 364 bp, Homo sapiens
catgtctctgaacactattaaaagctcctttctaggaatgacatgttgaaaatgaaaatgcctctttggaatttcttcccaaacacatcagttctagcccacatttagattcattcaatccactgctccagtttagtaattgcaatggaagcttcttactatacattttctcgtctggactccccctgtcattttttcacctgtctgttttggataaaaatccttgaaatatgtctttctctgccccagagacatcataaatctggtgtatttcttgtttcttagatggaagtttccagtaattctttggactttcataagatccaagaggccagagatatttttaaatatataagaaacaatg

SEQ ID NO: 95384 - DNA, 576 bp, Homo sapiens
ggaagccgatggctctgggttcaaatcctcaagtacaaatggtgtgataccaggcaaagcatgacacctccctgacgctgggcacagtgactcacacctgtaaatcccaacacttctggaggccaaggcaagaggatcgagaccagcctgggcaaaatagaccccatctctggaaaaacaacaacaaaactttccgcgtggtggctcatgcctataatcaataggactttgggaggccgaggtgggaggattgcttgagtccagaagttcaagaccagcctgggcaacatggcaaaaccctatctttacttaaaaaacaaaataaaacacacacacacacacacacaaaaacctagctgggcagagcagcacatgcctgtagtgctcgggtggctgagatgggagaatcacctgagctcagaagatggcagctgcaataagctgagatcccgccactgtacgcaagcctaaacaacctgagtgagaccctgtctcaaaaaaacaaaacaaaacaaataccctccctgagcttcagttcccctaatggtaaaatagagaaaataatacctaaaaaaa

SEQ ID NO: 95385 - DNA, 410 bp, Homo sapiens
ctgatctggaattcccattctctcttacaacggactccccaaatatggcagagataggtaagttccacacgtgtcgaaacttaaatgaacacccacaaatggctcgatcgaggtaggaaacagtcaaaaggaaaccttttctgaatttagttctgaatccaaaatacaaaacccaagtttacaagtaagatgagaaggggagagaaaggttttgactggtaacagcacacagcccccaaaatcggctttgtcaaaggcctctgggaaccaaacacctccctgctgaggcaggatggcctcatggccggaggggctgcagacaatggggccagcacacgcctgtgcacccggtcccagacccaaagccactggacgtcccccttggactcagcaggaagaactgaaatgtc

SEQ ID NO: 95386 - DNA, 623 bp, Homo sapiens
atataaatcctttcagactaccagggaaccacttagggtttgaaagaatttatgtactttccaactgcctgatttaatagctgggacagccttaggcatttggtgactaaaagtcatagataccattgagattccaaataaattattgaaaaacataagggtgatgttttcagataccttctcaattaattattacatgtttttgtgttgtaacattataatggttctgtgccttaaagtattaccaagtaaataaaacagcaggaagctctctttggtgcagtattgaaattcttttaaaactggacttttaattaaaagttgtaatgcttttaatttattaagtgccttctgtgcagtattcattcagtacggtacataaagtactcttacaatactttgaaaataagtggttctagtttacctcttagtgagcattgaggattagggttcagatgacttacttaggctgacatggctggtaaggattggagttaggattcaatctgggtctttggctatagccattattctttccagtatattttaggaaagatctcctgttgtgtcctgaacaaagcagatggccagtcagtaaacaagggcacgagttcacttttaac

SEQ ID NO: 95387 - DNA, 353 bp, Homo sapiens
gaagagtcttcaatagcaccagtctgcacttcctagtgactttgggtcgccaatagaaaatgacagaaatggtcatctagaggacccaggactctcccacccagccaggataattgggttccttagtaaagcccaaggctagaccactccctaacctgatatgcatccctgaggcattatcctgagcagccactagatgtccataatgcctcatagggtgttccaggagtgagctgggtatcgttttgccaccaaataggctttgcggactcttttaagggtaggtccatcagtggcaggaacagaacaggagcaaagacataaaaggaatttgggaaactaaaaagaaaaaa

SEQ ID NO: 95388 - DNA, 522 bp, Homo sapiens
aactcttttacttgctcccctttgcaagaaaaactcctccttccccaaatcctctctcaaaaccactgccttagcctttgcctcccatgaggcttcccttaccagggcccccaaaaaccttgacttactgaatccaaggacctattctcaggccttattttactgaaccaagaagcagcatctgacccagctattactctttcctcctaactctctcttctcttagctttcaggacaacacactctgttgtttttcttcttggtcactgatggtttcttctcaattctcttcactggttgctcctacttgcctcatcctaactgtggaatgccccagcagaatgccccttggtcctctttcctctttatcctcaatgccatggtgatagcacagatttaaacaccctccgtatgccaataacttccaaatgtgcttctgcagccaagacctttctccagcactccacactcacatcgactgcctatttggtatctccactaggatgtcttgcacgcacatta

SEQ ID NO: 95389 - DNA, 287 bp, Homo sapiens
ccttatgttggcatctgcatgaaatctcttcttacaacagtgcctagttttcttttggaggagtgctcttccccagccctgcggtcgcgatggcagggccagtaaggaattcacaccctctgaacttgtgctaaaacggagctgctctgcgtcgtctatgggacctttctgccatggctggtaattaaatttggaagtataagccgaggactgatgacaactatcttactcatcacatagatgaggagcctatcaagaaagaaacaaatgagagagaagcagaacag

SEQ ID NO: 95390 - DNA, 547 bp, Homo sapiens
gtaagtacctactaggtactaggtgctgagattatagtgatggacaagacacaaatccagtctattcagcttaatgtctgggtggggagacagatgagggagcaggcaattactaaagaggatggcaggccaggacacgggagagcacacaattgggcagcaggggttgggagcagggcatgtcaggtaagacgttctagaagaaggtgatgtctaaatgaagggggaagagggcgaggcaggataatgcaaaggtccttttgaacttcatctgcaaattccatggggtgagagtatagctggaaagctgagattgggttctgtgctgatagcaggaatgacaagaaagactctgaataaaaaatccacacgtggaatcgtgaatgcttaaataatccaaggttgatggtggtaactcctatgctattcaaatgtggcagaaaataaaaaaaaaaaacatggaaagcatctcagctgattttacaaagttaaaataaccctgatagagagcagtatatggatactgggggttggaaattttaaaaaa

SEQ ID NO: 95391 - DNA, 471 bp, Homo sapiens
agtgttaaagcaaattaaaactattaaagcaaattaaaagtagttctttctagagtgttaggaaatttcgaagattatactaatttatataaagaattcaaaaattccaaaagaagccagacatccatcttgtttttcatgatttttcatcccctttgaatataaaaattagcaccaggacagaagactctgaattaccttttttccccccatctgatctggtctgtgcttagattttttgttgtcactttggctctgatgtgattattcgctgtatgagtgttgttaggcagtctgtcctctagggggcgccccgttactgccaaaacattttttattagcgatcattttaacccagctgccctgaacgcacataaggcagccccatgaagagagtagctcttttacctggagctcagggtacaatgggaggaattggaatatctcagcaccctgaaagtgtgaaatgtt

SEQ ID NO: 95392 - DNA, 298 bp, Homo sapiens
ggtgaaatgttgccaggaggggaggataagtagaaaggaaataaagaaagcactctggagcctgcttacctcccactgaggcctgacatttgggacacggtgggaagttggagaagggggagccaggggaagctgttggaatctgaagaaccagcagtcactgagaattctctgttgcccaccctaccctcactctggccaagggcagtgctcaacaacattggaaggttttctctttatgcctcccactagggcaactttgtaaatctttaccattctcaggacccaccttcctgca

SEQ ID NO: 95393 - DNA, 210 bp, Homo sapiens
gtgtcaattttctctccatcttttttatttttccttcccttttaaggcatgagtgtgtctcacctccatgtggtgcctggggatgtccactgtcattcatcctggaccagaaacagagtttagatatcttccaacctcctttccttcctcagccttgactaaccggagggctgcagagaggagggtgttgaccccctggctcttggtaac

SEQ ID NO: 95394 - DNA, 942 bp, Homo sapiens
aattaacctgcactttcaaaaagtaccatgtataggaatgaaacattgaggtcccactttattctgtctttagtacatggttttacttattttggggatggatagaaatatatttttgctagttctaggcttgaatcatgggctccttggctttcctagcatcccaaagcagtcaacagtgatttcttaagcaatttgatctgtacctttacttgtgaaaggtatgctatataattcagcaagtaccaacttgtgtagctgcagaataaccaagtggctatccagtcaagtaaatacagtttgcttacatacttcaacagtttcataaaacgattcccctgagtgacacaagaacataaaatgttaatatcactaatatagcctgttaaatcttttgtggagacaggtgcaaatcagaagattgacaaggaagaacttgagcttgctaaataagacttcctaaatttaaaagctctagttttgcttagtgtgaattctggcactttaaaaagattaagcaagtgaaattctgctgccctccaccatttatttttacagtgctttgtaatttttttcatcagttccttaaatgttatttggaggaaactaagttcttgacctcagtaattttatttttgtttttccctaaatgtttccctactagtctttttggaaaacatgtttgttttaatttcatcttccctcactttatttaggtagaatttttcccccttcatttctgaaattttttgctcaccgccatgtttaaatggggttgaatcatagcgagccatttgctcttgccaaagtgagatagatgtactgaggagataattgaaaagtcagactctgtactgtggggctttaatcggagcactgctggaaatgattgcagagaatgtagtgcttcatatatccatgaccaagattgacatgttgctc

SEQ ID NO: 95395 - DNA, 516 bp, Homo sapiens
tcctcccacttaagctttaagcaaattctcatttaaataagcaaagggggggcaggtggcttatttccagaatgagcaaaacaacactgttaataagaaaaacatttaatgcctttcgtttctattctgctactcagaattcaaaaaatctattaatcttctacctcactcaaaaataaaaatctataaactacggatcataagcaactcctgtttctgtgggtttcaccacattctccagaaactgaacttttgctcataaaaattacatagaatgtaaactaattcattttttaaagtaaatgcaaaactaagggttacacaagcactgagcatcaacactgacagaatattaattctgaagcccattaactttgacaaacgtttattcatctttgccttcttgaagcgtgtgactatcccagttttacaggaaaagcttaaacagaaaaagttaaataataatctcaaggttagaaactaagacataatttctagctcctagtatccctggta

SEQ ID NO: 95396 - DNA, 397 bp, Homo sapiens
aggaaaactgttcttgtgaaggaacaagaagcatagtgagtgcctgtagggagaaaaacccctgagagcagttagagacaaagagcaaccccagcccttgaaattcttctctttatcttagccaaaggagacactaaatcagagtgtctgttcagcagcaccatgctgtaagaggcacactccatgggtcctctgggcacaaacctctagccagtgttcttctcacacagttggactgttccctctggggcctcctccgccagcctatgatgggcaacactctgaatgtttgtgagaactgaggcaaacctggatggacttacagcaccactagtgctgaaaaggaggtagcaatccagcattaatggaactcagcaggcaaactgcaaagaacctc

SEQ ID NO: 95397 - DNA, 721 bp, Homo sapiens
taagtaatgagagtaatgagttataacttattcaataaaatgaaaatgtatgagtccatcctgatataaataactgaataaatgggagaaaaggaaaaggttttctttgtggtaaaatgccaattaatatcttaccaatagaaggaatgttggagttagaaagtcatgaatgaatgctaaaactagtgggtgaaaatatgatggggaagaagatatttggataatccaaaaagaacctctgataaattattgattacttataaatgaaaaaatggtacctttaaaagctagaaacctggtgaataccaaaccattttaaccaagtgatcaaagataacatcacctgggataaactgattgtcatttgtgtcctaataagactcactgagaaaaatcatactatcattcagtggtatacctgccttttggcagaatcttaatctaattctgaggaaacatcagacaaatcaaaattgatgacccttaacaaaagaactcgcccatgttcttcaaaaatatcaagcttaagaagcatagtctgaagaactgttacagacaaaagcaaactagagagattgatagttgtacaatgcatgcttctttattggctcaaataaaggagctagaaggacattactgaaatataggtgaaatttgaatgtggaccaaggattagataatagtgtttgattcatgttaaatttcctgatttttgttttgt

SEQ ID NO: 95398 - DNA, 414 bp, Homo sapiens
gaggtaaacggatctgacgtacagtcctgctcagcctcttggctgggtgaccttgggtacactgtcccaccaggatctgtttgttcatctataaaatgaaaaggttggactcaggtttcttctgcctcagatgttccataagactaggaggctgcgctgcctaaagttcgtgcacctagagtgctgcctctggtttcaccaacatggaaatattaacaggccagagcccaagtcaagaactcaagaggacacgcctcttcctcctgccagagtaccttggacaaaagtattcactgctaagcacgtagaactgaattcttcagtctaagacggaggtcccatttctctctttttttttttttttttttagacagagtctcactgtttggctcaggcgggagtgcagtggcgtga

SEQ ID NO: 95399 - DNA, 779 bp, Homo sapiens
ccttaagtaggttactgaattctctgagcctctgtttccttatgggtaggaactatctcacaaggctgtgataacaactcaggtcatggcaggtaaagggccagtcccatgacaatggcggagtgatgctcatcgaatggtagctattactgtttacataggttaagataaatcggtcaccactgcctcttataaattgaaaagaaatccctctcatacttataagctattgtattcagggttatcagtgagatgtgggttgagttatctgatcaggtagataagggactgccccttggaagcttttaagcatacctgtggaggagagcagccacgcaagaattctgaaaatccattcgtggcatcaagtgagagagcacgccgccattccagactctaggacattcttggagggatgacgatcattttgacagtgcacgggggacctgcctggcatgttgataaaatcgtccaggagattttgcaagagctaaaacgctgaagctgctccctgagacctggccttcgtctcatatatgcagttctcttcagatggaagagagcaggtgccatgggtcctggactgggtgaagcaggtcatttggttctggtgttcaggccacactaagaaccaagtattcccagtgtacctagtgaaaacaggctataagtagcctaaaaacgattttttaaaagatttttaaaaattgtttttagttgttgttttgcccttgctaggaataaaacaggaccgagaagccctagagctcgtaggaacc

SEQ ID NO: 95400 - DNA, 387 bp, Homo sapiens
cattagcacctccccctacaatgaggcacctagctagacaacttggctgtccgggcttaacctgcgtggcagggaaggacgcctgcccagccttagcctctacgcaatggtggaggcagggagggagagaaccacacagctcccctcatttcccagcagcccccatggagcctagtcaacagggtgtggtcacaggctaaatgagcaaagatgtgagctaatatactggtaggtgtcatgggggctttcagagctgggtaaggagggaaagagatggagatactggttccccactccttaacctgccacctgccttccctgtcctttaccctccctcattctgctggacctgaggaaaatgcaagggaggctaggcctagtggctca

SEQ ID NO: 95401 - DNA, 515 bp, Homo sapiens
tacaggactaacacggatcgagtctgaggatatggcttcagtgcatccatgtgctgcaaagaatgtgatctcattctttttatggctgcatagtattccatgggtgatcagtctggctgggtggtcccagtaaaaggatatgaacttgcagtcacccagcatcagcagcttgctgaaattgatataaaactccaagaactctctgcagcctcccctacaatttccagtttttctccaagacttgaaaatcggaataatcaggtccttctcatgaggaggaagacaccttttcctcagtgtttcatactcaaatccctccagaagaatatgaaatgcagatgcagaaactcaataaagattttacctgtgatgtggaaagaaatgagtcattgatcaaatcaggaaagaaacctttctcgaatacagaaaagattgagctcaggggtaaacacaaccaggattttattaagagaaacattgaggtatgtacttagaaattcagaagccagaatttg

SEQ ID NO: 95402 - DNA, 441 bp, Homo sapiens
cctcttcattcatacaatttaacacacattgaagtatcaaatttaaaaatgtttatgatccacagttttctcatataaaaaagttttataatttgaaataattatgttgtaaatgtcaaggatgaatattcccgaagtagcacatttgagagaaaggagggaaacaataacctcaaaaaatataatctcacagtagaaatttacaacttgcccttatacaaaactacttcagacattcagaacaggaggtgttcctatggaggggaagtagttttcagaattaaaaattagcaccagtagacagaaaatgtatgagtaaaaaatttgcataagcaaatacatagctgctttgaaatagagaaatccaagcatttggaatatactgcctccaaaaaaaatctaatcaataatgaaacaaataaattacaaattatattattc

SEQ ID NO: 95403 - DNA, 184 bp, Homo sapiens
acattttcattctactaagtaaactcaatgaccctggaattgactaggaagttattcattcatccagaaaataatagaacacttttgaaatgtgtgctcacgccttttgcatgttatggttataattaagctatttgggattcatttcctgggtttttgacagtacttgacagtagccgagaag

SEQ ID NO: 95404 - DNA, 193 bp, Homo sapiens
attgattgtgttggagttcaatacagtttttctctcagggtcataaagccattcacagaatcaggggtgttcaagggcgagaattcagtcatgggttcttagtttgtgtttctggttgggccagtaaagccccttcctcatctctcttttccacttatcactacagatgcagacttaaaaccatggcttcagg

SEQ ID NO: 95405 - DNA, 435 bp, Homo sapiens
ggcttgggagcaatcctgggctgtgggcattccttggcctagtggccagatttctggcacttgaaacaagatcctgatggaggaagtcttgtaagaatgcttgactgctgtggcttaggtgtgtgcggcttaggcattttgaagttcttgtgtgctggaggtgtggctgggttttgtctcacggcagaggcaagtaattgtaactcagaaatgcgttgccgtctggctgcctcctctctattattgtacaccttgaaggcaaggttgattaattcctgttgtggggtttgagggccagattctaatttttgaagttttttcctaatgtcaggagcggattgggtgataaaatgcatattaagaataaggcggccttctggcccttctgggtctagggcggtaaagtgtgtaagggttgctacaaagcaggccatg

SEQ ID NO: 95406 - DNA, 328 bp, Homo sapiens
cctaaaacttaaaacttaaagtataaaaaaaaaagtaggagaaaggataattttaggcagagggaagtgtgtacagaggggcagaagctttaaggtttatagttctgagaacctcaggtagtttgtttatatcacctgctggaagaggatgatgtgctggaaaggtaacttgtgtctagcttgggaaggttttgtgtggatttgggagtatcctaggcattaaagagactgttaagaagggaaggaaaaacagatctcttgcaaatatgacagaggagactctccaatttctagcttgggtaatatgggggaagggctttctaggcaa

SEQ ID NO: 95407 - DNA, 627 bp, Homo sapiens
ttttttggatttttagtagagatggagtttcgccatgttggccagggtagtcttgaactcctgacctctggtgatccacccacctcagcctcccaaagtgctgggattataggcgtgaccactgcacccagccatatttgccctttaaaagggaaaacctaaggaaactgatgttaaccctttgccatcgccaatctcattgatgtcggccagtcaatcctgtcaaatcttgctctttttttaatgatgcttgaaaattggagcctcacaactgtttactaggtgggtctaggatggtaatttctggaaatgactgtagactatgccaaatgtctttttagcctgttatctgaccatgcccagatggcttaacttttctctagcagtgtcactttttccttacttctctgtatctgtggagtagcgtagaaccgtatgtacaaaggtttctgctgacatatcaatgtctacacagctatgtgggtatccatgttggtgcctgaagagtctggcccgcgcccagtatttggcagctgtaaaatgttagatgaacttccaccctcagtaaaatcagccaccccttcaaaagagtcacaggcatccatccagtaatatctttccaggaaa

SEQ ID NO: 95408 - DNA, 872 bp, Homo sapiens
gtggctgggagacctgtttaattctgggatatagaattaagatggccatctgcctgcaagtagagataagctgcattctccgaaatcaactttgttcatgataaaagtaacattctggcctccatatgccatattctttattgttaatttcttaaacagttaacaaattggttagagaagaggcaggctatctattgccccatcctctacttttttttttttttaaaactaaatacctaatcgttatattgttattcttttgactattattgctctccttaacacatataaaaatagaccaaactgacatgatcatattttataaaaatacgattttcttttcttgaaaaggaaacagaaaaaaggataaatggcttaaattgtctacttatcataactagaattagaaatcccagtctttgtggctgccaaaaaaaaaaaaaaagaataaatgaccaaaaaatgaagtcaaatgcaagtctttcatgactctctccctgtgactgttagtatgaggaaacttaatagttctgaaaataaagatgtaaatttctgcagaatgtaaaacaggataaagtaacaatagccaaaatgtggaaacaacccaaatgttcatccatagatgaatggataaacaaaatgaggtatatatgtacaatggactatgatttagcctaaaaagaagtgcaattcttatatatgctacaacatagatgaaccttgagaacattatactaagtgaaataagccagtcacagaagcacaaatatatgattctatgtatgtgaagaacctagaataggtaaattcatggagacagaaagtagtttccaggggctggtggtaggggagaatagagagttagtgtttaa

SEQ ID NO: 95409 - DNA, 417 bp, Homo sapiens
tccggtacctgcagcctctctctgctgtatctagactgagcccatcctgctccctgcaggctcagtctgtgttgggcctgggaggaaggagacccctgaccacaggccctgtctccagctgggtgctggggctgtcagctccgccctctcttctctcagaagcccagcctgactctgtggctgccctagccacacaggccccaccctccaggagtttaaaatttagttagggacgaattcagattactgagccaagatccccaatggtaaaaagatagcaaacggtaggcacaaaatgaatggcagggcctagggcagaggaaagcttctaattctctagaaggttctctaacccttggtgggtggtcccaggacagtcttttgtctgggccctcctggtagatgctctgcgccccc

SEQ ID NO: 95410 - DNA, 274 bp, Homo sapiens
gagtcaccagcagttgctgggagcggtaggattatggtccctacctggggttcagaacaagaactttgctgtgaactcccctggttgaagcagagggccaggaagcagagggacctgaattccccaccaggcggtccctacagagtcatggaccttcctttctccccgcttcctcctgccctgttgtctctgctgagcaaggcacggggcgggggggcttccgctgggtggacttgagttggcctagatttgaatctgctcttactgccgtgga

SEQ ID NO: 95411 - DNA, 392 bp, Homo sapiens
aatgtggggccggtgccattctaattggttctgtttccctctagtggttgatcgcggagatttcggcttctccatcaggacaagttcagatagcctgagatggtatcagaactcagggacagagctgggtgtggcggccctgcatccatctgctttctctccatgctaactgatatggtcagagagctggaagcaaattccaggaccccagggctccgcaaaggcaaacacattacttcatcggctgctgacatgcaacttcccccaggggttaaaacaatgtttaatactaacagtaataatatttttgagttttactttatgctggcgctgttctaatgttgtaagtgtattaactcatttaagccttacaacaacctaaggacatggga

SEQ ID NO: 95412 - DNA, 646 bp, Homo sapiens
ccagcccctgcctctctcctgagctccagacttcagtatctaccaagatttgctccctcactctcagcgcgtctaaagagctctcgtttcccctgggggctgattcttctgtgggctcgttgtcttcagcactctgctccacgcttggctcagttgcccacccttgcaccctgttccgcagtcccagccatgtcattccctctgccaccacctctccatcctcaccatagcgtccccagctcggaccctttctctctccttgcctctgaccgccgtacctgtttcctgactagtcttcctgctgtgatcgtctctctaccatccctgatgctggagttgacattctaaaatgccagtgggtcacgtggttgttgcacgtcctccaggtgtacccactgattataccatctggaccctgcccctgctgtcttccagtggggagtgggggagaccctgtgcaacctccttggccactgggctgtcttggatggagtcatgggatctggcctcacctggcctaggcagttttttattttggtgtggttgggccaccacaccactggcaagggaaaagggatggatgtgtgagacctgggaagtgaaggttcagctcaatcagcagtggaatgtgaggtggggtgtgaag

SEQ ID NO: 95413 - DNA, 841 bp, Homo sapiens
cattcacactatatttatttcatatatgggttatatataaatggcacttattcagccagaaaatggccctaaatccatgtttcttctgcagaggaaagtccatttcatctattatttctttgcatgattatttgtgttagaggaaagatacataaagttaaaaaaaaaaaagaaatcaagggcatttctcatatcacattaccctgcactgttgaaagctacaatttttaagtcataaaatgtaagtcatttcaagaaattttgttgggaaaatttcatatttccaatgaatttaaatatatgaatttggtagagagaaatggaacaagagattctgttattttatcaggttgagtttcagccaaatctggttgatagatcctttagaaattatccattatcatcaaagtatccatttgatagtttacctttccaaaaaatccactgctggtttcttcctttcaaaggaacactaagctttttgacatgaaacattctttatatagaaaacatcattagtgaattcctggtgaggagccatatgccccatatgtggaattttccattttattccccatttactggtaggaagttcaggtctaatattccgaggtacaacaatccatttcattagaagagtaatggacaagtagttcaggagtctatggtggtaattaacattgcatttctgtttagaaacttatttatgccttggtttccccatatgaaaaataggcagataatgaagattaacaaaataattagttgatcactaacacatgccactgagtatatttttcttttgaaagtaaatgacaccagccatcccacctctgaacac

SEQ ID NO: 95414 - DNA, 772 bp, Homo sapiens
tgccctccatattcatagaagtagtagtttgtgtcaagatttcatttaatactttttttctcttttgagacagggtctcattctgtcgctaaagctggagtgcagtggtgcaatcatgacccactgcagcctcgacctcctgggctcaagcagtactcctgtcctggccacccaaaatgctgggattacagggatgagccactacacctggccttcatttactattcttaagcattaaacaaaatcttgttcggtctaattggagagctttactgcagaaaagtggcaaatttggtatcacccacttatatttggtggcaatattttcatattgtagcgttatataaattggatgaaaaagtttgttctaaggacatattgtataattaaattttaaaaagagaaagttactgagcccctatctctaaaaattaaaaatagctgggcgtggtgctgcacacctgtagtcccagctacgcaggaggctgaggcaggagaatgactcaagtctaggagtgagctgtgatggcaccactgcactccagcatgggtgacaggaagagttcatctcttaaaaagaagaaagaaaaatttcattaggttttggtgtgttttagaactatttgacaacagtgatttttgtttcaaattgagtgaggttgggcctgatggtcaacagtttgcgacttagagccattttttgcagttgcaaaagcgtttcataaaatctgctcttatgcgtcacatacttggtcattcatttgactctgag

SEQ ID NO: 95415 - DNA, 434 bp, Homo sapiens
aggtaagccacagaagaggaaatctaactagtcaataacatatgaaatgataaatactttcaatagtaatcagggaagtgaaaattacaataatataccaatttacccttgccatattaccaaaattcaaaatctataattctgtgtgtgtgtgtacacgagtctaaatcacacactatctgtaacattaattttgccacataaggtcatagagctttgcattttaacattgatgattcctattcaaaagctgaattccatacatttcacgaagctgtatctgcccacctggctgcaatccatgcttttaggggattaatttgacatgatgttaaaaccagctctttttatttcaaagactggtaataaaatactatcaagtattttcccagtccgcaggcctttacgggactcaaaaggaataggtcaaaacc

SEQ ID NO: 95416 - DNA, 863 bp, Homo sapiens
  misc_feature (650)..(650): n is a, c, g, or t
  misc_feature (656)..(656): n is a, c, g, or t
  misc_feature (726)..(726): n is a, c, g, or t
  misc_feature (728)..(728): n is a, c, g, or t
ggcggggcgtctccgagcggcggggccaagggagggcacaacagctgctacctgaacagtttctgacccaacagttacccagcgccggactcgctgcgccccggcggctctagggacccccggcgccaacacttagctccgcgcccgagagaatgttggaccgacgacacaagacctcagacttgtgttattctagcagctgaacacaccccaggctcttctgaccggcagtggctctggaagcagtctggtgtatagagttatggattcactaccagattctactgtatgctcttgacaactatgaccacaatggtccacccacaaatgaattatcaggagtgaacccagaggcacgtatgaatgaaagtcctgatccgactgacctggcgggagtcatcattgagctcggccccaatgacagtccacagacaagtgaatttaaaggagcaaccgaggaggcacctgcgaaagaaagcccacacacaagtgaatttaaaggagcagcccgggtgtcacctatcagtgaaagtgtgttagcacgactttccaagtttgaagttgaagatgctgaaaatgttgcttcatatgacagcaagattaagaaaattgtgcattcaattgtatcatcctttgcatttggactattnggagtnttcctggtcttactggatgtcactctcatccttgccgactaattttcactgacagcaaactttatatccntnaggggagtactcgtgctaatatcgtgtagcatactgccatgtatgtaaatctcaatggatcgtcctacattcgagtagtagtaggaacaggagaaagaagaatataactgaagtagaacacaatgagataatgaa

SEQ ID NO: 95417 - DNA, 805 bp, Homo sapiens
  misc_feature (592)..(592): n is a, c, g, or t
  misc_feature (598)..(598): n is a, c, g, or t
  misc_feature (668)..(668): n is a, c, g, or t
  misc_feature (670)..(670): n is a, c, g, or t
ggcggggcgtctccgagcggcggggccaagggagggcacaacagctgctacctgaacagtttctgacccaacagttacccagcgccggactcgctgcgccccggcggctctagggacccccggcgccaacacttagctccgcgcccgagagaatgttggaccgacgacacaagacctcagacttgtgttattctagcagctgaacacaccccaggctcttctgaccggcagtggctctggaagcagtctggtgtatagtccacccacaaatgaattatcaggagtgaacccagaggcacgtatgaatgaaagtcctgatccgactgacctggcgggagtcatcattgagctcggccccaatgacagtccacagacaagtgaatttaaaggagcaaccgaggaggcacctgcgaaagaaagcccacacacaagtgaatttaaaggagcagcccgggtgtcacctatcagtgaaagtgtgttagcacgactttccaagtttgaagttgaagatgctgaaaatgttgcttcatatgacagcaagattaagaaaattgtgcattcaattgtatcatcctttgcatttggactattnggagtnttcctggtcttactggatgtcactctcatccttgccgactaattttcactgacagcaaactttatatccntnaggggagtactcgtgctaatatcgtgtagcatactgccatgtatgtaaatctcaatggatcgtcctacattcgagtagtagtaggaacaggagaaagaagaatataactgaagtagaacacaatgagataatgaa

SEQ ID NO: 95418 - DNA, 789 bp, Homo sapiens
  misc_feature (576)..(576): n is a, c, g, or t
  misc_feature (582)..(582): n is a, c, g, or t
  misc_feature (652)..(652): n is a, c, g, or t
  misc_feature (654)..(654): n is a, c, g, or t
acggaagcagggcggcgttcgacggggcaaggaggcacacagtgctactgacagttctgaccacagttcccagcgcggatcgctgcgcccggcggtctaggaacccggcgcacacttagcttccggccgagaatgttggaccgacgacacaagacctcagacttgtgttattctagcagctgaacacaccccaggctcttctgaccggcagtggctctggaagcagtctggtgtatagagttatggattcactaccagattctactgtatgctcttgacaactatgaccacaatggtccacccacaaatgaattatcaggagtgaacccagaggcacgtatgaatgaaagtcctgatccgactgacctggcgggagtcatcattgagctcggccccaatgacagtccacagacaagtgaatttaaaggagcaaccgaggaggcacctgcgaaagaaagtgtgttagcacgactttccaagtttgaagttgaagatgctgaaaatgttgcttcatatgacagcaagattaagaaaattgtgcattcaattgtatcatcctttgcatttggactattnggagtnttcctggtcttactggatgtcactctcatccttgccgactaattttcactgacagcaaactttatatccntnaggggagtactcgtgctaatatcgtgtagcatactgccatgtatgtaaatctcaatggatcgtcctacattcgagtagtagtaggaacaggagaaagaagaatataactgaagtagaacacaatgagataatgaa

SEQ ID NO: 95419 - DNA, 452 bp, Homo sapiens
tatttgataggcatgctttcaatctcgtaactccctatgaggttatgttttacagatgaaaaagggaaaaggaagatactcatcagtggctagcttccttccatcaccgaaccctcaagtccctgttccctttttgtctttgtagaagctggtggcagggatatactttctgagctctggtttaaaactctgagttttgggccacagatcccctctagctgactcttcttttttgacatgaatgagataaaaagttgttcctgggagatagtttcagcatggctacagtagtcagagaaacgtgcatcttttccagtgaaggaacaaagctgatttctttgcactggggcatagtgggggtgtgggaagggggggctgagtgatgggaataggggtcactactgagtcatatggcaggaaaaagatgaaaagattagttacccaaaaaaaaa

SEQ ID NO: 95420 - DNA, 483 bp, Homo sapiens
ccacatggggctagtggccaccttattagacagcataggactctagacaagtcccctgcacattgtgcattctggcaatgttaggtttgcattgtgttcttctgaaaaagtctgcaccttcccccatgccagtgagtgtgttttctcaataactttttttttttttttgacccttatctctcatgctcttgacacaaacttccacattttttcataagggtcacacacgatgccaagaaatgagaaaggagtcaatgccggatcaagtcagacaaccttgtccttatccttgcctccttttctcctgagagcccctagtcaatctaataccaagtgtttcccactcccagagagaaaagaagggaatggctttggatctctggctaaagatcacagactgcggagtcgtcactgttcccactgaacatctgattaagttgctgagtctgacccttgagtttcccagaacttgccaagattcag

SEQ ID NO: 95421 - DNA, 154 bp, Homo sapiens
taatgaaaaagcatcaaagctaagccagaggatttatcacattttcatcatcagctacaggattagaaaggaggctgggatgaatgtgacatagaccacagcagctctcttaagactcctggtattaccaacataaagaggcaggtggaatgag

SEQ ID NO: 95422 - DNA, 830 bp, Homo sapiens
agcgggtcagcagcactgggtcagccggtgaacgggtgtgcagcgtcctcagcgccgcagcagtcagcacctgtgggtgctctagctctttccctcggggtcaccggaggcagagcctcccctacgcggagtagaggagcagctcacatggcagccgccacagaggacaccagatcatgccaacacccccacaactcctgcccgcctgcaggcagctctgggctcaggacaccgcctgcaagaacctttatagcgcagctctccaaaccttggaggcgaggacattctatgtgcccgccctggaaaggcctgaacctataacatctgggctgtgatggtttctgaggtggacaccaggaccaacacttgtcagcatggcacaatcaggcatttctcttctaagtaggatgtgcagccaaaaactcagctgtctgtgagctgtcttctcccaggaacgaggacataagatgtacatcaggttttgatattagagtaatactggccttatagaatgagttacgaaaagttgcccctttctccactttctgaaagagttgtgtaacacaggtctgaactgcacagatccacttacatgtggattttcttccactgcggcctctcctgagacagcaagaccaacccctccttttcatcctcctcctcctcctcagcctactcaacatgaaaatgacaaggatgaaacctttatgatgatccactcatccattttcttttctctagcttattgtgaacatcttaggctagtgtgtcgacttctgacttggctcatctgaacccaagtccttggacacattcacaaacaccccagg

SEQ ID NO: 95423 - DNA, 498 bp, Homo sapiens
cacacccggctaatttttgtatttttagtagagacagggtttcaccatgttggccagactggtctcgaacttctgatcttgtgatctgcctgcctcggcttaccaaagtgctgggattacaggcgtgagccaccgcgtctggcacctccacactctttaatacttggtattgtcttttttttaccccttttccattctggtggatgtaaaatggtatttgattttgttaactcaaactatttagaatatattttatttataaattcatggaatttaaaaaaggaatcaatttatttgtttgaaattttattgcaataaggtccaaaaccatgattggtatcatgactgttctctgaaaatgttgagatctcttttgtggtatagtatatgaccaaattttataatgaatggttatttgataagtatttgtatctttattagatatggagttcttctgtttcctataaattaaagattttaataaaaattcaagcatat

SEQ ID NO: 95424 - DNA, 351 bp, Homo sapiens
tgaagtcattacctctgcaactaggacacaggtgcctccgagtctggtctcccataatttgtctgagagaatatgggtttgtgcccacaaaatagagtgcaaggaattgcaaaggatgggatttaattccactatttggagtgttttgagaagcccctaaacagcctgcagtagaatgattaattttccacccactctttctgctggggttccatgagatagacatgaaatctaggcagctacccctgcacctgtgtcctggggctttgagtcagctcatgtgcctaaatccatatctctttcaagatcccttagatttccatatggagaaattttatcatgttaaaacta

SEQ ID NO: 95425 - DNA, 338 bp, Homo sapiens
atttatgaaggaacgaactagaccataagtttttgtaggccatagtggctagcccttctcattcataatctttaggttgcttctgttctgcagtagcccttcttcatataatggtcattattttacaataggccttttatgcaatagttggtaaatatatgttaatttccaatacctttgaatattttgtatcatgtaattttacatggtacctcttcctgtccctattaggaacctaaataaatgcatgattccctattaacagttatctagtgaagaatttttatattcttccctaattgagtatttgatcattatcttaaatgtgtatgcacata

SEQ ID NO: 95426 - DNA, 379 bp, Homo sapiens
tcttgcacaggggggttatccaggtggcagatctaccaggttctctgttcatccttctctagggctattgctctactcatagcatcttctgcaggatatatgggaaagaagtgatacacctacacctctccttttctctccttacaggagcttaagataaaagttacctaaagaggccaagcatggtggctcacacctataatctcagcactttgggaggccaaagagggtggattgcttgagatcaggagttcaagaccagcctgggcaacatggagaaaccccttctctacaaaaaatacaaaaattagctgggcctggcagacacctgtggtcccagctattcaggaggctgaggtgggaggactgcttgagccca

SEQ ID NO: 95427 - DNA, 699 bp, Homo sapiens
attttatgctaccttctactgttgtaatccttgcagactttttttggtaagctgacaaaaacattagaaaactttgaatgcagagctatattttacaaatgagggaccagagtccaaaaaatcaagagatttgagattcagcattcatgctagtgtaatgataaaactgaaatataggcctaatgatatctcttgagttggtctgttattctgtatcatgactatttttaatgcctattgaagtataaaattaaagaatgaatatatgtttaaagcaaattaatgaattctctgtgatgctctacaaaggacaggttgttttttcttaagaactggtaaaatccttaaagtttacctaatccaactcctttaactgctgaagaatgagtttgagatataaactatttagtattatatgattaaccaagagtaggtctagcagtcacacctccatctagtcagaattgaatttgcaaatggttaagatatgttctgggattggagaagggaaggataggtgaggatactgtttgaaatggagggtgacagcttgggaggctcttgtagtaacctcattgtgatagcttgaactaagttgaactaagtaaatatgaaatggaaggggtggtgggaaaaattacaagttcgcttccaaaacactgaatgagagaaagctatagtatcacaaattgaccccca

SEQ ID NO: 95428 - DNA, 431 bp, Homo sapiens
gtaaaatcttagggcaaagatagctccttcaaaatgattagactctcctgttgtacatggtatgacttgatactgaatacatggaaatacctagaaatgttatttgctaaatcttacgggaagcagctgttagccactgcaccaagcagattcccacaggaccactgactctgtacctctgtgccccttctgtgcttcactgaacacaagtccatagtttgcatgatagagcctcacaaagctccactcaatgtcattaagctatacagcaaagctacactgccagagagaggaacagagacagagagtgaatacactaaaaacagagggccctgaaagagtaagacctatagaaccaatttcttcttgggtactacatccagaaaatctggacttctggtgtgtaacttaactagcattacaacagtgct

SEQ ID NO: 95429 - DNA, 1701 bp, Homo sapiens
ctggttactaggctgtcctcccagtcttcctttccactcccagagggggctgatcgcacaagtacaaagtatgttgctgcattcctaaccccaccagctctgagcccttcaggaataaatcacatggcaagctggagggagctgcagggacagaggccaaagctgtctttccttgtgtaagggaggaactcttgctggccggggaatctcttggaattggtcttttttggggtttcagaggcaaagcttgaacaccatcagtcaagagtggttccgcgtctccagccggaagtcgtctagccctgccgtggtggcctcctacctccacgaggtccagcctcactccccacacttcctgaagctgcttgtcaacttggccgatcgcaacgggaacacggcccttcactacagcgtgtcccactccaacttctccatcgcgaagctgctgctggagacaggctggccgcacagctttgtccatcgctctgaagtcacccacccatatggaaattgctgggcttctgagagcccacgcggagcagggcaggtccctggggctgtaggggctgcagaagaactggccgtggggaacaaaagccttcttctctggactcctccctcgcccttgaagagggcagaggtcacaggccagagagccacccttctagagaagaaactatgtcaaatatgcacatacattcctgttgtataattctgctcattaggatgctttgtagtttttgccttaggccaagcctgaaaactacacgggcttcagagcagggttcaaggtgcaaggtgaggggtacgtcggtgtcatccaaacatccaaaacatcttcagccttgaattcctcatgactctaccctctgtaacattgtgtagcaagcaggcaggcaggagcacattagcacattagaaaagcaatactttttacatggaattttacagtgcactatctttctgttttttaagcaagtgtatacaaatatgtcccattgatatgcatgtctatagatgggaggggatttaagccaaccccctggcaagcattctgtaggggaccctagaagaatcaccgtgcagactggtgaaactgaacaagcaccatttgggagctttgtttcgatggggttgacagagaaatcttaaaatctgacagggtagaagaagcactttggcatcaatgccatatgtacagtcttgactatttctgagtcatctagtggctccaatttgctccagggaaattggaattaattaagaaatttattatctagtaagttgctatgtaataaagaaaaaaaagaaattcaatccaatgacacacaccacatgtatttgggcagagtcagattctctcagctattttgagtctgtggaagaaacaaaaaaaagcttcctcctgaggatgggttattgtcatcaagaagccacctgcatagccgtatccattacctcatggtaattcccggtgctttcccctcatatcccctagaagcaaatatctgttctgaggttttttgggacttctggctgcaataggagcaagggacccaggcagggcagagcaataccttccgaagcttccatattccctggggccagcacatgcaaggtttatatggtcagtagctcacgtgaagtcatctgaatctttcttaaatctgctctcttaaaatctcttatgcaaaaaaaaaa

SEQ ID NO: 95430 - DNA, 975 bp, Homo sapiens
  misc_feature (838)..(838): n is a, c, g, or t
ctggttactaggctgtcctcccagtcttcctttccactcccagagggggctgatcgcacaagtacaaagtatgttgctgcattcctaaccccaccagctctgagcccttcaggaataaatcacatggcaagctggagggagctgcagggacagaggccaaagctgtctttccttgtgtaagggaggaactcttgctggccggggaatctcttggaattggtcttttttggggtttcagaggcaaagcttgaacaccatcagtcaagagtggttccgcgtctccagccggaagtcgtctagccctgccgtggtggcctcctacctccacgaggtccagcctcactccccacacttcctgaagctgcttgtcaacttggccgatcgcaacgggaacacggcccttcactacagcgtgtcccactccaacttctccatcgcgaagctgctgctggagacaggcgtctgcaatgtggaccatcagaacaaagctggctacactgccgtaatgatcactcccttggcttccgcagagaccaatgaagacatggctgttgtctggaagctcttaagagaaggaaatgtgaacattcaagctactcagggaggccagactgcgctgatgctgggagtcagccacgacagggaggacatggttcaagcgctgcttagctgccaggcagatgtcaatctgcaggaccacgatggatcctcggcctcatgctggcctgtcaccatggcaacgtggacctggtgcggctgctcctggcacacccagcctgcgacagcagcctgactgacaagggcgacagtttgtcatcgtctgaagtacaccatatgnaattgtgggtttgagagccagggagcagaagccctggggttagggtgggaagaatgggggcggcaaaccctcttgagccctgcctgaaagggggtcagcaaagactttaaaaaatgattggacatcgcggaaatgga

SEQ ID NO: 95431 - DNA, 2045 bp, Homo sapiens
ctggttactaggctgtcctcccagtcttcctttccactcccagagggggctgatcgcacaagtacaaagtatgttgctgcattcctaaccccaccagctctgagcccttcaggaataaatcacatggcaagctggagggagctgcagggacagaggccaaagctgtctttccttgtgtaagggaggaactcttgctggccggggaatctcttggaattggtcttttttggggtttcagaggcaaagcttgaacaccatcagtcaagagtggttccgcgtctccagccggaagtcgtctagccctgccgtggtggcctcctacctccacgaggtccagcctcactccccacacttcctgaagctgcttgtcaacttggccgatcgcaacgggaacacggcccttcactacagcgtgtcccactccaacttctccatcgcgaagctgctgctggagacaggcgtctgcaatgtggaccatcagaacaaagctggctacactgccgtaatgatcactcccttggcttccgcagagaccaatgaagacatggctgttgtctggaagctcttaagagaaggaaatgtgaacattcaagctactcagggaggccagactgcgctgatgctgggagtcagccacgacagggaggacatggttcaagcgctgcttagctgccaggcagatgtcaatctgcaggaccacgatggatcctcggcctcatgctggcctgtcaccatggcaacgtggacctggtgcggctgctcctggcacacccagcctgcgacagcagcctgactgacaagggctggccgcacagctttgtccatcgctctgaagtcacccacccatatggaaattgctgggcttctgagagcccacgcggagcagggcaggtccctggggctgtaggggctgcagaagaactggccgtggggaacaaaagccttcttctctggactcctccctcgcccttgaagagggcagaggtcacaggccagagagccacccttctagagaagaaactatgtcaaatatgcacatacattcctgttgtataattctgctcattaggatgctttgtagtttttgccttaggccaagcctgaaaactacacgggcttcagagcagggttcaaggtgcaaggtgaggggtacgtcggtgtcatccaaacatccaaaacatcttcagccttgaattcctcatgactctaccctctgtaacattgtgtagcaagcaggcaggcaggagcacattagcacattagaaaagcaatactttttacatggaattttacagtgcactatctttctgttttttaagcaagtgtatacaaatatgtcccattgatatgcatgtctatagatgggaggggatttaagccaaccccctggcaagcattctgtaggggaccctagaagaatcaccgtgcagactggtgaaactgaacaagcaccatttgggagctttgtttcgatggggttgacagagaaatcttaaaatctgacagggtagaagaagcactttggcatcaatgccatatgtacagtcttgactatttctgagtcatctagtggctccaatttgctccagggaaattggaattaattaagaaatttattatctagtaagttgctatgtaataaagaaaaaaaagaaattcaatccaatgacacacaccacatgtatttgggcagagtcagattctctcagctattttgagtctgtggaagaaacaaaaaaaagcttcctcctgaggatgggttattgtcatcaagaagccacctgcatagccgtatccattacctcatggtaattcccggtgctttcccctcatatcccctagaagcaaatatctgttctgaggttttttgggacttctggctgcaataggagcaagggacccaggcagggcagagcaataccttccgaagcttccatattccctggggccagcacatgcaaggtttatatggtcagtagctcacgtgaagtcatctgaatctttcttaaatctgctctcttaaaatctcttatgcaaaaaaaaaa

SEQ ID NO: 95432 - DNA, 2703 bp, Homo sapiens
cccagctgtcactgccacagggacccgagcaggtccttacctcctctgtacatagcttcctctccactgaactcaggattgaagaagcaggcactgaacaggaaggaggccctcagggaggaaccaggggagcaggaggctttctgtggggcagcgacagaaagactcccccagcagggagggaggagaccagttccaatctcccagggaaggagcacccgggaaggccaccaagctcgccaacggatgccactattgggcagtatgtgaagaagatccaggagctcctgcaggagcagtggaactgcctggagcatgggtacccggagctggccagcgccatcaagcagccagcctccaagctcagcagcatccagagccagctgctgagctccctcaacctgctgctgtcggcctactcggcccaggctcacccacccaaggagccaccggcctcctcctcctccccgccagtggagatctccccatcgaccagccttaaatccataatgaaaaagaaagactatggcttccgtgcaggaggtaatgggaccaaaaagaaccttcagtttgttggggttaacggtgggtatgagaccacctcaagtgaggagaccagcggtgaggacagcaccccagaggacttgtctgacagcgaggcagagaagaagtgtgacggcccagatcacaagcatgtcaaagatgcccatctcacctgcgaggctgggcagggcatccctgagggcacctgccatgctgcccaggaaagtgggcctggggaagaagtcccccactccaaggccgagagatataaaccctcagaagaatttcttaatgcatgccgggcactgagccagcatctgccagaaactgggaccgccacagaccagctcttgaggcaaagcttgaacaccatcagtcaagagtggttccgcgtctccagccggaagtcgtctagccctgccgtggtggcctcctacctccacgaggtccagcctcactccccacacttcctgaagctgcttgtcaacttggccgatcgcaacgggaacacggcccttcactacagcgtgtcccactccaacttctccatcgcgaagctgctgctggagacaggcgtctgcaatgtggaccatcagaacaaagctggctacactgccgtaatgatcactcccttggcttccgcagagaccaatgaagacatggctgttgtctggaagctcttaagagaaggaaatgtgaacattcaagctactcagggaggccagactgcgctgatgctgggagtcagccacgacagggaggacatggttcaagcgctgcttagctgccaggcagatgtcaatctgcaggaccacgatggatcctcggcctcatgctggcctgtcaccatggcaacgtggacctggtgcggctgctcctggcacacccagcctgcgacagcagcctgactgacaagggctggccgcacagctttgtccatcgctctgaagtcacccacccatatggaaattgctgggcttctgagagcccacgcggagcagggcaggtccctggggctgtaggggctgcagaagaactggccgtggggaacaaaagccttcttctctggactcctccctcgcccttgaagagggcagaggtcacaggccagagagccacccttctagagaagaaactatgtcaaatatgcacatacattcctgttgtataattctgctcattaggatgctttgtagtttttgccttaggccaagcctgaaaactacacgggcttcagagcagggttcaaggtgcaaggtgaggggtacgtcggtgtcatccaaacatccaaaacatcttcagccttgaattcctcatgactctaccctctgtaacattgtgtagcaagcaggcaggcaggagcacattagcacattagaaaagcaatactttttacatggaattttacagtgcactatctttctgttttttaagcaagtgtatacaaatatgtcccattgatatgcatgtctatagatgggaggggatttaagccaaccccctggcaagcattctgtaggggaccctagaagaatcaccgtgcagactggtgaaactgaacaagcaccatttgggagctttgtttcgatggggttgacagagaaatcttaaaatctgacagggtagaagaagcactttggcatcaatgccatatgtacagtcttgactatttctgagtcatctagtggctccaatttgctccagggaaattggaattaattaagaaatttattatctagtaagttgctatgtaataaagaaaaaaaagaaattcaatccaatgacacacaccacatgtatttgggcagagtcagattctctcagctattttgagtctgtggaagaaacaaaaaaaagcttcctcctgaggatgggttattgtcatcaagaagccacctgcatagccgtatccattacctcatggtaattcccggtgctttcccctcatatcccctagaagcaaatatctgttctgaggttttttgggacttctggctgcaataggagcaagggacccaggcagggcagagcaataccttccgaagcttccatattccctggggccagcacatgcaaggtttatatggtcagtagctcacgtgaagtcatctgaatctttcttaaatctgctctcttaaaatctcttatgcaaaaaaaaaa

SEQ ID NO: 95433 - DNA, 2758 bp, Homo sapiens
cccagctgtcactgccacagggacccgagcaggtccttacctcctctgtacatagcttcctctccactgaactcaggattgaagaagcaggcactgaacaggaaggaggccctcagggaggaaccaggggagcaggaggctttctgtggggcagcgacagaaagactcccccagcagggagggaggagaccagttccaatctcccagggaaggagcacccgggaaggccaccaagctcgccaacggatgccactattgggcagtatgtgaagaagatccaggagctcctgcaggagcagtggaactgcctggagcatgggtacccggagctggccagcgccatcaagcagccagcctccaagctcagcagcatccagagccagctgctgagctccctcaacctgctgctgtcggcctactcggcccaggctcacccacccaaggagccaccggcctcctcctcctccccgccagtggagatctccccatcgaccagccttaaatccataatgaaaaagaaagactatggcttccgtgcaggaggtaatgggaccaaaaagaaccttcagtttgttggggttaacggtgggtatgagaccacctcaagtgaggagaccagcggtgaggacagcaccccagaggacttgtctgacagcgaggcagagaagaagtgtgacggcccagatcacaagcatgtcaaagatgcccatctcacctgcgaggctgggcagggcatccctgagggcacctgccatgctgcccaggaaagtgggcctggggaagaagtcccccactccaaggccgagagatataaaccctcagaagaatttcttaatgcatgccgggcactgagccagcatctgccagaaactgggaccgccacagaccagctcttgaggcaaagcttgaacaccatcagtcaagagtggttccgcgtctccagccggaagtcgtctagccctgccgtggtggcctcctacctccacgaggtccagcctcactccccacacttcctgaagctgcttgtcaacttggccgatcgcaacgggaacacggcccttcactacagcgtgtcccactccaacttctccatcgcgaagctgctgctggagacaggcgtctgcaatgtggaccatcagaacaaagctggctacactgccgtaatgatcactcccttggcttccgcagagaccaatgaagacatggctgttgtctggaagctcttaagagaaggaaatgtgaacattcaagctactcagggaggccagactgcgctgatgctgggagtcagccacgacagggaggacatggttcaagcgctgcttagctgccaggcagatgtcaatctgcaggaccacgatggatcctcggcctcatgctggcctgtcaccatggcaacgtggacctggtgcggctgctcctggcacacccagcctgcgacagcagcctgactgacaagggctggccgcacagctttgtccatcgctctgaagtcacccacccatatggaaattgctgggcttctgagagcccacgcggagcagggcaggtccctggggctgtaggggctgcagaagaactggccgtggggaacaaaagccttcttctctggactcctccctcgcccttgaagagggcagaggtcacaggccagagagccacccttctagagaagaaactatgtcaaatatgcacatacattcctgttgtataattctgctcattaggatgctttgtagtttttgccttaggccaagcctgaaaactacacgggcttcagagcagggttcaaggtgcaaggtgaggggtacgtcggtgtcatccaaacatccaaaacatcttcagccttgaattcctcatgactctaccctctgtaacattgtgtagcaagcaggcaggcaggagcacattagcacattagaaaagcaatactttttacatggaattttacagtgcactatctttctgttttttaagcaagtgtatacaaatatgtcccattgatatgcatgtctatagatgggaggggatttaagccaaccccctggcaagcattctgtaggggaccctagaagaatcaccgtgcagactggtgaaactgaacaagcaccatttgggagctttgtttcgatggggttgacagagaaatcttaaaatctgacagggtagaagaagcactttggcatcaatgccatatgtacagtcttgactatttctgagtcatctagtggctccaatttgctccagggaaattggaattaattaagaaatttattatctagtaagttgctatgtaataaagaaaaaaaagaaattcaatccaatgacacacaccacatgtatttgggcagagtcagattctctcagctattttgagtctgtggaagaaacaaaaaaaagcttcctcctgaggatgggttattgtcatcaagaagccacctgcatagccgtatccattacctcatggtaattcccggtgctttcccctcatatcccctagaagcaaatatctgttctgaggttttttgggacttctggctgcaataggagcaagggacccaggcagggcagagcaataccttccgaagcttccatattccctggggccagcacatgcaaggtttatatggtcagtagctcacgtgaagtcatcatcatcggggtatcgctctctatcttgttttttgtttcttcctttgttctttttttctttttttttctcttttttttttttttttctttttttccttctttttcc

SEQ ID NO: 95434 - DNA, 346 bp, Homo sapiens
tgatttttgtaggtacagtctttaagaaggtgaggtaaaatgaggtcataaaagtaggtccctaactgagtagaactggtgttcttagaagaagaggaagagatactagagctctctctctccctagtgtgcacacagcaaaggtcagacagagtggcctcatcagacaccaactctgaaggcaccttgttcttgaacttctgacttccagaaccgtgagaaaataaatttctgttgtttaacccactcagtctatggtattctcttatgacagagtaagtacaccaatatagttacatagagtggaatacacagaatttaaatttacattgcaatatgttttaac

SEQ ID NO: 95435 - DNA, 400 bp, Homo sapiens
agactccatccatctcaaaaaagaagaagaagaaggagaaggagaagagaagaagaggaagaagaagggcagaaggtcaaaatcagagttttggggaacacctggacttacaagcttctggaggtagagaggcctaagagagagctacaagacaggtaagaggacaatcaagaaagagactttccaggaaggagatcagacttcatggagaagtcagtaaggtaaggtaagaacgaacaaaggggtctgttgtagcccttcctctgcacaatgtctggggtgggagttgggaaggtaacaaaaagctcaattgcagtgggttggaggataaactggaagtggggaaggagagaagtgggtgtggactgctctttcttggttctggagggagcaggtgacg

SEQ ID NO: 95436 - DNA, 719 bp, Homo sapiens
tctgttatatcaggaaactggtctgttttatattctactcatgtttctaaattgtttaaacttttatagttggaatacattccacttataatcagcaaaaataataaagatattaccaatttaaaaacatagtagtgattatctttaaattttttctatgagaagtattttccctacttcctttaaaagggcaagctaagttttttttttttttttttttgagatggagtctcactctgtcacccaggctggagtacagtggaacaatcttggctcactacaacctccacctcccaggttcaagcgactctcctgcctcagccccccaagtagctgggattacaggtgcacactgccatacccggctaatattttgtatttttagtagagacgaggtttcactgtgtaaaagggcaagctaagttttgtgttttaaaattggaggtgggatgaggggagcggtgggcttcctagggtagcatgcacaagatcagacaagttgttatgggttgaattgtgacccctaaaaagaaatattgaagtcttaacatccatatcttagaatacaccctcatttggaaataaagtacttgccaatataattaattaagataatactggagtatggtgcacccttccaatatgaccagtttcttataggaaaagaaaacagaggcatggtggctcatgcctgtaattccaacactttgggaggctga

SEQ ID NO: 95437 - DNA, 112 bp, Homo sapiens
taatcttttaagtctataccttggcagaattcaagccgctttcatcctaccaatgtggtggtcttgcattagttttacaaaagtggtttagttttgggctattatcatttaa

SEQ ID NO: 95438 - DNA, 385 bp, Homo sapiens
tagagatgggatttcaccatgttggccaggctggtcgcgaactcctgacctcaggtgatccgcctgccttggcctcccaaagtgctagggttacaggcgtgagccactacgcctggacgacagtttttgcttgtttttcgtttttgctttttaccaggtttttattcttctatgggtgaatttaaaagcatagatgtaaattaggttgacagatctgagctagtataaggacatagtcttttcgcacttattggaaagcctctgatttttattattcacaatcaaatttggactgtatataattctttaagtaatctgggtgtggtggcttatgcctgtaatcccaacactttgggaggctgaggtgggagtatcacttcaggac

SEQ ID NO: 95439 - DNA, 1268 bp, Homo sapiens
ctgttccctgagaggagatgacacaagggatgctatttactagacacttcaagagtcatggccactgttggtatcttggggattctcaagcagttttgaaacccaaaaccaagaaaataacacaggatgcctgaggatgtattgccctgtgaggtttctgaaatgaaacctcaacccaaagacattctgatggggtgtctgtgccaagggaagattaaagaaagggacacaaatattttctttccttttattttcttttttttttactgtggattgtcaggggattattatgtgctttcatgtcctgtgaaatgtttacaaatgaaaaatattttttaaagtgtcatccactgctttttgaaaaaatgcagaattaaaatactatgtctaaaatgtacaataaagaacagttgataatgttgtgagttacacaaggttagttagtgttggtaagtgtcaggaaagaactggaaatttaaactctgactgcaagcaagagttaggctggggtaacagggtggtagatttgaggctcttcttgccacacatttggaaaatgcatgagaaaatgaattcttttttggagcattaaaacaactaaaaaacaggcaattgcattgaggtggctctagtgtactgacctctgagtggagagacaggcaaaggcatccctagatccaaaaagctgcccattcttctccagctgtgcacctgattagataatttccactccagcacccgtgactggatatagttcaattccccaccaagccccctcaggccatgagtgacatatgtgatttgacactggattgaataaagcaagaattataggtttttcctggatccttttctggcagggcttccttcatgcactggacactggccctgcctgtaaaatacttgcattttcatttgtgtgtaagattatttgtatttatgaaaaatatatatgtgttattcatacatggaagcaatataatgacaattattttaaaatttcagattttttactttcctggcacatccaggttttagagcaggcagcctgagatttcaaaaatgaggcaattctctaagaaataatatgtgaggcacatgtgaattttaaatattctagtagctacattttaataaatacaccaggcatggttgcctgtgcctgtaggttgaaatgtttgggagactgatgtgggaggatcatttgaggcaaggagtttgagactagcccatgcagcatagagaaagccatctcaacaacaacaaca

SEQ ID NO: 95440 - DNA, 1216 bp, Homo sapiens
ccatgttggccaggctggtctcctgaccttgtgatccacccccgcctcgcctcccaaagtgctgggattacaggcatgagccaccacacccggcctgaaaatggggtactttaaaaatagatgaatagtggctgcctgagtagtggagagggtcttctggattccttttccaatactctcctgccctcaagaagctccagctcaatatgttcttagttctggtaaaatagcaatgtcagaatatcaaattaacattaggcacatctcatcacagtgactcccatatattgaggctatgccaaagccccatgctcaagacctttggaaaccgtctgtaatttgactctgaaaatacaaagtagctaaattgatcttgccacctggctagcccttttggcctagagaatgcgctgatctgttcatagtggtccttttgaaaaggcagaacacgagcagtgagagaggtaagaggattcatgttgaccttagaaacttcacccagaaggtgaagctcatttaaactggtagattttctatagcaaaagaaaggagaacaagtaattacatggtttcattaagctacttaatttaggcccagtcagatctgcagttctctctggtctggggttaagactagcagcgttggattatttgtctttcctggctaagaaacattgtgctttcctcctgccccccaagttcttgaaatgcaccttttctttcaccaaaaagacagctatcgggtatttaccccatcctctaacacaccttcaaatgaaggttcctgattgagtcaatttgctgtggatgaagttagctgtttaatgcgaaagcagtctaacttctagtagcctagctaaatcctactgggagccttatacacgtagactaaactcttgctggtatcttcagatagtaatgcatttgtgtatttcagatgagttcatcttaattcacttccattttttgccttctattgccttgcttggcaggtagctgcattccatagtgtggcattcagtatggtggatttaaaagtgagggtgggagggtaaagtaggggttaggaacttttgcccaaggatcaggtttagtcttgcttatgggtaaactggtggggttccggaaaccgacatgggtcttccagtaggagtgggaacacatgaaggacccccaacaattcctttaattagtgcttattctagtttgagcactg

SEQ ID NO: 95441 - DNA, 778 bp, Homo sapiens
ttctgaactgaccgttagcgccactcccaccgtgctgctcgctacgataatcgcgccaccacttgtcctccgtagctctggagtcctggcctgccggttgctaactgggccactttacagaggcagaagcaagctcagggagggtaaacaggaagggtaactaattttcctgggattacacagtcggtaaataatggaggcagcatcgaccccaggcagtctggccccagacaccacacttttacccaattcccacagctgcctggaaaataaatagaaatcaaatagatgttaacaaggacctttgggagttgtccggcgtttgggcaacggattgcttttctgtttcatgttagtccaccgccctcacgtggccccgtcctgaacttcacccttgtttggtcccaaactgtaaagaccctcacggtgctgggaaacacagccctgctggcctcggactgcaggacagaatccttacccctcctgggcctccgttgtgttctttccaaaatgggataatggtagcaggttaatggaaataattaaataaaatagtccatctaaattcctggatcgaacgaagggtccaataaacattagctgtgctgttgtagtgctcagtgcctctctctcaaaagcgggtggcaacagacaccctcacaccttcgctgtaatgagagctctgcaaagccaactgcaaatattaggaatcagtgtcctcacgaggccaacccctttccaaggctgcttggaaaatgctttgctagactagcttgga

SEQ ID NO: 95442 - DNA, 188 bp, Homo sapiens
ttgcttatgagaggtcctaaggaaccctgtagcacagaatgctgttttcaaggaagagcaagaaggttccactgtttgatgcagggatatctgtcagtacggtaaatgatagtataaggatttttaattttaaagtttctatcaaacgcaaggttttttgtttgtttgtttttgtttgtttgtttgtt

SEQ ID NO: 95443 - DNA, 382 bp, Homo sapiens
atgggatcccccccaaatttcaaaagctccaggcctcaccaccctgggccttcccctgagctctcaccccagccaggccctgggtatatgtcctctcagtcacactcacatccaccgaataaagtgggtctgttattatcccttttacagttaatctaatttattggctcatattcctttctccaaaacatgttaaggattctgacacttaatttggaagtgcccaaaagtctacatcacagaagaaatccccattaccctttattaccacattatagagtccacgcgtgtcagtgactctcatatcagaggacagagacgataccctctcactgtgacctacagtgggtactgaaactctcaagacagcagctaacgtgac

SEQ ID NO: 95444 - DNA, 588 bp, Homo sapiens
aagattataaagaccatttaaactggagattgtaatttattcttttacagtccagcatttaagtgaaaatgagaacatcacaatttgggaatctgtaatggttttgttgaaaacattacttgtggcttgtataagagtggctgaattcaagaacattgattcttagcagatcaataatagtatttaaagaatctgatgctaaaattagaaacctaaatgatttgtaatttgtactgtgacacagcagatgatgtttccttattttctgacatctttttatgtttttggagaggcacattagaggtgctttaaaaaaaacctgtgaatttttaatattttgtggtgccatttgtgaagcacctctttcctgatccatctaactactcctgtacgtacagtctgagtttgtcccacttgttgacttggttacttccctattgtatttatttctttaaagggttgttttagaattttagaggaatttatctgagaacacaagatctaccactttcagtaggacaagtgacccaagttgttggtcaccagcctcaaagtttagaaaacactacctactacctactgatagaa

SEQ ID NO: 95445 - DNA, 713 bp, Homo sapiens
agccaatagaatgtcctaagatatgcagttggcaagctggagacccaagaagagccaatatttcagtttgagtctgaaggcaggaaaagactgatgtcccatctcaaagcagtcaggcagagggagttccctcttgttctcactcaaggaaggatggcgcagtgctcccgctgttccgaggctcagctaccctgagggaggcagggaattttgatcagcttctgaagaatcacctcatctctccccgcagagagcacagagcacaggacttcacgttatgtcaacatctcttgcaaaagcccagctcctagagagcaggagccttcccagactgtgtcaaattacctcggggatggagagacttacatggcattaatagaaatcaaatggcagagctcgggtttctgatgagtctcctgaggttcagaagggtgagatgacacattcaaggtcacatggctcatttgtgttggagtcagaagtttccagatttcttgacttttagtccaaggagcagtccctgtgcatgtgtcagagttgaacaagccagctggactgagtgcccatgacctcagggacatcttggaagctatatgtagaagatggaaaagcctctgtcatctccatcaatttaatctccaaataactacttagaaaagggacagcttactaactccttcattgcccagtactattaggtgagtaagaaataa

SEQ ID NO: 95446 - DNA, 796 bp, Homo sapiens
gcctggtcaacatgaaaccccgtctctactaaaaatacaaaaattagctgggcgtggtggcgtgcgcctataatcccagctagtctactcgggaggctgaggcaggagaatcgctggaactcaggaggcagagactgcagtgagccgagatcgcgccactgcactccagtctgggtgacggcatgactccatctccaaaaaaaaaaaaaaaagattttggagtagattcatcattaataagtaacagattttaggaaaatcaaaaaatggctaataaaatgaacacaatgtaaaacatttattaaaatgtagacttttaaaaatctataaattgatcatctgtttataaattggcagatggttgtgtaccatcttttaaaataaagattgaatttcacccagtgtgatggttcccattgcttatatttctcctgctgaggccggacctgatatggccctggtctgtgttcccagccttgtttcctcattaccactaaaatctttcccctgtatgcccgcccaatttttctggctctgagtccttgttcatactgttctctccaattctaccttccaaaggcctttcttaacaccttcggattctttctttgagaactttccagattcccatgcctttttggaatcaatctctatcctattgtcatcacatttaagtttctacttccatcatcctcactcctatccctttggtcctgggatgacagggatgctgtgttttatttactcatctttgtaacttccacataacctaaccccggttcttgcttatgggaga

SEQ ID NO: 95447 - DNA, 1006 bp, Homo sapiens
gcctggacaaaccaggatgagttgtcaacctgcatgggggcaatggatttggccatgaacttcatcatttcaaagtattaagttgttggcattctgaatgcccctgaacctattttgcatcgtagagtggacttgttccccagtgacccatgtccacccctagtggactcgatcaactcctgacacacccctactaggaacacgaaaatggttgtagaatgtgtttcattgtcctcatccacagatacagacactttggtgactctgtgttctatctgaatgggggctgagactacaggataccccatcccatttctgtcctctgtccttcatccaaggtgtcaccatttgtatcaggaaggaggctttgcagctaaaatttaaaataataagaagaatatatttccgagccagagattagatgcctacatatctcttttggcctcagcattctgtggtcttctatggagaaaggctaattttctgaaggctttgaatggaatgaaaactgcctgttcaaatggttctgaggatactgagagacgctcagtgtgtggtctttttatttttagtaatagtgttggaaaaaatcaggttatgtttacgctgagtgtgtggggggcgctggtgagattgtgtagtctagaaaaggctagaattataaattattataaacgttggccatgtggggaaattcttataccaaaaatactgcaatgtatgtcagcctatagattttcatgtagtttcttgtccaaaactgtatatgagagcagaaatgattgattatgttatgttcaatgtatacctaatatctagtgctgatacataaataaacccatcatttgtgacaagggtcttttgtccgcatttaattttattttgttactttttatttatttatttatttttcagccagggtcctgctatgtcgcccaggctggtctcaaatttccggactcaagcgattcccccacctcagcctcctgagtagctggggtcgagg

SEQ ID NO: 95448 - DNA, 417 bp, Homo sapiens
  misc_feature (379)..(379): n is a, c, g, or t
  misc_feature (410)..(410): n is a, c, g, or t
  misc_feature (413)..(413): n is a, c, g, or t
cctctcctgagcctcttttgtgccgccctgggcaggagcacaccctagtgccgcaacattgggtgaaaagcgggatgccctcccattatcattagcagtcatcctccttccactccaacagggacatctgctatgagggagttatttttacaagatgaagttaaatcttgagctgtctttaaagtaaaaacaatgaagcagcaaagggaaataagtgccttttttgtttgttttttgagacagagtttttgctcttgttgcccaggctggagtgcaatggcgcgatgtcagctcaccacaacctccacctctcaggagaatcgcatgaacctgggaggtagaggttgcagtgagccaagattgcaccactgcacttcancctgggaggcagcgcgagactccatctcaanaantaaa

SEQ ID NO: 95449 - DNA, 374 bp, Homo sapiens
agtgaccacggcccatgtcctgccccacacacaatgacaaagaagagatggcactaaggatctttgcttttctcctctctccagccccctcaactgcagtccaatattgttactaatttctttcctttggcccaccttggcagacagctcattaactgcctggaaggaaatgccctctggttcaaagcagcttcctgccaagaattcattcatttagcaagaaatatgcaggatcctccccccaccgccccccaccacccgtgccatgacacgggctgggtgccaggaatgcaaaagaagaagatccagatgagacaatcatgtttttaaaaagcaacaaatactggagtcagaggtgttatcccagtgtgaga

SEQ ID NO: 95450 - DNA, 406 bp, Homo sapiens
accctcctcagcctcccaagctgctgggattacagatgtaagccactgcgcccccaggatctgcatttttaaataccaccctaaagaatccatttgcaggggtcaaaccacactttcagaaacatataattccttgggggtacacttcctggaagactgcaaatgcagagttttatgtggctttcgagtttgagggagtgagtaaaagaaatgaattttttagttctgaataaatgaaagatttttctttaagtgatctttctcagagattaggggttctatgacttttatgtgacagaccaaaagacataggaaacttttggcatcctaggtaccaagtcaataaatatttattgagcacaaactttgtgtcacaaatgatagacaattctagaggcttctaccc

SEQ ID NO: 95451 - DNA, 939 bp, Homo sapiens
ctttcttcattcagcatctgctatagatgccgaatgagaaacaagggcaggggattaagcttgaaatctcattccttgctgactcaggctctctttcaccctttattcttatagagggctcaagatctgtgggtgtcagctgaagagattaggccaacacccccagcccatttatatactttggtttctggccaggcaaggatttgtatagtgtttgatttttacatagcgtaaacactcttagttctttttctccgactccagattctgatcctctggatcaccacaagtttcgatcttagctgggataacagagggtgtctcccctttctgccaggccctggctgccctagcagagtttatagctcttggctgttccccctgctgccctgcaggtctctgcttgctactcccaccatcaccccatgatttcagcactgtagccttgcctagcccaccactcaggttgggcaaagttgtaggtttcctcagaaagcaagctccctgacttagctgagcccccacagggggtgaggtaagcaagcctgtcagggcttgcctgctgcctcccacatctccctgcagtatcttaccatatctccacatactcagctagccataggctccccaatttttttggttttttttttgagacaaagtcttgctctgtcccccaagctggagtgcagttgcacgatcttgacactgcaacctccacctcccgggttcaagtgattcttctgcctcagcctcctgagtagctgggattacaagtgaccaccaccatgcccagctaattttttgtaattttagtagagacagggtttctccatgttggccagggtggtctagaactcctgatctcaagtgaccctcccacctcagccttccaaagttctgggattacaggcgtgagccaccgcgcctggcctgtgctcc

SEQ ID NO: 95452 - DNA, 399 bp, Homo sapiens
catgcagctgttttggagctaattcttcagtccattcaatcattgactccttgaatatataggaacaaatgagcaacatcaataacacctgtcaattcagtacaagctaaggaaaaccattcaaaatcacttgccttgctttttttttctaatcaaaaaaaaattttttttttctaatcaaaaaaaattttttttttagaaatgggatctcctgtgttgcctaggctggatttgaactcctgggctgactcagttccctgagtagctaggactacaggcataggccacctcatgtggctaacttgccttgttttactattgatgtttgtgtcctgtgtccttaacactttaagcagctgttctcacctaaaggctaatagttttaagtaagtttctttt

SEQ ID NO: 95453 - DNA, 309 bp, Homo sapiens
gcaaacgcacagtcaggcagcccccgatgaacacacagtcaggcatctcccagcaaacgcacagtcaggcagcccccgatgaacacacagtcaggcatctcccagcaaacgcacagtcaggcagcccccgatgaacacacagtcaggcatctcccagcaaacgcacagtcaggcagcccccgatgaacacacagtcaggcatctcccagcaaacgcacagtcaggcagcccccgatgaacacacagtcaggcatctcccagcaaatgcacagtcaggcagcccccgatgaacacacagtcaggcatctc

SEQ ID NO: 95454 - DNA, 312 bp, Homo sapiens
tgtgggccaagtgtgacaggaggttagagagagagacagagaccttgcaagacctcagaggccacagtgtgcaacgtggacctattctccatgcctagggcagccattgaaggctgttcactcgaggagtgatgtgatgtgtaggatttgcattttaagaggtggctctgtctgctgtctggacagtggattggaaagaggtaagagtggaagcagggagcctggtgagaaggcacgtgcagctgttcgggtaggactacattcatgggtgttactggaagtggaggaaagacagacttgaggtgtattttg

SEQ ID NO: 95455 - DNA, 429 bp, Homo sapiens
cagtaacagctgtaacaattgttgtgtggccacgacctcaccgtcactagatcccagggctgtttagccccatcttataaatttggaaatggaggcctggagaagagaggtgaccagcccagggacctctggtgtgaggagactctctgggggcctgtggattcgctgggaggagtgttctgcgatggccctgactgtgctgaactcagcagtgacccagtgaccccggtgagggtgcctgatgcctgagagagggccaggtgggggccggcgcaggggcccccaacctaacacgctaaggctaggaggcaggcctgggctctgccatgtggtctcagaggagatctgggtctctgggcctgcggtggggacggtcatgatgcccactgcctgcgaggctgcaggacccagctcagtgctaacctgcgc

SEQ ID NO: 95456 - DNA, 406 bp, Homo sapiens
caaggtgagatgtattttacagaataactgaccagtattcatcctaagtgtcatggtcatgaaagacaaggaaagactgggaaagtgtcacaggttggaggagactaaggagatataaggaataaatgccatgtgggatcccagattggatcctggaacagaaaaataacattgggaagaaaattggtgacattcaaataaggtcttgagtttacttaagaatcttgtaccagtgataattccctggttttgataactgtgcaatgcatggcatgtaggttgttgacattgggggaatctggataaaaagtatacaggagtttcctgtatcacttttgtaacttttctgtaagcctaaaattattaatatttcaaaataaaatgtttaaaaggcgaggctgaacta

SEQ ID NO: 95457 - DNA, 359 bp, Homo sapiens
tgaagcgaagtcaatgtgatggtgcaggtagactgcttcccgctgtgagcgacacacagtgaacgatggtccctcaagctccatcctaaaccctctgctctgtttcctatcttcttcctcacgttagtgtgagcggctgcatcacttcccctagtggggatgccaaaacgggctcacagcccttcccctcttgtgggatatttaggtctcttgcgattctcctctattgtaaacactgtgaaaaatgtctcatttctttgtccttctgctggatttcaagaccccaaatccttcacataagttcttccaacagcgctctcctctccagaaggaacctttttgctaccaagttggtcaga

SEQ ID NO: 95458 - DNA, 344 bp, Homo sapiens
taggaaaaatcctttttggcctaagaagagaaagctgaatcagacaattacttccaacaattacttccattaagccagggttttgcttttatgattccttttaataacagctacgttaactttaacagcaagagagagggttacacagacttttggccaggcgcagtggctcatgcctgtaatcctggtgctatgggaggctgaggtgggggaactgcttgaggccagaagtttgagaccagtctgggcaacacagctagaccccatctccaaaaaaattttaaaaaattagctgggcctgtggcatgcgcctgtagttctagctactcaggaggctgaggcag

SEQ ID NO: 95459 - DNA, 797 bp, Homo sapiens
ctgaagaaaggcctgctatagttgtggcaccaagcaggtacctgttcccctctcctttaagccgtatgactgagcatggtggactggaagcgtaccatttcctcctcaaacaaggaagaagtgagagaggctggaggagccctgaagagcatggaaaatggaggcaaagttctctgtcagccactggggaagcattcactaaagcaatcgacaaagaagtcacgtgtggcttctccagagggaagggcttcagtgtctaactcctgctctaagtcctgagcctctccactgagacatccaggcacttgggctcccagactgaaggtaatccagtaataccaatgttgaggctacttcccaagccctatcttttggaatcttaaaaaaaaattttttttaaatttaaaattttcctcatgcataccacagatcttttggaatctaactctcatttagtagtggaagtcaataaagaaatgactttggttgacagtcaatttagataaattgacattccttgtatacaaataaggaaatacatttgtagtatatagaaaatgctaaaaaacagaggtgccattttctccacaaattattgtaactcttgtcaaaggggacaattccctgtatcaataacttgtagtgtatggagaggagaaaaaaaagtagagcaaagggtatattcttctttccctttctctgccttaccccagagaaatttcatgttgtcttctgctacaaggatttatccaatcactgcccagccatctgttgactttctggtttctacccaactt

SEQ ID NO: 95460 - DNA, 547 bp, Homo sapiens
tctgcttggtatcaggaactgcgctaggctcaggagcttcagtggtaaataagagacagtcaatccccaccctcagtgattataaactcctttaaaggaaaacataacacttttctttttctcaaactttctgtgtctgaaggctcactagcatctgtttccagcatagatgtggtgtgatttgttcttcatgtcactcgcttctaattcagagtgaggggctgaggcatctggtagtagagcttcttgttcctgtgccccatctttgtggattctgggaaagtgagaatctaggatgtgtgggctcaacctcaaagttgggatccccaaacataggaacagggtgggatatgaacaagaacataagtgacagataacaacatcaatttttccttttttcgctggatcattccttcaccacacaaacatgccgttcttcctcccatcctcaatattctcttctaaccctactttccctcacaacaactgcccactgctctgcctcttgcagcaatgctcttcaaaggagttcttcttgtccattcct

SEQ ID NO: 95461 - DNA, 396 bp, Homo sapiens
ttaatgcaccagaccattcctggcctactgtgcaaggccctgtggtgcaggtggggaggcgggtagagatagagagcgaggtacagctgagtgcagatccccagctctgagcatcactgggtgtgtgacttactcaattcatcatttagctattgagagctgatgttaggcatattctttcttttcttatgaagccttggtttattgtgggcctcagaatagaagcttcttggcctgaaaatgaagttctttggaagtgccatctgacacttctcctggtgggcagagttgctgaaactggaagcagggggtttgaggggtgctgtaactgatgtggggagaccgactggggacaaagaatgaggatagtaacaggagatgactcctcctccccag

SEQ ID NO: 95462 - DNA, 440 bp, Homo sapiens
acagaagtttgttgacccctggtgtaggctactacagtcacctcctcactcttcctgctcctatccttatctagcccctatcctcccagcctagtctccagccagcagccagagggatcctgttcaaccctaagtcagatcacgtcccgctcctgctcaaatccccacaatggatatcacctccctccaaataaaagcacagtcctcacagtggaacctggctccatgtggtctgcccaccctcaggttcatcacctccctgacctcatctcctaccctctcctcactacactgcccacacagtggcttcctgcagctcactgcagcctccgcctctcaggtcagtgattctcctgcctcagcctcccaagtagctgggattacaggcatgcgccaccatgcctggctaatttttgtatttttagtagagacagggtttc

SEQ ID NO: 95463 - DNA, 830 bp, Homo sapiens
caggcctcaatgccttctgaagtgtctcctatgcagattctacataaagagtgtttccatactgctgaattaaaaattctacaaaaagagtgtttccaaagtgctgaatcaaaagaaaagattacgtctgtgagctgaatccacatatcacaaagcagtttcacaggccacaatgggctcccaatgtccctttatggtttctacaaaaagagtgtttccaacttggcctcaatggactcccaaatgtcacttcgaagatcctccaaaaagagtgcttccaacctgctgaattaaaaggaagctttaactctgtgagatgaatccacacatcacaaagtagtttcacagatggcttctttctagtttttatctggggatattccatttttccctatagtcctcaaagggctcccaaatgtccctttgctgattttccaaaaacagtgtttccaacctgctgaatcaaaagaaaggtttaactctgtgagatgaattcacacatcacaaacagttcacagaaagcttctttctagttcccatcagggaatattcagtttttcctcataggcatcaatgggctcccaaatgtcttttcacaatctccaaatacagtgtttccaacctgctgaaacaagagaaaggtttggctctgtgagatgaatccacacatcacaaagcagattcacagatagcttctttctagtttttatctggagatattgagtttttcccataggccacaatgggctcccaaatgttcttttgcagattctcaaaaaagagtgtttccaaactgctgaattaaaagaagggtttaactctgataattg

SEQ ID NO: 95464 - DNA, 755 bp, Homo sapiens
  misc_feature (525)..(525): n is a, c, g, or t
  misc_feature (627)..(627): n is a, c, g, or t
agcggactgagttctcctaggctcccagatatagaaagctctaagagttgctacaggagatagaattgaaactatacataggctgaggtgggcactgcggaggattggctatgcgagggtattaatgtggtgcggctgtacctgcctgttttgtgaaagtcacttctctgagactgtgaaggtgagaagcccaggatccactagaagcttcactgcggctctttggtgggggaaagcattcccagtggtagctgtcctcatttgcagcgttattctcggaaaccaagtatgtgcagcagtgacagactatgccacagctcctctgcagtttggaagctggaacaaatggaaagagcttatagccaagagaggttgtgatttttttttttttaccatccaagctttctctggcagtgcacaaatgaaggatgagcttggtggcaagcaaaatcagcagactgcctgacagggggtttggatcgaacggttggaagtaagcagccttgcccaaacatccagtgcagnggcctccagtaccgatggcagcatccacacagactctggggatggaacaccagaccctcagcgcacaaaggctgccatggctcacctgcagcagaagatccngaagctcacagaacaaatcaagatggcacaaacagcccgggacgacaacgtggctgaatacttgaagctggccaacagtgcgaccaacaggcaggctgcccgcatcagcaagtctttgcgaaggcagg

SEQ ID NO: 95465 - DNA, 715 bp, Homo sapiens
agcggatatggggaagaaggcaccttgcttggcccacagagcgactcttgaactgtgtggtcctcacccaattgctggatctgacgccttatctctctcatccctacttcgccgttcactgcacagagcgcggtgagacttcctgaacgctctgcagttcatcgctacactcttcctccatatctagaacgtggcctggcacatattagatgctcaatcatcattttaaaataaacgagtagtgatccattcaagtaacgtggataaacatcaacaacaacagctgctttcaggaaaaaagggcagactctgaattatgaagaatgtgagaaacttagatcagtatcatgaagattgtgtacttttactttttagggcagctttattgagggacaaatcacccattttattttttagttttactgaggtatgattgatataaaaaatggcacacatttaaggtatacatcttcatgagttaagacatatgcatgcgaccatgatgccatcgccataaccaaaggttaaatatatccattaaatatatccatatctccagaaattgccttgtgctattttgtaaatcatccatttaaaatttataattcaggctgggcgcagtggcttacacctgtaatctctccactgaggtcgaggcaggagggtcacttgagcccaggagtttgagaccagcttgcacaacatgataagactg

SEQ ID NO: 95466 - DNA, 681 bp, Homo sapiens
ggctgcaggtgggcagcagggcccttcctttccccacaggcagggaacacttgtgtttcctttgtttacttctttagcttatgtcttccgcgatgaaacggtaacttcctgaacgctctgcagttcatcgctacactcttcctccatatctagaacgtggcctggcacatattagatgctcaatcatcattttaaaataaacgagtagtgatccattcaagtaacgtggataaacatcaacaacaacagctgctttcaggaaaaaagggcagactctgaattatgaagaatgtgagaaacttagatcagtatcatgaagattgtgtacttttactttttagggcagctttattgagggacaaatcacccattttattttttagttttactgaggtatgattgatataaaaaatggcacacatttaaggtatacatcttcatgagttaagacatatgcatgcgaccatgatgccatcgccataaccaaaggttaaatatatccattaaatatatccatatctccagaaattgccttgtgctattttgtaaatcatccatttaaaatttataattcaggctgggcgcagtggcttacacctgtaatctctccactgaggtcgaggcaggagggtcacttgagcccaggagtttgagaccagcttgcacaacatgataagactg

SEQ ID NO: 95467 - DNA, 422 bp, Homo sapiens
agttaaatgcactgaaacttaaaactgatattgtacaacataaacataaagatgaatgaaaaactccatgctgagaattttgtaataaggaaatagactgggtgcggtggctcatgcctgtaatcccagcattttgggaggctgaggtggggggatcgcttgagcccaggaagtcaaggccacaataagccatgatctcaccactgcagcatgggcctcagagtgagaccctgtctctgaataaataataacaaatatggaatatgtaataaaataatgtttagtttttaacaactaaaaccctccatgccaagttgcgaggctgagctgcgagtcagcagaggaaagggctgccgcctcttctaggtctctcgactgcaccttttcttgcttttcgagcaagggagtcgcatggcccatcc

SEQ ID NO: 95468 - DNA, 388 bp, Homo sapiens
gcttcttgaaaatagggattttgtctggctggctttcctgctgaatccccagcacctaatatggtgcctggcccatacagagtccttaacagatgttcaataaatattaatatctactaaattattttctgaaatggatacagtatctgagatggttaattttacgtgttaacttggctaagccaaggtacctagatattgatcaaacattcttctggatgtcactgcaaagctatcttctttaaaagattaacatttaaatgagtaggctttgagcaaaacaaatgaccttccataatgtaggtgggcctccaatcagttgaaggccttaatagaaaaaagagcgacatccacagagcaagaaggaattcagctagcagagtgcctt

SEQ ID NO: 95469 - DNA, 126 bp, Homo sapiens
gatcctcccatcttagcctcctcggtagctgggactacaggcgcacactactacacccaattatttgtttatttacttatttttgagatggattcttgctctgtcgccaggctagaatgcagtgga

SEQ ID NO: 95470 - DNA, 201 bp, Homo sapiens
gaagtctctggagctaagctgggacctgtatgtgggcactgctggcagaaacataagtgtgtgtggataaactcttcattagtggaaaggaatcttagttttcggctgattttcagtggtgggcatgaccccaaacagaatctgagatgatgtaataatcatctgtgatttgattgtacttataagattcagctaaatctt

SEQ ID NO: 95471 - DNA, 347 bp, Homo sapiens
atgttctctctcacgggtatacaaggtaagtatcaaagatttgtttccttctgtttttaagactgtatagtattccattgtgtatatatgccacattcattcattcaactgctaatgaacactaaggttgatttcatatcttgactatcatgaataatgctgcaatgactatgggagtgcagatacctcttcaacatgttaatttcagttcccaatagggatatcactttgaatcctagacaatcaaggctcagcactaagacattctgcaaaacttcttcctttctttcagtttagtatattctatccagatgcctaatttattgggtgcgtgagagagggagcat

SEQ ID NO: 95472 - DNA, 464 bp, Homo sapiens
aaactatgtagaaacacaaggtaataattgggaatcatttctacagatgttgcaatgaaatcaattggtgactttatctttaaaattggacttcatgtgcccttatacttaccgactagattgcttattatgtattcactggatctgttctgtttctgaaaataaaataaataagaaatgcacttcctctaaggaagacaggacgagccagtttatactttagccttatgttttctaaccttaggagcatctgcccctgacagtaggtgcttggcagtttcatgggacttaggaggagtgtgctgcagaagaaggatgactgcattgtgtcagggccagtgggtgccacgctcatcctggaagccatctagcagacctcatgtggcaaatgatgataggggaaaatatctcccacactataagccttctgttcttttaatccacatgcacaaaaagagaaagaa

SEQ ID NO: 95473 - DNA, 199 bp, Homo sapiens
cctaagtagctgagaaaaaagtttgctagaatttgaatttttgttaacagtgtttgaatatcaagtctatctttaaaaaatatggggctttctaaaataattttctctacattagccttcctattaatttaatgcatctcagttgtatcagaacttttctagttctagttacaaaaactcaactcaagccaacatcagc

SEQ ID NO: 95474 - DNA, 751 bp, Homo sapiens
ctgtctctattcaaaaaaataaagagagagaaatagaataaaggttcccaggaactcatgggagggggaatggagagttattgtgtaatgggtgcagagtttctgtgtgggatgatgaacaagttctggcaatgaatagtggtgatggttgtaccatattgtgaataatatacttagtgccagtgaactgtacactcgcctgggcattggaggcctgggttgaaccaagctcaactgactctagctaaggctttggaaaagcctctaaatgtctcattacctcatgtcccaaatgtcagactttagaatcatgtgaacagcctatttctttttgtgacagatgtggagtttgcatgataaaggattagggtctcacaataaaggtgacaatttcaccaataaaggtgacagtgaccagagcctagctctcccagctcctgccccagtggcactggcctcaacaaaatagaactattccaacctcttatgcttttgagcagcaagtcactcaagaaatatggttgtaatttgcaaattacaaatacagaacaaacaactatagcctaggcaacatggtgaaacccctgtctctacaaaataataataagaaaaaaaatttagctgggcatggtggcacacacctgtagttccagctactcagaaagctgaggtgggaggatcgcttgagcttgggaggctgaggctgcagtgagctgtgagtgtgccactgtactccagcctgggctacaga

SEQ ID NO: 95475 - DNA, 217 bp, Homo sapiens
aaggggtgggggcaatagcttgggacaggctggaggagataaactggggcagctaacccaggatcttatcagccatttaggaatgtggactttattctagggataattggggaggagcagaggtgacatcagatttgtattttaaagtaattggctgggggtgtacggtggctcacgcctgtaatcccaacactttgggaggacaaggcaggtagat

SEQ ID NO: 95476 - DNA, 410 bp, Homo sapiens
aacaattacttatattaaaaccttcctgttcacatttcctcctccttggactagatgatcaaaacgaacatccccactgtggggcagatgggcattgtgtgcctcgagatgcgatgccctgagaggccgcgtgacgcaggtagtggttcagccacctggaatgcaaaaccaaatctaatcacgaggaaattgcagacaaacgcagataagcagcaccacctaaaacgaactgtatccttacaaactgttcctatcatcacagacaaagctatggaaatgatccagattaaagaagaccaaggagacatgacaactcaactgattacctgatccagaccagatccagcaccgcagagggaaaggtgctatagaggacacgatgcggccaatgggaatatgagtggtgaggt

SEQ ID NO: 95477 - DNA, 742 bp, Homo sapiens
tgtagcaaaacattgactaccaggtcccttttgctttggataaagaggttcctccccagttcattcacccttgcattgtttctcacagggtcatcccacagaacgtctgacttagaatcacttgggacattgctaagtctatagattcctgggccccaatccagatttcccgaatcatactttgggggtacaacctaggaatgtaaatctttacaagctcctcagtggttttcatgcacactaaacttttagaatcagtgttatataataaaagatcaaatgactgagaagaagagaatatgtttaaaaatgaccagatatgtaaattaaaatccttaatacattcctgggaacatgctcagtgtttgtggaagtgtgaaaggcaaagcaacactgaccagaaataaattctggaaagcaccctgaagaaactgttttgaacaaacaggttaatttatctctggtttgcatccaaacccagtgacaccaagttggatggtaaccagaaagcgttatggaatctctttaggtgagtgatagtttagggaggtgaacattgctggtttgacattcaaccttaaaacgaacatcagagtttttcagttcacatgttttctcttactgaacaatttcctaatgaagtactggaaaagacaacctttttctccattactatttggaattttagatcacatacatcgcctgttccaacacctaaatgaaattaaaaagttaggttggt

SEQ ID NO: 95478 - DNA, 246 bp, Homo sapiens
atgacatattattactacgctgtgaatttttaaaaatatcgtttacattgataacaatcaatctcatctagcctttcaaaactgctcagcaatcttccttgaataaggctctatgttctgcaatgtatattttatgccttctgaaaaagctaaggattttttttttttttttgagacagagtcttggtctgtcatccaggctgaagcacagtggtgcaatcatagttcactgtagcctcgaccttc

SEQ ID NO: 95479 - DNA, 387 bp, Homo sapiens
ccaccactcccggctaatttttgtatttttagtagagacagggtttcaccatgttgcgcaggctggtcttggactcctgacctcaggtgatccacctgcctcagcctcccaaagtgctgggattacaggcatgagccactgcacccggcaggcaaattatttggtagggtaaaaagcagtttgttatcttcattgagtctgttcctcacaataaactattatcactcacagacaccttgattgggagagaaaaactttttgtttgtgttgggaccaggttgaggaagggaaggagacaggtctaggagttgctggtggaaactgtgggtacttatcaggtgggaggttgtaggcagagaggtttccgtttaaggaacactgagagag

SEQ ID NO: 95480 - DNA, 330 bp, Homo sapiens
gaccctctgaaaacccaaagaagctttggctaccaggggattcatttctcatcttaaaattattctttagagacaagatttaaaccttcactttctaggccttagagttcccttctcagaataacaggtggattacaccgatggctgcattctccccacagcggccacaggatatttaaaaatgtaaatcatgtcccataacctgccttcccattgcacttcagatatccaggttcctcatccaggccttcgagggcctttgggatcctgctgtgctccctttacatgcctggcttgaagctcctcccctgccagccttgctcttcccct

SEQ ID NO: 95481 - DNA, 553 bp, Homo sapiens
aaagaaaagtatccaggaatctgggttcccagctacctgctctaagtctttttaaccatactcttcctcccatgaaggagagcaggggggaaggtactgtattctaggagcttaaaagaactgaaaatcatgcaggaaagtaatgataaatgattctatgataagttgttaaaattaattaatactttgtaattaaatgagtttagggtcataatgattttaaaaattgctgttagcttaaaaactctaggcctctcataaataaaaccttatctaaatttgactaccacagaacttccttataaagaatgtgccaaatcatgaaagaaagaccacgataagaataggaaactacaaggcacatctcccacattctctttggcctttgccactaactccttttaaaagatttccccaactgaaaaataatcaaacaaataaaaacctttattttcaatgttaaatgggcaaagttatacttaccacctacaatttaggggcattgtaagggggctgatcggttgatatcttaaccttctaacattcttttatc

SEQ ID NO: 95482 - DNA, 263 bp, Homo sapiens
caagcctacccaccccaccttggcttctgctgttagtgtactgtgggcttcgaaagcagaaaagaatgcttgttaaaagtagaacgtttgataacgggagtttgggtgacttccttgggcctggcttcagggttcaggctttttagggagctgttgcacaatttgagacccaggggggggaaaaccacagaacaaaacagcaagtcgggcttgggccgccggcttccagggcgcccaggacagtgggcgggcgagtgtgtggt

SEQ ID NO: 95483 - DNA, 202 bp, Homo sapiens
agacagagaccaagaaatccccacaaacgtagctaagaaatagctttcatttcctgtgttcagtcgttttcaaaccagatgcacctacctgggaagatttttaagtgccaatgcctgggtcacatccccaggtgactctgcttctttgatctgatggtggggtgaggtatctgtattttatttacttatttttatttttttg

SEQ ID NO: 95484 - DNA, 584 bp, Homo sapiens
ccagggttcggcccatactacttctagcagatctaagaagatgaaaggaatctaggaaaaataaagggagaagacaagacaagaagtgatagcatattaccagttagttcctggtgtgcccctctggttggaggactctgctgagcatcttgctcattttatgcaaagggaattgagccctttgggcaaagggtgttgcttctttggatttcaagaatctctagctaatagagcttaacctctgtttgcatttttgcttctgtgatttagggctaatttccaatgggttgtacaagataatagaaaaatgtatcatttatctcattcttgcagttagtggaggacctttattaggagaggaggctttcttttctgactaggctccaaatttacagcccctgacccacttcagggggttgtgagcaggaaaagctgatgttgctgtcttgacctctttgccgccaggatttggcttctgtgcaattcctagtggttgtcctctcattctctagggaaacggggaactttgctcccagcacctgattaaactgcctctttgtagggtggagtccgctgcctttgtt

SEQ ID NO: 95485 - DNA, 309 bp, Homo sapiens
atgcctgtgtgcatgcatgtcccacatcgtgtgtatgtgtgtcggtgtgtgtgcatgcatgtgcatgcaggttcagctctatgcctgtgtgcatgcatgtctcacatcgtgtgtgtgtgtgtgtcggtgtgtgtgcatgcctgtgtatgcaggttcagctctatgcctgtgtgcacgcatgtcccacatcgtgtgtgtgtgtcggtgtgtgcatgcatgtgtatgcaggtgcagctgtgcctgcgtgcgtcacatcgtgtgtgtgtgtgcctgcgtgtgtacatgcacgtgtctgttggttcacgttgc

SEQ ID NO: 95486 - DNA, 425 bp, Homo sapiens
agccatggtttgggccctttctccccaggaagcctcactgcaccctcattaattagttggccaccttttcttctcaactctcacaggtcttgatctgagacacccatgtactaccttgagttatgttcattgttttctccaagcagaacatgtgtttttagggcagagcctacgagtccgctttgccatatacccccattgcagccagctcggcacatggctcaccactcggtgaatactcattaatcgatttgtgtggacaaaagttaacaataactattccactggcctgtgcttatgagtcgattactactggaccagatccttctgtctttgaaatcaactctctcgggctttttaacatagctgaagaccagtcagagttgtttttgttttgttttgttttgttttgttttgttttgttt

SEQ ID NO: 95487 - DNA, 448 bp, Homo sapiens
agattctgcctttcctgaatagctaataaaagcccctcaataagataccatacactaatcaaactaagaaacacaaaagagcatctatttgtatctatcattctattaatttacatcaaacattatatctatctatcacgtttcaattctccgccttgtatgagtttcttcttgatttccctatcactcttctttttaaaaatacattgacatttctttagttaaatggttgctattatctttataaagcataatggtaaagactgacttgtgtaaccattctttagcagtgggagttatgaaccttaagcggtgaagaaatcattcttggggagataggaggcaaaacggacaggatagaagaactgcacttgatgacttgtcctgggtggtattaatagtttcatagacatttgcttactaatagattattgaattatacattttg

SEQ ID NO: 95488 - DNA, 944 bp, Homo sapiens
catggggttcatgaagcctctgaaactcagcttaagagtccataccaaccaaggtccttataggaagagcttgtgtttttgttttgttttggctttctgcagtctcttaataatgtttattgaatgagagaatttaactaatttccggtttccataatcactttaaactcggtatttgatttccttttccctgggacctgtgacagtgccagcttcatagcctagtctaggcatgccagttgcccactgtggcaatcaatatctgagcctgtggtttttgccttaggtaaactgtagagatggactcatggaatgcttggaaaatttttcagtttatgataatgtgtaaatgtcgagagccaattattgaggaatggcacctcaaagtatttgggtactctagatcagacatgaccatcttggtgtgtgaaattttgctaatgcatctttcctaatagaatatacaatctcagggctagaaagtcttagagatcatttaatttaattcctccagattgattaagtggtttgtccaaggtcattcaactggtatagtggcagagctcaggctgtacaaatcaggtgagtattcttcagctcctcagaagccagtaacttccactcacttgtgtgtgtctgaaattcattaaaccttcgacacaaagtgcagccattttaatgctgaatgatattcatcactgtctgaaatgggcttatttatgtacgaatgtttattcctatctcttcctccattctcccaaaatgtaaaccccataagaacaggaatcttgtctgtcttagtcacactcagtatccttagagccttgtgtgtagtaggtgtgtagtgaattttggttgaatgagtggcagttctaataatgtcagaagaattggaatttctttacagaaatctttatcagtaatttaacaaacatcgattgaac

SEQ ID NO: 95489 - DNA, 385 bp, Homo sapiens
agaacagttatcatattcagataccattttagagtgctgggcacacaacagtaaaacaaaacaaatcccactctactaaaactaaagacttatttatatgaaaactggagttcatagcttttggaaggcttactaaaggtcatttcctcagtagctcacgcctgcaataccagtaccttgggaggccaaggtgggaggatcacctgagcccaggagttctagaccagcctaggcaacatagggagatcctgtctcaatacaaaaaattagccaggttatggtggtgcttgcctgtagtcccagctacttgggaggctgaggtgacaggatcacctgcccaggagctgtgactgcgccactgcactccaggctgagcaacagaggc

SEQ ID NO: 95490 - DNA, 482 bp, Homo sapiens
ctaggttccccaagactgtctcatatttgaaccccaataaaaaaaaaaaaaagaatcacaactggaaacatttcatttagtacccaccacattttcaaggacctggaaggttcatgttccaatatatacaaacagagaatatgcctagcacatagatgatcaataagtttatttattttttcttttttttcttttattattatactttaagttttagggtacatgtgcacattgtgcaggttagttacatatgtatacatgtgccatgctggtgcgttgcacccactaactcatcatctagcattaggtatatctcccaatgctatccctcccccctctccccaccccacaaccgtccccagagtgtgatgttccccttcctgtgtccatgtgatctcattgttcaattcccacctatgagtgagaatatgtggtgtttggttttttgttcttgcgatagtttactgagaatgatttccaat

SEQ ID NO: 95491 - DNA, 276 bp, Homo sapiens
tcatcagacctcactgtgtctgcagtagaaaacatccctttagtgattatttttgtgggtcctacagcttcgttgcccttttttcctgaacagtactgaatgcatattgtaagtttgccctcaatcctttatttttaggtttaccaccttctttctgttgaggtattattgttactattacacgtgttaatggattaaactacttcttacttatttttcctaggcctgaaaaatttcagattcttctctttgtgtgtaaatttaattagcttaacc

SEQ ID NO: 95492 - DNA, 385 bp, Homo sapiens
gtccttacataggcctcgagagctataaaaaaacagatgcagaatctggagtcttgtgaaatattccagaccagcttcttgacttatagtgggcaaaattgcacgtcagtattttaatcaaataaagcactcatttcctctgacattaaatgcagtctggattttctgtttctcaggtggatattttatatagttatgaaggctatttttgaagaattaattttcctcacatttaaacttgttttcttattagagatacaacctaaccagctacccagttctttgtgccatgaaactccttcagaatgtctggtttattgtactgagagtgactattgcatctaaatcacttctccaaagttaccaggagaggactctaaggtca

SEQ ID NO: 95493 - DNA, 303 bp, Homo sapiens
gctttttgcccgttgaccagataaatagaactatctgcattatctatgcagcatgggatttttattatttttacctaaagacgtctctttttggtaataacaaacgtgttttttaaaaaagcctggtttttttcaatacgcctttaaaggtttttaaattgtttcatatctggtcaagttgagatttttaagaacttcatttttaatttgtaataaaagtttacaacttgattttttcaaaaaagtcaacaaactgcaagcacctgttaataaaggtcttaaataattgtcaaaaaaaaaaaa

SEQ ID NO: 95494 - DNA, 824 bp, Homo sapiens
agaatgagacggcaagggatgtgtagctttttcaatcctggccataacattcttcttcatgctcttctcaatgtcctttctcctttcattaggtaaaatggagatgatccccagggccatcttggaaacagtttttgaagttggtagagtctcgggcccgcttaactgctgaaagagtaggaaggggtccgtttcattagcgcgttcaaccaaagagcgctgttaggtgagcaaaaacaaaccagttgtgtctgagccaacacccgtttgtctatgggttgtagcagttggtccacctaatcaaggaagtgccgagagcacaggacatgaaaagacacagcgctaaggtttcctgcaccacaaggttcctttcacttaaaaaaaattttttttatattacaccatctttatttgtaccttaccgtctaaggctatcaatcaaacttcagtaagaacagtttcagcatcaactaacgaacagtagccaaaccagagagcagtcaaaagtgttttaaagggagcagcatcagctgatgttctgccaagtctctgggtgttcaggaccatggtcccccggcacttccaggcccctgtgggctgcaggtggatccccaggagccaaagggccgctcaggaaagggtggaacttggcctcgcaatcagctggcttctgcctattatggtcatcttctttccagaggtcttgctatctcagtggacgtggctgtcatccagccgtcctgggctgttttctcatagaagaggatctccctctgaaaactgtgtcatccttcaattcctgggccaagtctggggacacatct

SEQ ID NO: 95495 - DNA, 703 bp, Homo sapiens
agaatgagacggcaagggatgtgtagctttttcaatcctggccataacattcttcttcatgctcttctcaatgtcctttctcctttcattaggtaaaatggagatgatccccagggccatcttggaaacagtttttgaagttggtagagtctcgggcccgcttaactgctgaaagagtaggaaggggtccgtttcattagcgcgttcaaccaaagagcgctgttaggtttcctgcaccacaaggttcctttcacttaaaaaaaattttttttatattacaccatctttatttgtaccttaccgtctaaggctatcaatcaaacttcagtaagaacagtttcagcatcaactaacgaacagtagccaaaccagagagcagtcaaaagtgttttaaagggagcagcatcagctgatgttctgccaagtctctgggtgttcaggaccatggtcccccggcacttccaggcccctgtgggctgcaggtggatccccaggagccaaagggccgctcaggaaagggtggaacttggcctcgcaatcagctggcttctgcctattatggtcatcttctttccagaggtcttgctatctcagtggacgtggctgtcatccagccgtcctgggctgttttctcatagaagaggatctccctctgaaaactgtgtcatccttcaattcctgggccaagtctggggacacatct

SEQ ID NO: 95496 - DNA, 368 bp, Homo sapiens
taggatcttccagctaccaggaggcaagagagacaaatgaagacaccacagagaacaggaaagcaaaagaaaaggagaaaatacaggagaattggtagaagaaattataggtaacataaatgtgaggaactgaatgtgggaggctacagagtgccaaaagaaattagcttaaatagccaggcaaggtggtgtgtgcctgtagtcccagctactcaggaggcggaagtgggagcatccccttgagcccaggattagagaccagcctcagcaacatagtggaaaccccatctcaggaaaaaaaagaggaaagaaaagaaatttttgcctaagccaataatactaaggttttctttttttttttctttgag

SEQ ID NO: 95497 - DNA, 499 bp, Homo sapiens
cagaagagagaattttcagaggtcctgaatctgccgtttcgctagtgtcaccttatgagagctttttaagagagaaaaaaaaggatggcagcatgaactcagctgggccccgtggtcctcagcccagccctcggcagaagcagtgaattcagccataactacagcagagtctgatcattctcctgatgaaattacactgatctaatttgcacgctgtgaagacatttggcactggctggatctgagccttgacatcttcattggaactaaaagtacactaagaactgacattacgtttcacattcttttctgccaggctgtggcatttcatcctctttaaaggcattatttcaagaacatttaatttggctttgatatgcctgccattttgctgggtggaacatactgcgccagaaaagctcagctgtaataaagtttggcaccaacagctcaccatatacctgcaccatcctgtgcaatttaattggcattcagtggg

SEQ ID NO: 95498 - DNA, 275 bp, Homo sapiens
gtgtgtatcctagcggggagagcaagagacagtgggacaaaaataataacagtaatagcagcaatgcttcttgaggactttccgcatggcaggccctattctaagcacctcatgtagcatattttaccctcaaacagtcctgaggtaggttctgttattgcgattttataaatgaggaaactgaagcacagacaagtttaaataactcgttcaaagtcatacagctcatacatggaggccagcatgcaggccaggtgtgtggggtatgggcattg

SEQ ID NO: 95499 - DNA, 327 bp, Homo sapiens
gccgctcttgaggatccacccgcggcgagttcatgcaggtgaggaatagggtcccaggcagactgatccagcctcccagctgcttattatcttcactggattctgctcaagtctgcttcttcaagctccctgtttattctgagttctatcctatattcttttgatggattccttttcctgcttatgtcaatccatcatttctattgtttgcaaatcacagcccttgatcactctagaaactaaagtacagaaagtgccctgactttgctagaagtttaggtgtaaaattagtagtaaagttagtaaggaaaaaccaaaggggaagat

SEQ ID NO: 95500 - DNA, 661 bp, Homo sapiens
aagaatggtctccaacttatgtgtatccactatagccaaagagtgtcagggcaattgtccatcttaattcagggctattaataagccttattttcatattgggcatcccaaacctaaggtttcttctccagtctctcccaggaagctagattcatgcttctttttgcatatattgttcctgcttgaaacaggtgttagttattgctctctgaaacgtacctttacaagagtgtaaagaccccgagggtacatatgtttttggttgattcccagctatgcttaatatctgggtcctctcattagaatttaagttccacaaaagcgtaaaatctcatgcctagaacagtgcctagcgcatagtaagtgcttgataattatttgttgaaataatgaatgaataatgatggatagttattctttaagacccaattccaatgccacctgtcccctcccaaagcagctatgtgtctctcctctgatcctttagtactgtttgcatttctctataataatacttacaggatactctcttaattgtttatatctgttttcccaattaagctggggaatattttatggccggaactatgttttataatgccatatgctttgtgcctaaaacaatagaagttcaataaatgcttattgcttgaacggctga

SEQ ID NO: 95501 - DNA, 522 bp, Homo sapiens
aactgtggaactctatttccatgcacaaatgatctctggaatatgcttaatatgacatctgacgacactccatcatcctggtcccttttctttctccaattttttccgctgttgggaataccatttcctcttcttgacacatttgtaatgtttagtcttgcgactttctgtaacttttcatggaaaaacaatcttcatatttttctctgaatcctatccttttaatttttctttccctatctggctcataggcatagaaggtagtgaagatggccaggcacggtggctcacggtgtaatcccagcacttttggaggccaaggtgggaggatcacttgaggtcaggagtttgagaccagcctgaccaacatggtgaagccctatctctactaaaaatacaaaaataaaaattagccaggcttggtggcaggtgcctgtaatcccagttactcgggaggctgaggcaggagaatcacttgaacccaggaagtggaggttgcagtgagctgagatcgagccactg

SEQ ID NO: 95502 - DNA, 385 bp, Homo sapiens
ttagttgtattaaatgcatttcaacttacaatattttaaatttatgatgggtttattaggacacaacctgatagtcaaggagcatctgtacttcttacaggtaagaccagataaagatatgttttttacactctttctgcaatgctctttactactggagcgtttgtctctataaaggatatagagctagtccatggtcatcagcaacttgtgatatcaaaagtgaccaaggtcattagtgagtatattaaagattcccaaagaaagcaatttcactctttgatacaatgggtaaaattgaaggagtttatacatatttgcttctgtatagtattcctagttccagaaaggattttaaagcagctatttttcctttttcctaatc

SEQ ID NO: 95503 - DNA, 440 bp, Homo sapiens
agcccaccaaccaaatccattttgtttcatgatgacatcacctttccaacttgcaagtaactcagcttctcccattctgtgggtcctgtctgcaacctcagcctcgtcaggctaacaggcccactagaatctgtggccattccccaaaatttatttagtgaggctgtgaaagcaaactcctaagcccccaacctccaacctgcctgctctgatggaaaactggaagatcacatgatgtggtaaaataaacaatttttaagtcatgtttaagtaagactctctggctttcacttataatttagtctttgaaacatctatgaggccaggccaagtggctcacacctgtaatcccaacactttgggaggccaaggcaggaggatcacttgagcccaggagttcaagaccagcctgggcaaaatagtgagaccctgcctctgca

SEQ ID NO: 95504 - DNA, 461 bp, Homo sapiens
aatgaagacccaccccaggaagctgctaggatcctgccctgcaatatttgaagtttgcatgctcgtggccacacgattctcagattcccttgcagatttgattatttatagtagcagattgagtaatcagttgaaaagaattcctttcttcatgactacagggaatatttttcttgaaattattttgaaatccttttgctaagcaagataagtctgaacctgtattagaggttgaaaagtgaaagaatagagaatgtgaaatggattatgttaaacttctgaaaattatatactgttacaggtggctaattctttatttgagagagttattaaagaattgggccgggcgcagtggctcacgcctgtaatcccagcactttgggaggccgaggctagcggatcatgaggtcaggagatggagaccatcctagctaacacggtgaaaccctgtttctactaaa

SEQ ID NO: 95505 - DNA, 495 bp, Homo sapiens
cagtcggtctcccctggtgcactcatatgcatcatttgctgtgctcttattgttttttttttttttttttttgagatggaatcttgccctgttgcccaggctggagtgcagtggcacgatcttggctcgccgcaacctccacctcctgggttcaagcgattctcctgcctcagcctcctgagtagctgggattacaagcatgcaccaccacatccagctaattttgtatttttagtagagactgggtttcaccatgttggtcaggctggtcttaaactcccgacctcaggtgatccacctgcctccacctcccaaagtgccgggattataggcgtgagtcactgcgcccggcctaggctgcaggttttattccaggcaaggatgtggctggcatggtatctagtgggatgttatgaaagctggctttgttctgcaggatggcaacagtcaatacccgcatgaatagcaggctctcccagctctcagagcaagctc

SEQ ID NO: 95506 - DNA, 708 bp, Homo sapiens
gaacttcctgataaatcccccagtatttgccaagtagccacctctttaattgtgtggttaccctcttcaccctgttaaaatgctgcatgccagattgcacccttccatggatgcctttctgacattctgcttgggctccaacacatctgtgtcaggctgccactcttcataaatgcccttattacgatgcttgggccaggtctccccaagcacatgaaaaactgcactgttttcgtgggtttggataccaaagaaaattgaatgactgaaaagtactgaagagtttaccttaaagggaggaaactagagcagaagttctccaaatgtgatctctagactcagaacatcagcaccccctggggaacttcttgggaaatgcagattcttagggctccatctcagatctgaatcagaaactctggttatgggggcccagcaatttgtgctttaacaagctttctagggaattctggcacatactagtgtttgagaccctctatccaaaggagagatagagtctcaacttagtattctatcctgcatctaggttatctctggcataatgaagactccctggttgtcaaggtcttggtacaattttttagggctttggagccatcctagaaatgaagtcctcccatatggatcaagactggaataattatccagttcaacccaccatccgtggaaaacccaatcctctaggga

SEQ ID NO: 95507 - DNA, 659 bp, Homo sapiens
aaagattttctcctatgttttcttctaggaaattcataattttagcttttgtgtctaggtgtatgcctattttgagttaatttataatacggtgtgaagagttaaggatcattgttttgcaatggatgtccaattcttctagcaccacttattgaaaatactttccttttcccactgaactgcctttccatctttgttgaaaaccagttgacaatatgcatttctatttctggactcttctgttccagctatttatatgcctatttttaaggcagtgacacattatcttgattactatagaatttgagtaaattttgaaatcacagaatataaatccttaaattttattctttttaaaattgttttgattttgtaagtcatttgtatttccatatacaaaggcattattctcatagaagatgatagctccatgtccctgaagaccttccagtgggacaagatgtagaggtggaagacagtgatattgtgatactgactctgtgtaagcctaatgtgcatgtttgtgttttaggtttttttttttttttttagtttcaagtaaaaaaataatttctaagatagaagaaagttgtagaataaggatacaaagaaaaaaattttttgtatattcatacaacatgtgttttaaactaagtgtt

SEQ ID NO: 95508 - DNA, 462 bp, Homo sapiens
tctccaaacagtgcctggcagaaagtaagcattcaataacatcagctattggccaggcaaggtggcttactcctatattcccagcactttgggaagctgaggcagaaggattacttgaggccaggaattcaagaccatcctgagccacatactgagaccccatgtctataaaaaccaaattaggccaggcgtggtggttcacacctgtaatcccagcactttgggaggccaaggcaggtggatcatctgaggtcaggagttcgagaccaccctggccaatatggtgaaaccccgtctctactaaaaatacaaaaattagccaggtgtgatgggtgcctgtaatcccagctactcaggaggctgaggcaggagaatcacttgaacccaggaggtggaggttgcagtaagccaagatcatgccactgcactccagcctgggcaacaagagcaaaactccatctc

SEQ ID NO: 95509 - DNA, 329 bp, Homo sapiens
ttttttttgagacagagttttgctctgttgcccaggctagagtgtggtggtgcgatctcggctcactgcaagctccgcctcccaggttcacgccattctactgccttagcctcccgagcagctgggactataggcacccgccaccgtgcccggctaattttttgtattttcagtagagacggggtttcatctaagaatctcaaagagtggaacacatgctaaagctttacaaggacagttaatcacctgaatagataggaactctgcttaaaactcaaatattataggaagaacaaagagaaaaggaggccagggtaataaatactacc

SEQ ID NO: 95510 - DNA, 713 bp, Homo sapiens
agagattattatgccaaattaaaaatttttaattaaagtcaagctaaatttcatatatcaatatatcactccacctgctagtctagtctctgttataaaggattggtttgaaagtgcattagtctgtgcaggctgctataacaaaataccataaaacaggtagcttttaagctgcagtaatttagttttggcagttttggaggctggaaaatccaaaataaaaacaccaacaggctgggcgtgtggctcacacctatatcccagcactttgggaagctgaggtgggtggatcacttgaggtcaagagttgagaccagcctggccaacatggtgaaaccccatctctacaaaaaatacaaaacaaattagctgggcatggtggtgggcgcctgtaatgccagctgctcaggagactgaagcaggagaatcgcttgaacctgggaggtagaggttgcagtgagccaagatcatgccactgcactccagcctgggctacagagtgagactccatctcaaagaaaaaaaaaaaaaaacaccaacagattcagtgtctgatgagggcccttgttctgatacataaattgtgccttcttgatgtaccctcacatggcagaaggagcaaacaagcacctcgggcctctttcatgagataattaatcccattgatgagggttctgtcctcaggatttaattacctcccactaagggccccc

SEQ ID NO: 95511 - DNA, 617 bp, Homo sapiens
ggcgccaggtacagccggcgggacgtccagtgccagcgcaggagccgggcgaggccgtggcctccagggttcctgggcggaggacaaggcgcgcagccgcgttggcgcgagttttaaatcggtgccttctcagctttgcaagttcttatcaattgctgcatgccagaggaagtttttaaaaaatggcccccagctctattgcggtgtaattgatggatagaaattgtatttatttaaggtgaacagctggatgatgtgatggaggcacgcagggtggaggggttaccacagtctaggtactctacacatccagagcctcccacagttgacaaatggattttcctaatcagtttcgtcgtgttttgtacttaagttgaggattccacaccgtgtggtactttcagaagagatgtagtggtgaataaatcgcaacggttgtgatgttttcctaattaggtattgagaattaccattggtatttggaattagattgcggacgatttaggaaccgttctcgctatgttgcccaggctggtcttgaactcctcagctgaaatgagcctcccacctcggcctcccaaagtgctgggattacaggcgtcccctctgccccagta

SEQ ID NO: 95512 - DNA, 463 bp, Homo sapiens
attggacttgcagaagtcccagcaacatcagctggcttcacagtaaatgtttctggtgtgttctatgtctagtctaatgggcaaagacagagaagttaatttctgaaatgtgaagcttccctttttgcccttaaaaaaaaattttttttttgagatggagtttcgctcattgcccaagctagagtgcaatggcgtaatctcggctcactgcaacctcctcctcccatgttcaaactattctcctgcctcagcctcccaagtagctgtgattgcaggcatgtgccacacacccagctaattttgtattgttagtagagacagggtttcactgtgttggccaggctggtttcgaactcctgaccttaggagatccacctgccttggcctcccaaagtgctgggattacaggtgtgaaccactgtgcctggctggccctttaaaattaattcttgcactggaaaga

SEQ ID NO: 95513 - DNA, 147 bp, Homo sapiens
ctggcatacaccattcttttattcaagacaaatatgcgagagaatcagcaggagtccattctgacttctagagagtgccctggagcggtccacaggaaggtgctggaaaaggcagccgcagatagtccaggtacacgattatttcag

SEQ ID NO: 95514 - DNA, 390 bp, Homo sapiens
gacactcgcctggtctggaggccctggactccaaagtccccacctgagaatgggtccatgtcctgcccccacataggggtttctgggcaggcagagagctcagaggtcatgggaatggcagtggtatttttccactctctgtcccaagtcatggatactgacttgtttctttgtctacacagagtgcctctgagcccctccagggagggacaggagaagtggtttggggggtgagtgactggggcctcgactgttctcaccttaccgccagccagtcttcccggtcccctgccagtgagagccacttgtgtcttcactgccttcccaccctcagacccctggagatggagaaagtttgggggctcagtagggcagacccagggtcttcac

SEQ ID NO: 95515 - DNA, 510 bp, Homo sapiens
ccaggggacgcatctgacacagccttttgcttgcttgtgacaaacagaacattgcagaagtgatgctgcgtgacctccaggataaagctataaaaggcaatgcagcttgcacattgtttgctagaaccctcactcttgaagctttcagctaccacttaataagcagtaagctcagctcccctgaggatgccacactgtgaggaagccgaaagtagcccacatgaagagaccacgtggagaggccctgagagagagagagagagagagagactgatcagccctcatgaactccaattccttgggattctacttccagccatcattggactaagaccacacgagagaccctaagcctaactcatcctgaattcctgatccactgagaccctgagagacaaaatattgttgttttaagtcactaagttttgggctgattggttaccgagcaataaatagctggcctcgttggctcaagcggtggagtactgcggccggaatttttttatcaat

SEQ ID NO: 95516 - DNA, 355 bp, Homo sapiens
aaaaaaaagtaccatctatttactaccccattgagataataaaacttttagaattagaatagaacctagggctgggcatagtggttcacgcctgtaatcccagcactttgggaggctgaggtgggtggatcgcctgagttcaggagtttgagaccagcctggccaatatggtgaaaccccttgtctactaaagatacaaaaaattggccgggcgtggtggtgggcacctgtaattccagctactcgggaggctgaggcaggagaatcacttgaacccgggaggtggaggtagcagtaagccgagattgtgccactgccctcctgcctgggcaataagagggaaactctgtcttac

SEQ ID NO: 95517 - DNA, 619 bp, Homo sapiens
gtggcacatacctgtaatcccagcttctcgggaggccgagtcaggggaattgcttgaaactgggaggcggaagttgcagtgagccaagatggcaccactgcactccaacctgggcaacagagcgagactctgtctcaaaataaataataaataaataaatattaggaaaataaaaatggtactgatagttcctacttatctggctgccacaaaatgtgggtaaaaggtcctcttgaaaataaaccagctactcacggttgaaatttctataaaggtatcttttcctttctcatgtgcagtgctctcctctttgaactgctgttgagtgctttgcatgctttactcatgagtagtggtcccagctacattgggcactgctggccacttcccccttatggaactttctcttctcttgactcgttagacaccacactctcctggttcttctcctacctctccggtaggtcctgccccagctctttaactacttccttctcctttgcctttttttttttttttttttttttttgtcagatagggtctcactttgttgcccaggctgaagtgcagtggcgtgatcacagctcactgcagcctcgtcctcccctggctcaggtga

SEQ ID NO: 95518 - DNA, 454 bp, Homo sapiens
aaaaaaaaaggctccaaattctagtaggagctatggaagatgaaaagtatcgtattaatatccacgatttattgagtggatatagtctagcccttaatcctcataccaaccctgtgggatgtgttattggcgtaattgctaataccacatacattgttactgtcaggcctctgtgcccaagccaagccatcgcatcccctgtgacttgcacgtatacgcccagatggcctgaagtaactgaagaatcagaaaagaagtgaaaatgccctgccctgccttaactgatgacattccaccacaaaagaagtgaaaatggccggcccttgccttaagtgatgacattaccttgtgaaagtccttttcctggctcttcctggctcatcctggctcaaaaagctcccccactgagcacctcacgacccccacccctgcccgccagagaacaacccccctt

SEQ ID NO: 95519 - DNA, 479 bp, Homo sapiens
gagcccctcccagtcatcctagatgaatacaaagaagaaaaaagtgagataagatagaaagcaagagcaatatcctatcatggcacacaagtttttatacaggttacttctccttttgcttatgcatgaaataaagcagcagcacactaggtagctactactgacatttaagaattctaagcagcctcccatgtaactcacagttaccagaggtctgagaaaatcttcagagcagatcttcaagtataaacaaacaaaaaacaagcagaaaacatacggggctactagagagaagctgaactacagtaagtcagatatcaacaaagcaagttaccactagacataggtctgcaggtggatttcagatttactctctgataaaaaactagcaaagtctgtccttccagctgttcttgtatacgagaagtggaatactccagtggttatgaactataagctctttagtaagatggtgaaag

SEQ ID NO: 95520 - DNA, 897 bp, Homo sapiens
ggccattcaaaatctagttcaatcagaaaacaggaatcccatactgataacaaaaagcattcagaagattgggagaaagacactcatgagcaattaggatctaggcatgggaagttagagttcaatacaataggtatacatggatctagccagcaacatttcggagatacaacttttcatgggcaggtaagatccagcacaggttttgccagataggtattaagtcatgggccatcaagagatgcctagggtcagtctggattcagtaccaatgaaagacaagtatacagccatggccaatcaaatgatagttatgagtagtcaaatgacagcaaaagtcaaagatacattttcagtcactttcttgacagccaagaccctgcaggaattgaagagtataggtatagatattcatcaagcagtgcaaccatatgcagtgggggagacaaaggcaagagtcagagtcaagtctgtcaggaggtatcagaatatacggtgaggatgtgggcaaaaaacaaagaggctctgaggccagcggttaccatacaaaggaaagaacaggctctggttccttctgcttagatagcaacaccccactctatgaatatgtccaagaacaaaggagttattactttgaataagaagccaacataaactagcccaagataagaactaacccagagaagaaatgagacacatacatgaaattaaggtatttaacatgatctcctcttttggtagtaagggtatatgtctgttctttcattttaactatagttctgtactatattactttagtttggtgccaggtgttcttgtaaggctccacattcattgaactccttggttagaaaatagtgaatgaggccgggcgcggtggctcacgcctgtaatccc

SEQ ID NO: 95521 - DNA, 902 bp, Homo sapiens
aatactactcagtattgaaaactttaactgcattctgaaaggtcattgcgccgattggcttacctaagatgtcatttagcttccttttctcatgatttacataaatgttgttaccttaaatgcagaaagatgtgatattctttggaggataaaaaacctaagtgaatgaagctagacacaaaaggctacatattatatgatttcatttatatgaaatatgcagaataggtaaattcatagagataaatcagattcatggttgctgggggaatgggagtgactgcttcatgggtatggggttttcttttggattgatgaaaatattgtagaacaagatagtggggatagttgcacattgtgaatgtgccaaaatgccagtgaattgtatactttaaaatggtgtatttgatgtgtattttattacaattaaaaagaaaagaatttgatatttgcaatcattaccaaagccaaaaactagtgttctcaacgtttgtgaaatgcccaaaccgtggtttagaattaatttatagcattagtaacatgacaaatctattcagcttaaagttctagtaaaatttgtgaatcccatcatagaagtactcctgacagcagcagaaataaagctgtaattcatcaaaatttccttatatttaaaacttctgtgactgagtgattgacttctgtgtcaatgtttattttttatcttttgaaatttattatgattccttgtggcacatcccaatcacgctttttaaagatgtgtttttaaaaccatgctttgaaaaaaatttgtataattttcaaggtttttttttatagttttatactttgtttcttttaaagaacaaatgcaacttgttgtattagagtaagactaaataaattgtactgatgtgtacatt

SEQ ID NO: 95522 - DNA, 748 bp, Homo sapiens
ggccatgtgactagatgtcacccacagaagtgagaggaagtgatttgttccatgtcggagtcaagcttcttagaaatggacgtgcttcttccgggatctctttctccttccaccagctaaatgcagatagcaacaaccacacagtggggacacagagaagtgaagcctggggccctgaatgatcacatggaagagactcacccttctggtttcaatatttgacttatagtggtactgtcccacactgctggcaaccccagaagtgccatcagtgaccccgaaccctgctgaaggcctacacctgctgaagaagctcatgcccagtttgaacccactcatgactgagcccaaggacagtcttgtctgtgccaagggtcctggcggctgcgttgaaggactgaaggtgaggcggatgctgtcaccgttgctggtgatgtcgtttgttgtaggttgaattgtgtcttccaaaagatctgctggagtcgtaaccccaggtccctgtgaatgtgaccttatttggaaatggggtctttgcaaatgtaaccaaggtgtaagttaagatgaggtcatactggagtagggtgggcctttaatcaatgtgactagtgtcactctaagaagaggtaaagagacacagacaggcacgcagagggaacataacatctccgcctcagaccgaggcagagattggaaaaatgtgtctcgaagctaatggattccaaagattaaacaactggaagcctggggg

SEQ ID NO: 95523 - DNA, 116 bp, Homo sapiens
acctaaggaagtcagcaggcagtggaggcagaactggaaggacagaggtgaaattgcctttgcaaagattataacagtgagaaaattatgacagtgacacagatctgacttaactg

SEQ ID NO: 95524 - DNA, 517 bp, Homo sapiens
ctaccagtccctcttttttttcactcactcaaaatatatgtatcgatggtcaaatgtgtcccagacattgtgcaaatctctgacaaaggtaacacaagaaaatgtgtactctgagaacttcttattctgccccagtttaggagattcatgcaactgccaagcaacaataataagagctagcagttattggagtacctcattcctcacaactcgtcataaggcaggtgttatcattagatattccccatgtgtatgcaggatgaggaaataggttcagagaggtcaagtggctcacccaaggggcacagctaagtgaaaggcactgcaggcatctcaaactacccccttcccacaagactccactgcagagcaggacagtcaccctgacaccagcccaatgggttcatcttgcccattacccagatggggctaatttatcaagacaagggaattgcaatagagaaagagtttaatacacatagagccagctaaacaggagaccagagttttattatta

SEQ ID NO: 95525 - DNA, 241 bp, Homo sapiens
ccaggctgctgcctccagagtgttctgtgaggtgtcggctttggaagtcggtcagcctcgtgggaacacatatttgagcaaagggtgattctgctccaaatgctgaatgctggccaaggcctttcctcttactccttttctacaggtatattgtgactgtttgcattttagtctgcagtaggtggccaagacattttttctcccctttcttttctttcttacttttttttttttttttttg

SEQ ID NO: 95526 - DNA, 590 bp, Homo sapiens
aggcaaggtgccacagcaacccccaaatcttgggagagggtctttgggggctttggactttgatcacactgaaactccaagtgaacgtgacttttctacagtcactactcatttttcctgttcatctcccacttgattatgggcaacttaatttatcttagtgccgcagtggacactggcaagtagtagacagtcaatgaatacggacagaagaaaggaagggaggatgggaaggaaaggagagagggaagggatagagggagagaggagcttagcgtgttgaaagcatgtgtacagaaacaaatgaaacaaaaatcaaatgaacagcaggacccggctcaagagacagccgaaatgccagaaaattgtgtggaatctctgaagaatgcaatgggctcagctcaatggtgaagaggtctcctatgtcccttgtggccaagacaaaccaggcaaacctgaggctggacacacagaacagatatttttctcctctttttcttgcatctccaaaatttctaacttcctcttgtatgaaggcacctagacttagtgagtttccctttgtgacttggaagttgtgggaagggaga

SEQ ID NO: 95527 - DNA, 389 bp, Homo sapiens
aggcgatggtgacaattatgttccatgtaatctgttcttcttcgaagggcattgggggcggtgggagtgcttagctctctttacaggcaatgagagagttcactgtctgtaggaaatttaggaacaatagaccccgcatggtggctcatgcctgtaatcccagcactttcggaagccgaggtgggtggatgacgaagtcagcctgaccaacatagtgaaaccctgtctctactaaaaatacaaaaattagccgggaatgatggtccatgcctgtagtcccagctactgaggaggctgaggcaggagaatcacttgaaccctggaggcagagtttgcagtgagcctgagattgggctccagcctgggtgacagagcgaaactcagtctca

SEQ ID NO: 95528 - DNA, 272 bp, Homo sapiens
ccgcacaccctccctcaaaatcacgtgttggtcagggctaaggaagagtacaactgcacccccagcctgatgcagacgcacaacacctcgccaaagggaagggatgtttctttattataaagttccctctgtgcgcaccactcctcacgtactcgaagttggagaacgttttagctgcaatttgattctctccactgcccctcaacttccacaaaacccccgacctcgaagaaggtaaggaaaatagtgcagcagtgcagcagctgggggag

SEQ ID NO: 95529 - DNA, 170 bp, Homo sapiens
aaaaggtaccccattaaaaatagttggtcttttcaagtggcagtcttcatttttcaatttagagtagattattttgtaaaagggaatgtgaacagtcatttttaaagactttcctatatgccagtctctgtgctcaaagtcttatcttctctaatttaataactacaacc

SEQ ID NO: 95530 - DNA, 349 bp, Homo sapiens
tagcaattactaatagaatgacaaagtggattcctttctatgggctggaaatcatataggattgcttacagttggagtggataaatgcagttgtttataactaaaaggtcacttaccataaatatatagctggctctatcttggtgaatgcagacttacatgttaataaatataatcaatgtaagtcaaccaagactctagggttatatatttttattgatcgctttttttaaaaaagaagattttgatcacagttctataatattgggccacataccaatgttttcatagtgttcaagttggcttatgaggccactctttaggcttggtgagtgtttgacagatggct

SEQ ID NO: 95531 - DNA, 182 bp, Homo sapiens
gagccgaagaagagcactagtaacaaccaccacagccccctccccgcccgacaccctccctcggcacccactcactcccccgccccgtttgccgacaccgaccaaccccacctcgttcctttgaacggcgtcggctgcagtcgctgcaccagcccgtctggccaccaacgccgcggagaaag

SEQ ID NO: 95532 - DNA, 473 bp, Homo sapiens
aactttggaaagtacatacaccagcataaaccaaccccctttcaagatctacattattttatttatttatttatttattgagacagtttctcccttgttgcccaggctggagtgcaatggggcaatatcagctcaccgcaacctctgcttcccaggttcgagcgattctcctgcctcagcctcccgagtggctgggattacagacatgtggcaccactcccagctaattttgtatttttagtagagatagggtttctccatgttggtcaggctggttttgaactcccgacctcaggtaatcccagcactttgggaggccgaggtaggcagatcgcctgtcaggagttcaaggccagactggccaacgtggtgaaacctcatctctactaaaaatacaaaaatgagtcgggcatggtggcagagacctgtaatctcagctactcgggaggctgaggcaggagaatggcttgagc

SEQ ID NO: 95533 - DNA, 217 bp, Homo sapiens
aacacagagaaggaggcagatattgagtgatgctgccacaagccgaggggcaccagggattgttgggagtcacggggaagttagaggcaggaagactccttttctagagccttctgagggagcatgtcctgctgactcttttttttttcttttttttttttttgagacggagtctctctctgtagtccagattggagtgcagtggcatgatccagct

SEQ ID NO: 95534 - DNA, 650 bp, Homo sapiens
acctatatttgattccctcttgcaatatgtgcttttgatcatgaaactgctgagaaaaggctccttctaaaccacaaaacaaggttgctgctggtgctggggcccgaggaggtccgcgccggaggagggccacagggactgagcgagtgacagacgcaccacccgtcaatgctgcaaccctgtaaggcctccatggactctctacgtgagtgtagaatgaatcaagccgactcaaacacagcagctattccacatgcagtggaagatattcaaggagacgacagatggatatctcagcacaacagatttgtcctggatggagagggctctgcaaagatctgcagagccctctatgaactgatcatgcagctgatggaggaacacccaaggagagaaacaaaccaccattgcctgactggctcccatcagcgttaatctcttcccagcttccttgatcagttatgccactggcactacagaatccatctctttctcaaagcactttgcattgcaaaatgttcctggatgttcagctctagtgtttgaaagggtggagggatttacactggccttgcacgtagaaggtttattagacacaggagaaaaaatagcctaggaagattgttgtttaaatttatctgaaaccagaa

SEQ ID NO: 95535 - DNA, 680 bp, Homo sapiens
agcatcagagtgcatggaatcatgatttacagctcccctgggcctcacggggaagagagggatgctggatgaagaggagggtgagttaccgagcttctctggacgtcaacgtcctgttctgtgaaacggagattacagcagtgcccacttcccaggctggttgtgcaggttacataaaacaatgtgcttgtcactctacctggcatggagtaagtttcattaactgttagttttgaggacagccacaatagtcatacctactagggttaagtaaatctgattaatataaaggcattttacctgggcatggttgccctgtagccctgtagcttttgaaatgggaggagagtcaccaagtggcattccgaatgtcttcctagaaatgttggaaaatccctaatcctccctgtgcactgtgcctggcacaaggcaagagcctctttcccttctttcatttttatcttttcctagtcttcaggcccctcctgatctctgccctgtagctacttttttacccacctgtaattatcagcagctaccaattacccagccacccaactgtggggaaataagggtaactgtgggttcctggggctcgatcactccctcccagaggtgcatgcccaatcagagggtagcaggaatggacgaaatccttccctcgggcacctaagaaggtg

SEQ ID NO: 95536 - DNA, 462 bp, Homo sapiens
gggagaaaccttcaagctgccagccaccaaataagcccacaaggctcacttccattgtcttctcctctgcaatgccctttgtccctaccagcctgaggcaaacatcagtccctattgtccccttcggaggttaaccctacctccaaaacctcttaagagtatcctttcaaagcatgttggcagagtggcctgctgagtgtccgatttctcagtgtgtgggttgggcctgttgttttgtatgcatagcttggggtgttgatttttgttcatttgttggttggtgtgtttttctgccaaaaaaaaactgttaatccaccctacaagaaaggaaggttagggaaaggggggacacagttggaaaaaggaatcacatttttccgtttcctaaatagaccccagacccacatctgcctctaatattggcaaaagtataaatgaaggcagttggtcagcaccccacct

SEQ ID NO: 95537 - DNA, 569 bp, Homo sapiens
actgtataatctggtggaatgagactaagacataaggaatatatatgtatctgtccaggtgtatatactatatatgtagctacttatatcctacgaaggtagacacatatgtagatatgtatatgctatgtatgtcgatatttatgtgttatccaattaataaatcagaagaagggtaccagagaataccaggaaagaatgagtttcttgactacctaagagacaatgaggactagggtcctgaccgaaggcacctcggggtggcgagctgtgagtgttggtggggcctggcaggattcagccaaacctgctgggctcctctagtcactcttgtcaatgggaaggtggtagccaagaagggcccggccgtgtctgttgcttcctctggactcctagagctcaaggtgttaacattcctggcaaacactcaacaaacatcagtgtgacagtttgtgctggatagtgatggggatatacagtcagggtctctgccatcataaagctgaccatctagtagggctaaaagacaattagctgaacagctatcatatggggtgatgactattgtg

SEQ ID NO: 95538 - DNA, 952 bp, Homo sapiens
cagcctcccaaagtgctgagattacaggcatgaggcactgagccaggccaagatctgtgtttgaatgttagtgctggtcagctgtacctgaattccagagggagggggtataacaaggcctgtgtgacccttcttcccatcatgacctgagctcgtttttcaggttaactttggaatatccctttggccaataggaggggtcccttcagtcagttagggggcttagaattttatttttggtgtacgtgctcaaactgcagctgctacaaaaccaaggccacggtgaccctggggccagtccagctttgtccctgtgctctcgagctgctggaggccaatgcaggattctgcccacagctcacatgtgtggcttcagagcctgggagttcttggggctgtgtcttcacctggtaccgtgtaggggccctgtgagctgagtcaactggaagagcccagagcctctgcagaaggcctgagcagggcccgggcactgtccctggagctctgagtccctcaagctgtgtggcccgcagccaggcgcttgacttctctggcgtttgcttcagagctgggagcctggggtggcgtaggtctttggcaggggtcaggtaggggaggggccagccaggaatcaaacatccctgacaggtgagggggcaggtgaggagggcagggcaggagcccctgtagcacttgtgcagcagcatctggaccggtgcaagccctgagatggcttcaggtcctgctcagagctaagggctcctgtcaccagggattcttccatcactgcacctgcagagcccattgggattggggagaggccctggccttagcttggaacagctgtatccgcctgtcgggtgtgcaggctgtgcactggttaagcctgagcgcagagtctgttcaacgagttcattgtgtggtatttgcttccgcttgctgttgagttgga

SEQ ID NO: 95539 - DNA, 3268 bp, Homo sapiens
  misc_feature (893)..(893): n is a, c, g, or t
  misc_feature (915)..(915): n is a, c, g, or t
  misc_feature (917)..(917): n is a, c, g, or t
  misc_feature (1553)..(1553): n is a, c, g, or t
gagatgggactgcaatagaaatccgggcagcccgaagaggcacccagcgctccagccaccagctgggccgcccgggagtccctggctctagaccagccgcgaggaggcgccgcgagagagctggtccctgcccgcggccggaggagggctagagcccctgggccagccccccgagccggctgggcgggcgggcgggtgggagcagacgccgggcactgtcaccacgggtgcgccgagcgcaccgacccgggacacgggcagctggggaccgccagattccaccagccccccttgccccgcaggggtcctcggctcgcgctcctgggtagcagccacccaccggggcggagggagatgtcgcccggggccagccgcggtccccggggaagccaggcgccgctgatcgcgcccctctgctgcgccgcggccgcgctggggatgttgctgtggtcccccgcctgtcaggcgttcaacctggacgtggaaaagctcacagtgtacagcggccccaagggcagctacttcggctacgccgtggacttccacatacccgacgcccgcacagcgagtgtcttggtgggggcgcccaaagccaacaccagccagcccgatatcgtggaagggggagccgtctattactgtccttggcccgcggaggggtctgcgcagtgcaggcagataccgtttgacaccaccaacaacagaaagatcagagttaatggaaccaaagaacctatcgagttcaaatccaatcagtggtttggagcaacagtgaaagctcacaaaggaaaagttgtggcctgtgctcctttatatcactggagaactcttaaaccgacaccagaaaaggaccagttggcacctgctatgtagcaattcagaacttcagcgcntatgccgagttctctccttgcngnaacagcaatgctgatccggaaggccagggttactgccaagcaggatttagtctggatttttataagaatggagaccttattgtgggaggacctgggagtttctactggcaaggacaagtgatcactgccagtgttgcagatatcattgcaaattactcattcaaggatatcctcaggaaactggcaggagaaaagcagacggaagtggctccagcttcctatgatgacagttaccttggatactcagttgctgctggggagtttactggggattctcagcaagaattggttgctggaattccaagaggagcacagaattttggatatgtttccatcattaactctacggatatgacgtttattcagaatttcacgggagaacagatggcatcttattttggatataccgttgtcgtatcagatgttaacagtgatggactggatgatgtcctggttggggcacctctctttatggaacgtgaatttgagagcaaccccagagaagtagggcaaatctacctgtatttgcaagtgagctctctcctcttcagagacccccagatcctcactggcaccgagacgtttgggagattcggtagtgctatggcacacttaggagacctgaaccaagatggntacaatgacattgccatcggagtgccttttgcaggcaaggatcaaagaggcaaagtgctcatttataatgggaacaaagatggcttaaacaccaagccttcccaagttctgcaaggagtgtgggcctcacatgctgtcccttccggatttggctttactttaagaggagattcagacatagacaagaatgattacccagatttgattgtgggtgcatttggaacaggaaaagtcgctgtttacagagcaagaccggttgtgactgtagatgcccagcttctgctgcacccaatgattatcaatcttgaaaataaaacttgccaggttccagactctatgacatctgctgcctgcttttctttaagagtatgtgcatctgtcacaggccagagcattgcaaacacaatagtcttgatggcagaggtgcaattagattccctgaaacagaaaggagctattaaacggacgctcttccttgataaccatcaggctcatcgcgtcttccctcttgtgataaaaaggcagaaatcccaccagtgccaggatttcatcgtttaccttcgagatgaaactgaattccgagataaattatctccaatcaacattagtttgaattacagtttggacgaatccacctttaaagaaggcctggaagtgaaaccaatattgaactactacagagaaaacattgttagtgaacaggctcacattctggtggactgtggagaagacaatctgtgtgttcctgacttgaagctgtcggctagaccagataagcatcaggtaatcattggagatgaaaatcaccttatgctcataataaatgcaagaaatgaaggggaaggagcatatgaagctgaactctttgtaatgataccagaagaggcagattatgttggaatcgaacgcaacaacaagggatttcgaccactgagctgtgagtacaagatggaaaatgtaaccaggatggtggtgtgtgaccttgggaaccctatggtgtctggaacaaatgtaagagagaaccagaaatactgactgatttccttctaactggacttcacagggaacaaatggaaagctctccagttaccactcagcaactcagcacctagcagcaacaacaaattaggcaggaaattgccagagtagtgggatttcacattataacctacacagagtgaatcgtctcaagctaaaaacacagaaagatgcatgctcttctatgctttctctttatacattactcttgcctgtcttttagttacaacaattttatacagactttgtttttactatagatattttctttaaatactttttctttgaattcaaaaagaaatgcaatgtaagttaaagactctaaaaataaccaaattaggacaaagattttagcaatggcaattaaaggaaggacatgacattcaacagtgaccatagaattcccttttcaagggagattcaggtacgtatttgcattttaaagatgctgataagtctttcagttaataaaccttttagcctgatgtttcatacttttgcttgagcatttgaaacttttctcaagttagaatattatgctagaatgatatttttgctcttttatgctataatgttgcgttgatcttgggtattcaaaaatgtgctgaaactacagtaagctcacttcttggggcaaaaataaataaatatttcaatggcaagtacaaaaaatgaca

SEQ ID NO: 95540 - DNA, 1497 bp, Homo sapiens
  misc_feature (893)..(893): n is a, c, g, or t
  misc_feature (915)..(915): n is a, c, g, or t
  misc_feature (917)..(917): n is a, c, g, or t
gagatgggactgcaatagaaatccgggcagcccgaagaggcacccagcgctccagccaccagctgggccgcccgggagtccctggctctagaccagccgcgaggaggcgccgcgagagagctggtccctgcccgcggccggaggagggctagagcccctgggccagccccccgagccggctgggcgggcgggcgggtgggagcagacgccgggcactgtcaccacgggtgcgccgagcgcaccgacccgggacacgggcagctggggaccgccagattccaccagccccccttgccccgcaggggtcctcggctcgcgctcctgggtagcagccacccaccggggcggagggagatgtcgcccggggccagccgcggtccccggggaagccaggcgccgctgatcgcgcccctctgctgcgccgcggccgcgctggggatgttgctgtggtcccccgcctgtcaggcgttcaacctggacgtggaaaagctcacagtgtacagcggccccaagggcagctacttcggctacgccgtggacttccacatacccgacgcccgcacagcgagtgtcttggtgggggcgcccaaagccaacaccagccagcccgatatcgtggaagggggagccgtctattactgtccttggcccgcggaggggtctgcgcagtgcaggcagataccgtttgacaccaccaacaacagaaagatcagagttaatggaaccaaagaacctatcgagttcaaatccaatcagtggtttggagcaacagtgaaagctcacaaaggaaaagttgtggcctgtgctcctttatatcactggagaactcttaaaccgacaccagaaaaggaccagttggcacctgctatgtagcaattcagaacttcagcgcntatgccgagttctctccttgcngnaacagcaatgctgatccggaaggccagggttactgccaagcaggatttagtctggatttttataagaatggagaccttattgtgggaggacctgggagtttctactggcaaggacaagtgatcactgccagtgttgcagatatcattgcaaattactcattcaaggatatcctcaggaaactggcaggagaaaagcagacggaagtggctccagcttcctatgatgacagttaccttggatactcagttgctgctggggagtttactggggattctcagcaagaattggttgctggaattccaagaggagcacagaattttggatatgtttccatcattaactctacggatatgacgtttattcagaatttcacgggagaacaggtagagacattttaatatcaaataaataaaatcactctgggttaccagtagactataatattcatatcagttattcatccatttgacaaatatttaatgagcagctactacgtactggaaactgtcctaggcaccggggatgcaatcatgcatcagacagacagatcccatccagctctcaggcagcagtgaggtg

SEQ ID NO: 95541 - DNA, 3616 bp, Homo sapiens
  misc_feature (893)..(893): n is a, c, g, or t
  misc_feature (915)..(915): n is a, c, g, or t
  misc_feature (917)..(917): n is a, c, g, or t
  misc_feature (1553)..(1553): n is a, c, g, or t
  misc_feature (3574)..(3574): n is a, c, g, or t
  misc_feature (3615)..(3616): n is a, c, g, or t
gagatgggactgcaatagaaatccgggcagcccgaagaggcacccagcgctccagccaccagctgggccgcccgggagtccctggctctagaccagccgcgaggaggcgccgcgagagagctggtccctgcccgcggccggaggagggctagagcccctgggccagccccccgagccggctgggcgggcgggcgggtgggagcagacgccgggcactgtcaccacgggtgcgccgagcgcaccgacccgggacacgggcagctggggaccgccagattccaccagccccccttgccccgcaggggtcctcggctcgcgctcctgggtagcagccacccaccggggcggagggagatgtcgcccggggccagccgcggtccccggggaagccaggcgccgctgatcgcgcccctctgctgcgccgcggccgcgctggggatgttgctgtggtcccccgcctgtcaggcgttcaacctggacgtggaaaagctcacagtgtacagcggccccaagggcagctacttcggctacgccgtggacttccacatacccgacgcccgcacagcgagtgtcttggtgggggcgcccaaagccaacaccagccagcccgatatcgtggaagggggagccgtctattactgtccttggcccgcggaggggtctgcgcagtgcaggcagataccgtttgacaccaccaacaacagaaagatcagagttaatggaaccaaagaacctatcgagttcaaatccaatcagtggtttggagcaacagtgaaagctcacaaaggaaaagttgtggcctgtgctcctttatatcactggagaactcttaaaccgacaccagaaaaggaccagttggcacctgctatgtagcaattcagaacttcagcgcntatgccgagttctctccttgcngnaacagcaatgctgatccggaaggccagggttactgccaagcaggatttagtctggatttttataagaatggagaccttattgtgggaggacctgggagtttctactggcaaggacaagtgatcactgccagtgttgcagatatcattgcaaattactcattcaaggatatcctcaggaaactggcaggagaaaagcagacggaagtggctccagcttcctatgatgacagttaccttggatactcagttgctgctggggagtttactggggattctcagcaagaattggttgctggaattccaagaggagcacagaattttggatatgtttccatcattaactctacggatatgacgtttattcagaatttcacgggagaacagatggcatcttattttggatataccgttgtcgtatcagatgttaacagtgatggactggatgatgtcctggttggggcacctctctttatggaacgtgaatttgagagcaaccccagagaagtagggcaaatctacctgtatttgcaagtgagctctctcctcttcagagacccccagatcctcactggcaccgagacgtttgggagattcggtagtgctatggcacacttaggagacctgaaccaagatggntacaatgacattgccatcggagtgccttttgcaggcaaggatcaaagaggcaaagtgctcatttataatgggaacaaagatggcttaaacaccaagccttcccaagttctgcaaggagtgtgggcctcacatgctgtcccttccggatttggctttactttaagaggagattcagacatagacaagaatgattacccagatttgattgtgggtgcatttggaacaggaaaagtcgctgtttacagagcaagaccggttgtgactgtagatgcccagcttctgctgcacccaatgattatcaatcttgaaaataaaacttgccaggttccagactctatgacatctgctgcctgcttttctttaagagtatgtgcatctgtcacaggccagagcattgcaaacacaatagtcttgatggcagaggtgcaattagattccctgaaacagaaaggagctattaaacggacgctcttccttgataaccatcaggctcatcgcgtcttccctcttgtgataaaaaggcagaaatcccaccagtgccaggatttcatcgtttaccttcgagatgaaactgaattccgagataaattatctccaatcaacattagtttgaattacagtttggacgaatccacctttaaagaaggcctggaagtgaaaccaatattgaactactacagagaaaacattgttagtgaacaggctcacattctggtggactgtggagaagacaatctgtgtgttcctgacttgaagctgtcggctagaccagataagcatcaggtaatcattggagatgaaaatcaccttatgctcataataaatgcaagaaatgaaggggaaggagcatatgaagctgaactctttgtaatgataccagaagaggcagattatgttggaatcgaacgcaacaacaagggatttcgaccactgagctgtgagtacaagatggaaaatgtaaccaggatggtggtgtgtgaccttgggaaccctatggtgtctggaacaaattattccctgggcctccgatttgcagttccacgtcttgagaaaacaaacatgagcattaacttcgatctccaaatcagaagttccaacaaggacaatccagacagcaattttgtgagcctgcaaatcaacatcactgctgtagcgcaggtggaaataagaggagtgtcacaccctccgcagattgttctgcccattcataactgggaaccagaagaggagccccacaaagaggaggaggttggaccattggtggaacatatttatgagctgcacaatattggaccaagtaccatcagtgacaccatcctggaggtgggctggcctttctctgcccgggatgaatttcttctctatattttccatattcaaactctgggacctctgcagtgccaaccaaatcctaatatcaatccacaggatataaagcctgctgcctccccagaggacacccctgagctcagcgcctttttgcgaaactctactattcctcatcttgtcaggaagagggatgtacatgtggtcgaattccacagacagagccctgcaaaaatactgaattgtacaaatatcgagtgtttacaaatctcctgtgcagtgggacgactcgaaggaggagaaagcgcagtcctgaaagtcaggtcacgattatgggcccacaccttcctccagagaaaaaatgatccctatgctcttgcatccctggtgtcctttgaagttaagaagatgccttatacagatcagccagcaaaactcccagaaggaagcatagcaattaagacatcagttatttgggcaactccgaatgtttccttctcaatcccattatgggtaataatactagcaatacttcttggattgttggttctcgccattttaaccttagctttatggaagtgtggattctttgacagagccagacctcctcaggaggacatgaccgacagggaacagctgacaaatgacaagacccctgaggcatgacaagaaaaaaaaagaagaccaaagacctnaaacactggtcctgttcaaagaaaaagaaagaacatgaggnn

SEQ ID NO: 95542 - DNA, 1980 bp, Homo sapiens
  misc_feature (893)..(893): n is a, c, g, or t
  misc_feature (915)..(915): n is a, c, g, or t
  misc_feature (917)..(917): n is a, c, g, or t
  misc_feature (1553)..(1553): n is a, c, g, or t
gagatgggactgcaatagaaatccgggcagcccgaagaggcacccagcgctccagccaccagctgggccgcccgggagtccctggctctagaccagccgcgaggaggcgccgcgagagagctggtccctgcccgcggccggaggagggctagagcccctgggccagccccccgagccggctgggcgggcgggcgggtgggagcagacgccgggcactgtcaccacgggtgcgccgagcgcaccgacccgggacacgggcagctggggaccgccagattccaccagccccccttgccccgcaggggtcctcggctcgcgctcctgggtagcagccacccaccggggcggagggagatgtcgcccggggccagccgcggtccccggggaagccaggcgccgctgatcgcgcccctctgctgcgccgcggccgcgctggggatgttgctgtggtcccccgcctgtcaggcgttcaacctggacgtggaaaagctcacagtgtacagcggccccaagggcagctacttcggctacgccgtggacttccacatacccgacgcccgcacagcgagtgtcttggtgggggcgcccaaagccaacaccagccagcccgatatcgtggaagggggagccgtctattactgtccttggcccgcggaggggtctgcgcagtgcaggcagataccgtttgacaccaccaacaacagaaagatcagagttaatggaaccaaagaacctatcgagttcaaatccaatcagtggtttggagcaacagtgaaagctcacaaaggaaaagttgtggcctgtgctcctttatatcactggagaactcttaaaccgacaccagaaaaggaccagttggcacctgctatgtagcaattcagaacttcagcgcntatgccgagttctctccttgcngnaacagcaatgctgatccggaaggccagggttactgccaagcaggatttagtctggatttttataagaatggagaccttattgtgggaggacctgggagtttctactggcaaggacaagtgatcactgccagtgttgcagatatcattgcaaattactcattcaaggatatcctcaggaaactggcaggagaaaagcagacggaagtggctccagcttcctatgatgacagttaccttggatactcagttgctgctggggagtttactggggattctcagcaagaattggttgctggaattccaagaggagcacagaattttggatatgtttccatcattaactctacggatatgacgtttattcagaatttcacgggagaacagatggcatcttattttggatataccgttgtcgtatcagatgttaacagtgatggactggatgatgtcctggttggggcacctctctttatggaacgtgaatttgagagcaaccccagagaagtagggcaaatctacctgtatttgcaagtgagctctctcctcttcagagacccccagatcctcactggcaccgagacgtttgggagattcggtagtgctatggcacacttaggagacctgaaccaagatggntacaatgacattgccatcggagtgccttttgcaggcaaggatcaaagaggcaaagtgctcatttataatgggaacaaagatggcttaaacaccaagccttcccaagttctgcaaggagtgtgggcctcacatgctgtcccttccggatttggctttactttaagaggagattcagacatagacaagaatgattacccagatttgattgtgggtgcatttggaacaggaaaagtcgctgtttacagagcaagaccggttgtgactgtagatgcccagcttctgctgcacccaatgattatcaatcttgaaaataaaacttgccaggttccagactctatgacatctgctgcctggtgagttagtccggtgcttctcaaactccaatgtgaattcacatcacctgggtgacagagggagactctgtctc

SEQ ID NO: 95543 - DNA, 507 bp, Homo sapiens
gaatacatttccacaagtaagtgtagcaaataaattggtgaattacagagattcaccaaaacatcaattcctctgctttgcagggtggcaaacttgtgacagtggataactgttctcttcctgttatctagacatcagagtttaatgcgaagtcctagtaggacaggacttggtaactcctagaagtgttccaatatgatttagtacatgatttgttaccatagaaagaataaataacatgtttattgtctgaagaggatggatacttttacttttcctgttaaggtatgaaatataagtgccttacaatttccttccttgctataaacagtgaatttgagtgattttactggaatcttcaaaccctgggtattttctcattgaaaattaaatgcataaccttgactgggaaacagagacagcagactagtgacttgaaactaagaccaatcttgagccttcaaagagaggacattacaggcccagtggttcttgctgaggagcctc

SEQ ID NO: 95544 - DNA, 478 bp, Homo sapiens
cactgaagagagggccagggactgccacgagtccagagacactaggagagaaggcaacggacagtcacatgcagttgtcacctggtgagtaacaaagacagccgtgtattacccaatatccccaaaggcagccttaggggcatcctcctcttggtctccattcctgtgcaaccttatagcttgatccatctttccattctacaagtatttattgaattatttatgagccagattctgtgctcaagcctaggaatacaaaggttgaaaacagaacgaaacaaacagaaagcatggctgtttctattaagcagctcatagtagaatgggagagaagttgagaagaaagaaaaacatcatgatataattgttacaaagcaacagttaaaataatatgaggtaatgatactaacagacatatcaggttaatcatgtggtactatgctcaggtctttacagacactacaccagttgctatcag

SEQ ID NO: 95545 - DNA, 590 bp, Homo sapiens
ctcagtgatacaagaaacaaggcaaaggaaaaaagatgggaccttagaagcaatgccctagagtaaaaagcatacattggcactcagtaaccacagagatagaaacaactgactcagcctctccagaaataacagtagatgtagaatttgttcttaaatatatgtttcgttgaaatgaaatgcagtcatcaaatgcgaggaggggtgctagacctgataagtctaggaagaccagtcagcttgatagccagttgttaaactaaaggaccacaaaggtgtgtttagtagttctgatatgggattactatcagtttatacatatgtatagattttcttttaattataaacagccagatagccagcaattaaggtgttttttcatctttgtgaaattcatggacaaattctgactctaaaatgcacagtctacatgaaatctttgatctcaatctgtatatatatatattgtacatgactgctagtaggtatgaaatgcatttcagagttgaaaactcatgcaacataatcatgtgtttgcataaggaatgttaaaattctttctactacaatttattaacaggggaaaagat

SEQ ID NO: 95546 - DNA, 447 bp, Homo sapiens
taattagatgctaaaaattcccttaaaagttaatattgcattttggtagattttataaacctaccaaatcagatctggaaattgaatttaaaagtttaaggaagaactaggttttaaaaattgcaataggtaaaatatgaattaaaaagaacaaactggtctctgaataatttttctgtgtgcaaaaaattgccattaaatgcataaagtacccacattgacaatttgatgagaattggatgtttttattgagaaattcccatatgacagtatatgtgggtcatttctctagattgtccagtttccaagaacagtccttcaatcccttgcttgtgcaagaataacctgcagcagggctggcttcatgggccagcatcccatgcagtctcacagggccctgctcttagaaggacctcacacttgttctaatgctctgctcaaaaaaaa

SEQ ID NO: 95547 - DNA, 331 bp, Homo sapiens
gggtacagaagccctcctggcccctgggatggtccatagataagtatcagaggagtccatgtaccccaggaaaacgtatgcacaattttactaatgtatttgcagtgttttgggggcagggcctatggtttttagcacgtaagagtgtgagaggatcccaggaagattaagaattgctatagtcaaatgcagaaagtacagttttacaaagggccattctgtgtcacctagcaaatgatctctttcatcctgccctcttgctacttcctaatcacgattcattccatttttccatctttttcatttgatatcaatctattagtgaatgctt

SEQ ID NO: 95548 - DNA, 165 bp, Homo sapiens
aaatgaggctaatgtacaattcttcacctagtaacataagggggtggagaggcagagatgggccgggacgggacattctcccaacctctgtgcaacctcaccgggagggccaggacaccaggggaggggtcacttgtcctgaccccagagtcccccttggtccat

SEQ ID NO: 95549 - DNA, 546 bp, Homo sapiens
ggaaacggcatttttaataataatggttcccaaagtgattgtctcctgtgtcacacctctaatttggattgcttaaccttggtgacatggctgtcattggatctattttactatcttcctgaggtttcaccttgtttctcctcttgggtttgttgtttgccatatctcacattgctttctcggtttgttagtaccttcttggaagagtacaagggagctaaattattttaagacatgtcatgactgaaaacgactattctacctttatgccggatagtttgggtgtaggatagtaagatgggatcatttttcttcagaattttgaaggcattgctccattgtcaccttgcttccagtgttgctgtgttgaagttcagagtcattgtaactaaccatttgtgtgtgataattaagaaatatgtacatttacactatatatacatttctggaagctactctggcttcagagttctgaaattttcacattattatttttttctcttaatgttacatattcagtggtggaccctttcagtgcagcaattc

SEQ ID NO: 95550 - DNA, 425 bp, Homo sapiens
cctaacctgagctaatgctaaaatgttttcttggtcttgctttgccttttctgtgcctagttctctcaagtatttctccacaaagcaacctgaaggctggatggaagaacaattaaaatgtttccaagctccctgaccaaatactatgattacaacatctaaagctatgcattttcaacaccaaaaacaaatttttaaaaaaataataagattggcaaaatgttttggtataaaaaagaagcttctgaaagttcttatctgattattactcatgttgactccctacttcaccatgcaagaaacagtgatttttcttttctttttttttttgtttttaaagatccttgaaagcttttgccttgatgaaacagtgattttatattggcatagcactctgtacttactaaagttatatacttgccatc

SEQ ID NO: 95551 - DNA, 743 bp, Homo sapiens
ttcactttttgaaacgaagagagcgcgataggaagtaggaaagggtgggcgaggggccctgggcggctgctttcgctctgcgcgagttgggtctttgtgatataaaattcgccgagcgccgcgagccgtgctttgccaatggcgcgctcggcgcggggcgcgggctccgggttggggcgagccaacgccggggtttctttgtgtttctgcgagagcgactctcccggtccggagtcagataacagcctgggcccgagcctcgccggctttccccggcccttacaggccctgcccaggctccgctagtgccggccgcctgctccctgcctctcccggcttcctctctctttagccggcctctctctctccgccctctccctccgtctctttctccgagcacactgattagacagacgccagacctccgctctctgcttgtctctcactgggggggttccccgccgggctggggctggggcttcggggtttgtgggagagtcgttccggagtggccacaggccgtctggggtggaccctcgtgccttttgcaaaagcgcctcaccctccccccagactcgcccctcccgctccctctcctccaatcaataagaaatatcagctgtttagcagtaaagaagaaagatgccctcagaatgctacatcccgcccacagcgccggggaccccgaggcaaggtggccaattctgggtcctcggcggaccagccccgagcgggcctcggag

SEQ ID NO: 95552 - DNA, 171 bp, Homo sapiens
ctgggatctaatggatgtgtaggaactgaccaggcaaaggagtagtgtctacatgatgggagtagcatgtgcaaaagcccagagctggagaaggcgttcaggggaccatcactggcgtctgagtgctatttcagctggtttacattatgctgcaagtaactgaagacccaa

SEQ ID NO: 95553 - DNA, 453 bp, Homo sapiens
ttttttttttaaagacagagtctcactcagttgcccaggctggaatgcagtggtgcaatctcaacgcactgcaacctccacctcccaggtcaaatgattctcatgcctcagcctcccgagtagctgggattacaggcgtgtatgaccatgcctggctaatttttgtatttttagtagaaagaggtttttaccatgttgaccaggctggtgtcgaactcctaacctcaagggatccacctgcctgcaccttccaaagtggtgggattatggacatgaaccactgcacccttttcaacaatcttaatgatgtcttttgatgaatggatgttcttaattttaataaaatctaatttatcagtcttttcctttaaagcttatgctttttgtgctccacttaaaaaatctttgcctacaccaaggtcataaggttatttttcttatgttatctttaga

SEQ ID NO: 95554 - DNA, 706 bp, Homo sapiens
tatatgggaaggatttattgagactgaacttgcagcaaatttagtggatatgaaacaaaaaaaaatctggtaggagtttttgttattttcttatctctaccaacaagattatatggcttagaaaacacaagttataaaggaatatctctgttacaggtattacagatgtaacacagatgtaagcaacatctagaattattgcaaaactgggtttgacataagtaattctcatttagaatgagaattctagatatttctaaaggtatttgtttaaaacctgaagaaatatcactataacctgcattccaaatattatagcaattctggttgtacttgtgcatgcaagaaaatctctgatacgttgagaaatctgacatatttcctggccattcttggccctgaatttcttgagctgaactaataatatctgttaataactaatctaccttttctctatagtattgacctgcacaaaatgttttctcaatatcttccctctacaaagctctgtataagatagagggaaattggagagagttgtgattgcactgtaagacctgttaacactcagaattagctattcttgttctggcaagcctgttgattattaccagaaaattttcacttgttctgtttctccctggtgttctctctcctctgtctcctctttcaaacattctccataagtggacagaggccataatga

SEQ ID NO: 95555 - DNA, 597 bp, Homo sapiens
acttcagaaagagtgatggcactgctgaggcgcactgagcatcccactgcaggaaacactgaggtgtgcccttagcaacagaaacacccctctcaggcgcccaccctcaattttggaagcctcttgttacatatgtgtgatgaggaatagcttttgaagtaaatccaagatatgtgcatatcgcaagtacaatatctgagtacttaatatatatcaagtttcaagcttggctgttgctgattgatgtttagctctagacttaaagttgctttcaagtgataactgtcttcattttaggcttgggaagatacacatgcaaaatgggaacaagcaacaaaactaatccttagctatccaaaagcccaagtggaagatggccaggtaagtttgtaaagttgccttttgtctattaactgatctaaatatatgtacttcactttggtaatctttcacgagtcactcagtaaaataagcatatagttgtctgaagactgttatttagttgtggtttgtctagacctgtactttgtaatatgatagccactagctacgtgtgactatttaacttaaattttaacataattaaaattaaataca

SEQ ID NO: 95556 - DNA, 156 bp, Homo sapiens
aattctccggcctcagcctcccatgtatatgcacctttactgctgaatattatatattttcttatgctttcatgtgattgattagcattctttttttttttctttttgagacagagtgttgctgtcgcccaggctggagggcagtggtgtgatctc

SEQ ID NO: 95557 - DNA, 1381 bp, Homo sapiens
agggcgatggagggtcaatgagagctcgcggggtgacgccattctgctggggttctggagaggccaaagctggagacggtcccgtttgtggtcagcacggccttttactttctggccgtgactggcaactgcaccaacgtcctcctctccctcccactgcacactcccacttcctcagcgaccgggcccttctccacctcctgccacagcactcgcagcttctcccaagtgctagttaaccgcgggggctcaggcaaatccatggcccgcgtgggtgtgcggtgcggccctctgaggcctctggctcctggtctggcctggccgcgccggctccgggagctgccattccgccctgacgtcgccgcgtacacgtacctggggcggtgcagtcaccgctgcctctgccagttcgtgtgtgggacgccggccatcaccgcatttccgcgtggacgccggcagggtggaacgcctggctttccccggccaccccagccgccctggcgcctctcgcgcgacttggcctcggcccctcgggggcagtgcactgctgcgcatgcggtctcagcgcccggccttcccgcgcggctgccgccctttccacggtgacgccgtctgcactagcgccgcacccgcttcaactgcctgcaaccgccgctgaattccctcatccccacgctgagaggacgagaaaggcgccctggggaaggctctcgggaaagcccgcagccgctggacgcgggaggacatggaggtaggcgggaacactcaccccgcgatttcgtgtggtccgcgaagctttttctcttcaggacaacactgcacaatggcatccattaataatacgatggggaacgggggccgcggcgctcgcctgcagtcccagcgctttggcaggccaaggcgggcagatcgcttgagctcaacagttccagaccagcctgggcaatacagcgagaacccatcgctaccagaaatgtaaaaaattagccgggctagtggcgcctgcctttagtcctagttacttgggaggctgaagcgggaggatcgcttgagaccaggagtttgaggcttcagtgagctctaatcacaccactgcactccagcctgggcaactgagcaaaaccctatctctaaaaaaagaaaaaagcgccgagattgtgccactgcactccagcctggacgacagagcaagactcagtctcaaaacaaaaacaaaaacaaacaaacaaacaaacaaaaagcggcagggatgtgaatgtgaatggagcaaggcgttctctctttcaggggtctcagactttgtatctttgcttgcaggtggactgactgccccatgtccttcaaagttaattgcaaaagagttcattgcaagagatgatgt

SEQ ID NO: 95558 - DNA, 225 bp, Homo sapiens
agtaggaatctgaaatcaaatatagaatggaaaactaatgtagccaaaccatctgagagccaatagtagagacagacattaaatcacagcacttgttcactagcagtttgggtacctacagtatgctatattgaatgataattgttaacagctagaaacttgcttataaaatgtggtgatgtttctttatgatagatgcctgaccagtgtcctcttccctcagta

SEQ ID NO: 95559 - DNA, 255 bp, Homo sapiens
ctccagtctctgcctgtgtcttcacgtagcctttttcaatgtccctctgtgtctatatccaaatctccgtctctttcatgaagacaccattttagctttgcgcaatggcaatattttagccagggctgttcatctgaggcatgattattgctaattgaaaacttttcacaataccctgccatgatgactggaaatacagtcagcattgacaatttttgacagtctctatggagagtgaactgtaaaaaaaaagaa

SEQ ID NO: 95560 - DNA, 395 bp, Homo sapiens
agggctgctcaggtaaaattcaacattgtcaccgtgcttaacactttatctgatattttattcttcataatgaccctgaaatgtaatgacttttataagccacacctggtaaatgtgaaactgaaaactagaaatgctgagaaacctctgtgttcacattgctgataagatgagggcactgtatgatgacaccccttcagaacccatagcaagtgggacatcaggaggtgttatgggactaatggcaaagaagacaactatgccgctttcgttgtttattatttatatcatccagaaagtccaaaatacatactcagtccatctattagttaggccttttcttgttgcgaataccgactatgactagcttgaaggattttttctttaaaaaaagg

SEQ ID NO: 95561 - DNA, 397 bp, Homo sapiens
gttaggatcgctgggcaggttaattagtgtcgctagcagcccgagtgaggctctgacagacttggatgtttagaccgtctgctgtaccgctaaattaaatgagcacagagaacgtaagacatcagggaacccaagctaatgctcttggtggggcagccccaaagcagaatgttagcaagaaccaaagtgagagacccaaaagccgtacttcagaccctgggcagagatgccctgggcacagcaaacagctaagatgtttgttgctggttaaggcagcctctagtcaggcctggtggggaacagcctatttgtccccagtttttttcagacacctctgcacacgaggtgagaaaacctgtgggcaccagcacttttggacacaaaggacagccttcta

SEQ ID NO: 95562 - DNA, 828 bp, Homo sapiens
caaggaacccagccctcttctccttccttcagggaaaggctggaaaccatgtctggcaggggcaggggttgggtgcccactcaggtaaaggcacgatgtcctgctggtttctgcctctcctgtactcctgcatggagggcatctcgaaacccaagctggaaggacagggcactccagagacctcctgtgagtgtgggccagcacggcctgggctcaaaccccatcctgtcatcccatattgcatgtccacaggcaccgccccaccctgttccatgttccacaggactggagagagatggcagtcatgttctggcagggacatggcacaagcatgcggctgatggcatctcacaggaccccaggctccggagggcccatgcccaggagagccccataagggctctgtgcctaaaagggtgcatgcccaggtgggcccatgcccaggaaggtccatgcccaggatggtccatgagcaggagggcctcattcccaggagggtcccgtgcccaggagggctctatgcccaaaagggtcccatgtccaggagggtccatacgcaagggtgtccatgcctggttgggggggggtctatgtccaggagggtcccatgcctggaagggtccatgctcaggagggttcatgcccaggagagtttatgccctggagggccccatgcccgggagagtcacgtgcacagagggccctgtgctcaggaggatacatgtccaggagtgtccctgtccaggaggctccatgcccaggaggctccatgtcaagaaagattcatgcctaggagggttcatgcccaggagtgtccctgcctaggaa

SEQ ID NO: 95563 - DNA, 440 bp, Homo sapiens
tccctttatgtagcaggtaaacagactgcaggaaaatgtattcagaatgctgtagggtggtgatttcagtcattgtttaactccttttccttctgggtggaactatttttcctggggcctggcaagtatttagcacttgttttgctaacatttagtttgcacagctaaaccaagatttttgcagaatctcagtgggcgggaattacattccctgtagcaatcaaatcatggagacatacgatgtctattcccgtgctccacacctgcttggttttgagatgggcagagtatctcccaacattttcaagctttcaactcagcttgaacatttcaacaaacttcagggaggcagagaggaactggccatattctatggaagcctcagtttgccttctgggaaataccatgagctctcccccgggtgcctcctcctgcttacg

SEQ ID NO: 95564 - DNA, 385 bp, Homo sapiens
gctgagattggcagaaagaacacagaattggaagtcagaagatttgggttttcattcctattagatatcgtataaccttaaataagtcattgatttctgtccagaaatgtttcacatctgtaaagttaagataataccatgccatcactggttgggaagataaaatgagaacctatatggaagtctttgggatagctaaaagtatcttataaatcttaggaactgtgttagtataattcaataggagaattttcaaagatttggagaattgggtagaggctttgactgaacctgagaataagaggatggaaaaaaaatgagactgacttgtgaaataaagtatgaccttgtcctgtggttggaatgtgaggcttttcctatagcc

SEQ ID NO: 95565 - DNA, 940 bp, Homo sapiens
ttctcgccctgtggcgcctctgggccccacggcttgtcggcctccggcgcgcagggctccccagcatcctgggcgccggcccgctgcctgcacaaagtcaactcagacaggatgaacttcggttgccttgtctggctgggctgccaggcggggcagctgacctgctgatggggtgactttcttcatcttcttgcccacaggacagcgggctgggaagccagggccgccgggacctggggctggaaaccacatctgcccacagccgcagcctcctgcacctgtcatcctggcggcgccctgacgtcggagaagcagcaggcgcggagctcctgcagcgggcaccgctgcagcaacccgacccggcgcaggcggcagtggaaggcggcctgctagcacggctcccgcggccccaggaccaggggtgcggccagcaccgccctcactccccgcgtctcgtggatattgccctccctggaggcggctggacctaagcgaggctcgcagcgatcggccccgcgaagactcgcatgcagggctcaggatcccgcattctggcgccgcggcaccgcacctttcagcagccctgctcctcttcttgttggtaaacttttgtcactctgccatgaaaagcatccaggcgtccttgatttcgacattgcgtgcacgctcagccgagctcatcagacgggcggttgtccccagagcccgcgggtagcttgttcccgggcggcggctcctgctggatgcagctccttgtgggcctaccaggcttggtggagccacagcagacctgtggagaggaagagtaaggcgggctctgcagggcagtgggccgggaccatgagagaggcgggtcagtctgggctccaagctcagcctctcggattccccgggacccacggcttataatgcgcttaaatcccacgcctcgcccgagaga

SEQ ID NO: 95566 - DNA, 727 bp, Homo sapiens
ctcctgggctcccgcgggacgtcccggaatcccaggagtgcatcccttcccgcctgagggcctgcctggccctgactcccgacccgctcctcctccgaagagagatcggggccgctgacaggggccctccgcagccaccggggatgggactggggggtcggttcctgtcccggtgcagccgccgccgggtagaccgcctggcttggccgcagccaggcgacatgtagccccggttctgccaggctgggagcgccagccatcttgggagttgccaggcagctgtcgccagcaggtagagggcgcctgcagcttgggcgcccaggtggtggagcacggcctaggcggcctctggatcgcgagtgcacctggcctgagagcccgccaggccctgcccctgctcggctcctcgtctgctgaagctcgggacctctagccagtggccctctgcagccacggggaatggggctgagagccggttcccgctgcagggcagaccacctagctcagccgcagccacagggacatctggccccggttctgagatgtggggagtgctggcgggctcgggggttgcctggaggctgctgcctgcacacagaaggcggatgcagcttggatgcccaggcgggctggaggtgcatggcctggtcggcctcgggatcgccagcgcgcccagcctgagggcccccaggccgtgcctcccgcccattcctccaccggaggggga

SEQ ID NO: 95567 - DNA, 1032 bp, Homo sapiens
ctcctgggctcccgcgggacgtcccggaatcccaggagtgcatcccttcccgcctgagggcctgcctggccctgactcccgacccgctcctcctccgaagagagatcggggccgctgacaggggccctccgcagccaccggggatgggactggggggtcggttcctgtcccggtgcagccgccgccgggtagaccgcctggcttggccgcagccaggcgacatgtagccccggttctgccaggctgggagcgccagccatcttgggagttgccaggcagctgtcgccagcaggacagcgggctgggaagccagggccgccgggacctggggctggaaaccacatctgcccacagccgcagcctcctgcacctgtcatcctggcggcgccctgacgtcggagaagcagcaggcgcggagctcctgcagcgggcaccgctgcagcaacccgacccggcgcaggcggcagtggaaggcggcctgctagcacggctcccgcggccccaggaccaggggtgcggccagcaccgccctcactccccgcgtctcgtggatattgccctccctggaggcggctggacctaagcgaggctcgcagcgatcggccccgcgaagactcgcatgcagggctcaggatcccgcattctggcgccgcggcaccgcacctttcagcagccctgctcctcttcttgttggtaaacttttgtcactctgccatgaaaagcatccaggcgtccttgatttcgacattgcgtgcacgctcagccgagctcatcagacgggcggttgtccccagagcccgcgggtagcttgttcccgggcggcggctcctgctggatgcagctccttgtgggcctaccaggcttggtggagccacagcagacctgtggagaggaagagtaaggcgggctctgcagggcagtgggccgggaccatgagagaggcgggtcagtctgggctccaagctcagcctctcggattccccgggacccacggcttataatgcgcttaaatcccacgcctcgcccgagaga

SEQ ID NO: 95568 - DNA, 1375 bp, Homo sapiens
ctcctgggctcccgcgggacgtcccggaatcccaggagtgcatcccttcccgcctgagggcctgcctggccctgactcccgacccgctcctcctccgaagagagatcggggccgctgacaggggccctccgcagccaccggggatgggactggggggtcggttcctgtcccggtgcagccgccgccgggtagaccgcctggcttggccgcagccaggcgacatgtagccccggttctgccaggctgggagcgccagccatcttgggagttgccaggcagctgtcgccagcaggtagagggcgcctgcagcttgggcgcccaggtggtggagcacggcctaggcggcctctggatcgcgagtgcacctggcctgagagcccgccaggccctgcccctgctcggctcctcgtctgctgaagctcgggacctctagccagtggccctctgcagccacggggaatggggctgagagccggttcccgctgcagggcagaccacctagctcagccgcagccacagggacatctggccccggttctgagatgtggggagtgctggcgggctcgggggttgcctggaggctgctgcctgcacacagaaggcggatgcagcttggatgcccaggcgggctggaggacagcgggctgggaagccagggccgccgggacctggggctggaaaccacatctgcccacagccgcagcctcctgcacctgtcatcctggcggcgccctgacgtcggagaagcagcaggcgcggagctcctgcagcgggcaccgctgcagcaacccgacccggcgcaggcggcagtggaaggcggcctgctagcacggctcccgcggccccaggaccaggggtgcggccagcaccgccctcactccccgcgtctcgtggatattgccctccctggaggcggctggacctaagcgaggctcgcagcgatcggccccgcgaagactcgcatgcagggctcaggatcccgcattctggcgccgcggcaccgcacctttcagcagccctgctcctcttcttgttggtaaacttttgtcactctgccatgaaaagcatccaggcgtccttgatttcgacattgcgtgcacgctcagccgagctcatcagacgggcggttgtccccagagcccgcgggtagcttgttcccgggcggcggctcctgctggatgcagctccttgtgggcctaccaggcttggtggagccacagcagacctgtggagaggaagagtaaggcgggctctgcagggcagtgggccgggaccatgagagaggcgggtcagtctgggctccaagctcagcctctcggattccccgggacccacggcttataatgcgcttaaatcccacgcctcgcccgagaga

SEQ ID NO: 95569 - DNA, 520 bp, Homo sapiens
gacactgaccatctgggggcagttgttttgcttttgcttatttttctataggcattttgttctagatcagtctttttagaaatggatattgttatctgttgatagggaaaatgggcgagagaatagtccaacatctgtacacatatagcaccaccactgaaaaacagcaaaacaaaaccaagagcttaatgattatgccctatagacagttgaaacagcaatagtatctcttaatttaaaggatggcatcttgacctgatatgtgctgggaaaacaatcctcctcctgacttaagtggttctccattatatatccaggaattatatatccaggaatatttggtacagatgctggcagctgtattgaccagagaggcataacagggaagctgcagcagcccccagaagataggagattgggaggtggtgcttacaaagaagccaccctttgcccttaatcaatcgtactagatggggatttgtattttgcaaacatcaatgagatcaatgagatcttgaat

SEQ ID NO: 95570 - DNA, 768 bp, Homo sapiens
ctgccttgcgcccccaggctggcgttggaacttctttagagccagcgctgcggagccccagcaccaggaacgtagagaggctgtggaggcatggggcaaattgtgcccgcagcctggggcctagagctgcatctgtgcacggggcctccaggagcccggctcagtggacgaaatctggcatgctcggacgtcaccccacaggcctcacgcctcagaggcaccccgaaagagacggggatctcactatgttggccagtttggtctttgaactcctggcttcaaaggatcctctcacctaggcctcccaaagtgctgggattacaggagtgagccaccttgctggtcgcgcaccccattttttaaggaaacctgtacggaaggtggattggaagtctcactttaggagcctggctcagaagttccgcaacttcaactggtgtcatgtgacgtgcttggcagtcaccacccccatccttacagcaaagaatagcagggcagcctttcatgggcccatcagagaactaaggctgccagacaaactggcaccctgctctgaagagacaggcacatccagggagagacagcacctgagagctgctcacccagagcagaaactcctggataaactggctttagcagaaaaattagacaacatgcaagaccagataggtgatatcagcagaaagatggaaacaataataaaaaaaaaatgctagaagtcaaaaacacaatagaaataaagaatgctcattagttgactagacagaa

SEQ ID NO: 95571 - DNA, 512 bp, Homo sapiens
ctgccttgcgcccccaggctggcgttggaacttctttagagccagcgctgcggagccccagcaccaggaacgtagagaggctgtggaggcatggggcaaattgtgcccgcagcctggggcctagagctgcatctgtgcacggggcctccaggagcccggctcagtggacgaaatctggcatgctcggacgtcaccccacaggcctcacgcctcagaggcaccccgaaagagatggggtttcaccatgttgaccaggctggtctcaaactcctgacctcttgatccacccacctcggcctcccaaagtgctgcgattataggcatgagccaccgcgcccgcctgagatctgtttttctttaaagtgtctggcacctacccacaccctcactctctctctctcttgctcctgcttttaccgtgtgaaatgcctgctcccactttgccttccgccatgagtaaaagttccctgaggcccccaagaagctgagcagatgctggtgccatgctggta

SEQ ID NO: 95572 - DNA, 492 bp, Homo sapiens
tgacggttcaagttactgatgtatatcataacttaacaagggttcttgagctgggaatgcacatttaggcattatcgccgagcttgctgcatctccactccttcctcaactaagcatcagaggccacagaccacaccttgggaaactgggcctccgtctccctcccctctcttggagacttacaaaagcattaatacagcagacactccaaaaaagtcttgaaagaagctgttgaacttcatgttcaggccagcctatggtttcccaaatttaactggctatggaacctccccttcggtttcttgcactcattaacatcttgaggaacttagggttccatgaacagactttggaacatgctgctttgggagagattcctagaattaggattactgagtccaaaggtgtgtactttttgatggctttgaatccataatactaatttgatggaaatccagctttaacagacacggatgatttacaaatccaaca

SEQ ID NO: 95573 - DNA, 750 bp, Homo sapiens
ggaggccgaggtgggtggatcacttgaggtcaggagttcaagaccaatgtggtaaaccccgtctctactaaaaatacaaaaattagccaggcatggtggcaggcacttgtaatcccagctactcgggaggctgaggctggagaatcgcttgaacctgggaggtggaggttacaatgagccaagatcgcactgttgcaactccagcctgggtgacgagtgaaaccccatctcgaaaaaaacccaaaaaaacaaaaaaggaagtctcttaaccaatggccccttttccctaagttgcctagcactgaatctccagtccaccatacttggagcatgttcaacatgtagttatcaaggcagtgtgtttccttatttttatagatataaaggtttagatgaaaaagttctaccattttgcaacagtaatccaaataaaagggttatatggtcaaacagatcacgggcaagtacatagtatggttgtagatttttggagggcatatattcatatataggcatattttcagccaattcagcttaattcaaacataacttctgtgtaaaatctccatgcagtgttgtggctataaagatgatgaaagatagtctatgttgccaagattcttacatgtcattttcctaaatagttgttatctttggcttatttgtctgattattgaattaagaaggactgatttgttccagaatgcattgaataaactgtcttttgaggtgaaattttggcattgataa

SEQ ID NO: 95574 - DNA, 584 bp, Homo sapiens
  misc_feature (1)..(1): n is a, c, g, or t
ncactgctaacatttttatttataaaaatatcggccagatgcggtggcttgcacctgtattcccagtactttgggaggctgaggcaggtggatcacgaggtcaggagatcgagaccatccgggctaacacagtgaaaccccatctctactaaaaatacaaaaaattagcatggtggcaggcgcctgtagtcccagctactcaggaggctgaggcaggagaatggtgtgaacccgggaggcggagcttgcagtgagctgagattgcaccactgcactctggcctgggtgacagagcgaaactccgtctaaaaaaaaaaaatcacaccgtgcctgctgtttgaatctgcttttttcatgtaacccaactgttattgatagcacaccatgttatatcattgttttgaagctgctttctattctatttcatattactagttgctacaagattgcacagcatagaactagactattgggtaacgcaggaaattggaaactacctaaatgtttaatgtaattttctatatccaatggtatagttgtctgctgtgcaatgttgtagcactagccatgtggactacctaaat

SEQ ID NO: 95575 - DNA, 286 bp, Homo sapiens
tccattgtccaaaagtccaacccactcggctcattgaggagggccttgtgtagattttgaagtacacactagttcatcatctgtgtggtatgccctttcaaaggactggaagacagtcaaaattaaaattagaaccctactaaccagagtttattttgttattatttcttttctgaaacttcttggggacttgtagctcagagctgtgttacaacccccattaccacacccagagatatgtggcctgggagttagtagagtcaggtgcctttatgccatgttttgc

SEQ ID NO: 95576 - DNA, 865 bp, Homo sapiens
cttgagctgaaaaattcactacaaaaattacataatataattggaagtattaacagcagaatagaccaagctgaggaaagaatctgagagctcaaagagcaattctttcaattaacacagtcagacaaaaatacagaaaagagaattgagaaagatgaagagcagagagtgggccgagacctccaattagaagtagctatggtgcatggcactcataaagaggaagaaaagcagtgagtaaatacagcaccttcaactgaaatatccaggttttcgcactgggactgatcagggaaataaccaatccacagaaaacagagaaaagtagggcaggatgatagcccacctggaagtgacgcaaagccaagggaacccccaccccagccaaggaagtggtaagtgaatgtgccaccctgggaaaccacatttctcccatggatctttgcaaccctcagatcaggagatcccctcataaacccactccaccaggaccttgggtcagatacacagagctgtgtggagtctcagcagggcagccactcaggtatgcacagagacccaggagatttacataccccagccacaggatccctggcaaaggtgactacaactcagtcaaggcgggaggtccatacatacccctaggaagggggccgaatccagggagctgaacagcgtccatctgtgggccccatttccaaggcacctcacaaaataagacccactggcttggaacttcagccagccaccagcaacagggtagtgcctgcctgagatggaatggagctgccagggaaaggggtgggctgtcacctttgttatttggacaactcagctgttcaagtctgtgggctttggagagtcc

SEQ ID NO: 95577 - DNA, 377 bp, Homo sapiens
tataggaagtaaggatggaagaggccaaaaaatgtaattccatggctcatgttttgcctgaatcctgtcttttcctctctccactttttggttaattagcaatggttcctataaaggcacagagctggggataacggcagccgggagctggggatgaaagcagtcaatagattcttgtttggtgggaagaatcttttaaggaaaaaagttggaaactagagagtatgagttccttaaggtagaaggctccaagttgattcaagaagataaagaagagagaaaaatgcaaaggaagataagaaactccaccacataggtagtgtgtaatcaacaagaggctgtggtttcctctctttcaaagatacatgggcagcgag

SEQ ID NO: 95578 - DNA, 212 bp, Homo sapiens
ctgtgatgccatgtggctctactgaatccaagccttcaagacttattatcagcacatgtcgtgtcagcagaactagaagtccggccacattaactgtgccttgcgttaccaggcgagacagatgactgcctaagatttctgttccatggtacatcatggcctggttttgagattcacaaatgcacattttgaatgaccattcctcttcccct

SEQ ID NO: 95579 - DNA, 640 bp, Homo sapiens
tttcctctttattgcttcacccttattttcagaataccatggttttagagacttacttaataaaattattttattaattaaattaatgagtagatatatatgtcaaaaatccagctcccaattttatattagactatactggcagtatttacagtgtattaggttcataatgctataagagaatgtgaatttatttttgattcacaaaataaattatatgagcttttaatactaaccataagttttatacagtacatatttgaaaatcagtcatccatatgtaaaataaatacgaagaacaattaactacaatattccactagctgaaatagccagtgccccagacacgtggataaaatgatatttgtacttgtgaaatagtatctttcaaattgcagtttgcccatattggaacaaaaactaaatcattttgacctgcagcctcacatttctcttatgttttgtaataatataactttcttctcaacatgcatagtttttcagaaattaatctttttgctcttgtgcaagttgctgtgtccctagattttcgctgcccccaacaaacaatccatcagtttttctatagtcagatgagcaaagtttcaagggattatatgtaactatcataatctctttg

SEQ ID NO: 95580 - DNA, 2344 bp, Homo sapiens
gcagtggcgcgatcttggctcactgcaagctctacctcctgggttcacaccattctcctgcctcagcctcccaagtagctgggactacaggcgcctgccaccatgcctggctaatttttagtagagacggggtttcgcagtgttagccaggaaggtctcaatctcctgacctcctgatccgcccgcctcggcctcccaaagtgctgggattacaggcgtgagccaccgcgcccagttgtgcatttctggtttctaagaatcaaaccacttggctgtttttaggagttacttcccatgttataaagctgaggaagctttttttttttttttttgagacagagtctctgtcacccaggctggagtgcagtggtgcaatctcagctcccgggttcaagcaattctcctgcctcagccttctgagtagctaagattacaggtgtgcgccaacacgtctggcttatttttttgtatttttagtagagatggagtttcaccatgttggtcaggtgggtctcaaactcctgacctcaagtgatccgcccatctcctcccaaagtgctggattgcaggcatgagcgcctagccaggaagctatcttttcttgagttatgaaactttgcaacagttgttcaaattggtgtttgtccttcctatagctttcatattttcaaattaattctgtatggctatataatttatgttttaaaaggcaattctcttgactttggaaatatggaagtctctcctttaacctattcttgttcccattcccagtctcatttgaaatcattccttttattgttagtgtgtgtatttttgttggtgtgcttttaatgcatccaagtatgcatcattttggataaaaaatacatccaaattaagatgttttaacacataggacaaacttgtgcactttttatgccaaaaaaaaaaaaaattgggttttccttcatgggatttctagaaacactgcctacactttatgaaaactacatagtattcacctgtgacaggtagagtttatcactattaattttatgaggctatttattactttccagtgcatccacttagaacaagctaagagtaaggctgctaactttaattccttgcctgattttattgtacagtgtgcacaagcacaatggtatgcttgtatatagaaactaaaaatactatgaagtacataagttccctatggcttatggagagttatttattaattaactttatggtagggctagtatgaatacctttttaacaattgtgtgctattacaacaatgaagattcaaatgactccgctttgaaggatgttttctctatatggtaaaatatatatgaagaagtcttgattacgtgaagatcacttgactcagaatacttcaatgtattttgttcacattaccactaagcatattatcagtaaactattaactgactgcacattatgtaatacgttgtactttttgttgaattcaccgaagttcttccatttatatactatttttaatggcattccggctttaacattctgtgagtcttacaaatttgactcttgaatggcaaaataatgttagtatgtagaaggttaactttcatttataatataagtggtgcaggggttcaaccattttaagtaaaaatatttttacacactacctctctctctttttttttttaaagttttaacatcagaacttttgggggaaaaactacttcagggcttgactttttgtacaaattttaactgtaaaatacagatttatcttgtacgcattcatggaaatggaaatcaaagctgctattgctttttattttaattatcctgttaagggtatctatcaatggtattttcaagtagatctctgtttcttaaattattggtgaaataattgattactagatatatggtaaaaccaatagatcctggttatacgataaaatatcagctcatgggtaggctgaatcaattatttcaaggtgcaccttattaacaaaagtatcagtggatccaacataaaattttatagtactaaatgtcaagcctaactgtgaattttgttctgtatcttaagtaaatttatgataatgttctcgagctatcaacaaaatatatgtacttttgtgagctatgaattttctaattaaattttacatgctataacatgatttttacatgaatgatactttgtttataactatcaaatgtcagtattttactacaattttattataaagtgtacattatcactaaatgaacttcgattttaaaaatcaaattagctttagttgtatattattttttacaaataaagatagacttgtataaaggctactttctt

SEQ ID NO: 95581 - DNA, 1112 bp, Homo sapiens
aggaccctcacactatcgcctctttttaacaattgtgtgctattacaacaatgaagattcaaatgactccgctttgaaggatgttttctctatatggtaaaatatatatgaagaagtcttgattacgtgaagatcacttgactcagaatacttcaatgtattttgttcacattaccactaagcatattatcagtaaactattaactgactgcacattatgtaatacgttgtactttttgttgaattcaccgaagttcttccatttatatactatttttaatggcattccggctttaacattctgtgagtcttacaaatttgactcttgaatggcaaaataatgttagtatgtagaaggttaactttcatttataatataagtggtgcaggggttcaaccattttaagtaaaaatatttttacacactacctctctctctttttttttttaaagttttaacatcagaacttttgggggaaaaactacttcagggcttgactttttgtacaaattttaactgtaaaatacagatttatcttgtacgcattcatggaaatggaaatcaaagctgctattgctttttattttaattatcctgttaagggtatctatcaatggtattttcaagtagatctctgtttcttaaattattggtgaaataattgattactagatatatggtaaaaccaatagatcctggttatacgataaaatatcagctcatgggtaggctgaatcaattatttcaaggtgcaccttattaacaaaagtatcagtggatccaacataaaattttatagtactaaatgtcaagcctaactgtgaattttgttctgtatcttaagtaaatttatgataatgttctcgagctatcaacaaaatatatgtacttttgtgagctatgaattttctaattaaattttacatgctataacatgatttttacatgaatgatactttgtttataactatcaaatgtcagtattttactacaattttattataaagtgtacattatcactaaatgaacttcgattttaaaaatcaaattagctttagttgtatattattttttacaaataaagatagacttgtataaaggctactttctt

SEQ ID NO: 95582 - DNA, 683 bp, Homo sapiens
gaacctgaactattggaacttttctgaacacagtgtattcttttatgctctatgtgtttgtgtttggaggtagtatgtatatacatattataaatagatgattacgtagttgatcctttctaaggtaaatgtattactatactgttattttataaaaagaggtaatgaagctaagaaaagtagtagtttatccaaagtaatacttagttcccgatttctagataagaacagcttataagagcaactacagaaagtagttctaaaaaacaaatgagttaagaatcactgccgtaaggataacagaggtcagggtcctgggcaacagctagcatgtgccttcaatgtagtaagcagtcagtaaatatttattaagaatgatacttggagctcttctgattaacccttgaacctaaaaattgactacagtaattctacagcattggtattttcaccgaagaattctttcttaggtaaaatattatacagtcatgtgttgcttgacaaaggagatacattctgagaaatatgtcaccaggtgatttcatcgtcacgtgaccatcatagagtgtacttacataagcctagatggcatagcctactactgcacctactacacacttcccttagtagaccttggtgccagaggaatgacacagtgatgatttcccttggttttctttttg

SEQ ID NO: 95583 - DNA, 450 bp, Homo sapiens
ccagcctgggtgacagagcgagactccgtctcaaaaaaaaaaaaccaaagaacaagtggggactgaacttcccaacctcctccttgctgtcttccctctctgctcagagctcctggcatgcgtcatcttacccttggtcatgtcttcccatctctgtactcctggcatgtttgacagtctgagggtcctcaaacttttccactccccttcctagccccaaactgtagttactgcctgacttcttgcctcaccacattcccccggccaaactacatgccccgtgaccacattccacacccttcatgcctcacatcattgtcctccagcacccactctccacatagacccacattacctctgttattatataggaaagaatgtgaaatacagtggaaagagtatggattttggagtcaagcctggggtgaaattccagctctgacatctacc

SEQ ID NO: 95584 - DNA, 616 bp, Homo sapiens
aaatttaatcatgttgaatctgagatgattggaaattatgcagttcggtttagactgtatggtgtacatcgcatgaaaaaagaaaagattgtgggggaaaagattttttatttaacaaaattgaatcttcaagggaaaatgtcattgcctgtgatattggaaccttcttacaatcattctgtgagtatctcatcaaatggcctgaatacagtttatgttcatggtttatagtatgcacaattttaaaaatctttaatcaagccaacaagtttgtcagtctatttttttacatagtaatcatgcctttacaaaaatatctaagccctggatagatagatatactttttcttacctaaaaaagttgcccttgaagataatttgtgatttatgtcttttattttatccttcacagagttttggcccagggttttacatgttttttgttgttgttgttgaacatttattaaatgtttgattatgaagtcatccaaactccttatagaatttattattttttttccaggttaaaactaggcaatacattaagaagtatcagccccatatgttatttgctgtatggcagaaaggatttgcccttacagaatatatataccgc

SEQ ID NO: 95585 - DNA, 492 bp, Homo sapiens
tctcatgagagactgcgcatgatgcttgatctgtgagtatgtaaccatgagatgaatgtaacttacatttacagtatgagagctaaaacaagaaggcagagcatcaccttgtttgacctcagcttagaatgaatgctttgggtaactgaaatctctcaccagtctatgcatgtgcatgtctgtgaatacctgcaaaagcgcttcaagtattgacttgggggttgcaaggaagttttagcaattaggcaaattcataaatatggaatccataaataatgaggactgattatagttgttttcttatccctaacactagttttaagccataaagctagttttaaaatatttaacagctttatctccctgaaattataatacagacattactgatttctttttttgctaattaacatcactttgtgtgatttaacaaaaaagaaataaagtgcaggttaatagaagtaactttggtgaataatactgcaattcaaa

SEQ ID NO: 95586 - DNA, 233 bp, Homo sapiens
ctacttattatctgtgatgctcaggcctcagttacctcatctgtgaaatgggagcaatcataactgcctaaaaatgtgttgtgagattcagaaataaaatgtcaaattaacaccgctacctgacccctaagagagtcaccgtataaatggcagcacaattatcatcttccgacaaggcagggtaagggctgcaagatgtgaggcagattctcctgaccattcttgcctctgca

SEQ ID NO: 95587 - DNA, 269 bp, Homo sapiens
tattactgtgtgaccttgatgactacagcctcttttaacagtttctcctaatgaaatggtaagacaataagatctactatggccctttggggaatacatttattttatcatctctttttctgttttccttatgtgtcaagactaaggtcaaggaaacaaaaaattgatggacttccaaaacacaccctttgggggtatattttccgagcaaagcaatggggttaggataaatgtagcatctctctgttctttccacagacactgagttg

SEQ ID NO: 95588 - DNA, 516 bp, Homo sapiens
tagaaatagagattctgctaccagtatagagtttacaaaagaccaggaaataaaataatacagcccttcctttctctgtcttcaacagacatgtttctcaactctcctcattaattcctgctaattgattacacttagatttgctttcgtataacttctcataattagatttggttgctggtatgttagagttaggaaactgaggccaagttgtaaatgtctttaacccccagactgcttttggaacttgtgacagggctcttctaacttaacccatcctgacctggtcttgaccttagcattactaataaggtacttacctcatcatttcgtttctcacttactgaacgtgactataaatcctcctgttactcaagatcttggttttccacacttttgcaaaccttcttttgtagttccctgggagcccagttgaaggggagtaaatctttaattctgataaggccctggagccacagacttctgtgtagccacatctagacaactgaatttcac

SEQ ID NO: 95589 - DNA, 223 bp, Homo sapiens
ctttcataactttgaccttctgggggtttcatgcaccgttcttcctaagctgggctaacatttcactgtggtctgtgtttgctgtgggaagaagccaccgatgttgaaatgtaagggcctgctgtttatgcactgttcattcagggctgcacgtgcctatgtgacttgaattctttattgatggctgagctgcaggattgagcatgacttcttgcctggggtc

SEQ ID NO: 95590 - DNA, 1763 bp, Homo sapiens
gaaataattatccttggctacaaatatcaataacaaaggtcacaccagtccgaggttggacaggcagttgctaggcagatgtctttgcagaagtaatttttgtgtgaggttgcagcagcctatgtgcaaggttgtaatttttgcagaatcttttgtgatcatttttggtattaggcatacaagcatgagaatcccctcttcatggcctccccagctctatttgtcatggtttgtttttttaaaacactagtgactctatttgaattctaacaactttcacattcccaacacaaatgatagacatttaagggattaatatgctaattaccctgatcattacacattgtatacatgtatcaaaataacacactgtaccccataaatacatacaattatgtgtcaattaaagatcattatttttaaaaataggaccagaaaaaaagatgcagaccctctagtaaggagatgggatcaggagtgattccatggttaatttaacccacataaacaactaatcgtaagtatggtatgagcgtttatgtaaagactgtgacaacaggaaatgtctgtctttgaacccaaggttatctaaccagcacaccaatggtgaaagattaactttgtcagaaaccaggaaccatgaagcagaggtcactgtttccaacctgtgtgttttccacggtaattggcagcctccccaagggaaattaaaacatatgtccacacagaaatttgaatgcaaatgttcatagcagcattactcataatagcccaaagctgaaacagccccaatgttccacagtggatgaatcgatgaacaaaatatggcgcatccacagaatggaatacaaagaaagaaagcgtggacacatgctgcaacatggatgaaccttgaaaatattgtgccaggggaaagaaaccagagacaaagagccacatgttgtaggattccatgtatatgaaaggtcctaataagcaaactcataaagacaaaaagcagattggtggtcacttagggctagggtgaggagtgacggttagtgggcactgagtttctccggggggaactgaattagatggtggtgattgcacaattctgtgaatagactaaaaaccactggactgtaagagggtgaattttttggtatatgaattacatctcaataaagctgttacttaaaacgtggaaaaaataataagcagtcactagctattctcaataaaacagaaaccacataggtaagaccaatattgtcacattttggttttggctgataatggggcaagtgagcatagtcaccgttgccagaggatttaccatttacaaataaaagtttctgtggagtgacaaccttttactgtgtgccaggtactgtgctaagcactttgtatataccgattcatgtaatccttgtgacagccccgtgatgccccatttttagatggggagattgaggttaggagagttgaataacttgcccatagctgcacagcttccaagttgcagagacaggattttcaccgagtcttattacaaactgcctcatattgtgtggactggaaattctatgttgaggttaatttattcatttgttgtttagttcttttcatcattgttgagttaccaatggcagttccagaggatttatcatttaccccaaagctactgcaaatctaagagaaaacaatgttcttgctgctaaagtttaatgtacaaaaaggtaaaatcatgactgtcttgcaaataaaacatgaacatgtat

SEQ ID NO: 95591 - DNA, 443 bp, Homo sapiens
aaaaaagtagagtaggagggaacatttcctgacttactctatggggccagtattatcctgtgagcaaagtcagacaaaactatcacaagagaaaactacagaacaataacacttgcaaatacaaatggaaaaaaaattctaagcaaaatactgaaaaactgcccagcagcatataaaaatgtttatgtcaaagccaaattggatttatttgaggaatacaaaggtggctcaacatattaaaatcaataaatttattataccacattaatataataaagagaaaataaaatcccatggtcatctcaataggtgcagaaaaagatagtacctttcatgatttaaaaaacaaacatgcatcaagctaggaataaaaaaagagctttctcattttgataaataacacctatgaaaaagccacagctaacacatcatactcacttatt

SEQ ID NO: 95592 - DNA, 704 bp, Homo sapiens
agcggaacccgctcgggtccctttccactctgtggaagcttgttctttgcttttgcaataaacctgctacgctcacttttgggttaacactgcttttatgagttgtaacactcaccgcaaaggtctgcagcttcactcctgagccagctctgagaccgtgaacccaccagaaagaagaaactccgaacacatccgaacatcagaaggaataaactccagacgcgccaccttaagagctgtaacactcaccgcgaggatccgcggcttcattctgaagtcaggagaccaagaacccaccaattccagagacactactgtgtgggtttctgtggacagcagttctgccaaactgttttccagtgtggctgtaccatttgcattcccgccagcaatgaaacgaagtttctaatgcttcaccttgtcaccagcatttgatattatcagtgtcctggctactcaaataggaaaagcttaagggaaagatttttctgtgagctggtgctgatgttgtatgttccagcagatcttcaaagaaatgtaagataatttattgaaataaggaataaacttttttctgagttctacttgattgcctaaaagttacatttttataaagataaaatttgtacaattcaaatatatttaaataacttttcattgatcaagagctatcatcaaaccctcgattacactgtgtgaatgac

SEQ ID NO: 95593 - DNA, 957 bp, Homo sapiens
tgctgggattacaggtgtgaatcactgcacccggcctcactttgaaaattagaaagcaggttaccctccttgaggatgctggcatgtgtcagagagaatacctccaaccaatccattaaaaagcagttattgctgcggccaggcctggcccggctgcgctaggctaggctctggcaggatcgcaggggcgggggtggtaggggcacgggtggcagccccgcgggtcgcaggccgccgccgccgccgccgcccatgaatggtgctgcccctggcctgccatcaccgccgcgtcgctcagcgcccgacctccctgcttttgcttgcagagccgctcccgaggccccggcgcggcgcgagggcgcggggcgggggtccacaggctccgaggctgcccccgacgccccgccctcgaggatggcggcggagctctacgtccccgccagcgccgcggccgcggtcctagcccacagcaacgccggcgccgccgtgggcaggaaggccgggcagcgcagcctgcaccgcgcccccgcgcccgcgcccgcgcggcccacacttggcaacaaccacccggagagccccaaatggcgcggtcccccacgctgcgcgagaggaacgcgctcatgttcaacaacgagctcgtggccgacgtgcactttgtcgtgggacccccgggggcgaccaggacggtgcccgcccacaagtacgtcctggctgcctgcagctccgtcttctatgccatgttctactgggacctggcggaagtcaaatctgaaattcacattccagacttggagcccgcagcctttctgatcctattaaagtacgtgtacagtgatgagatcgatctggaagcggatacggtgctggccactctgtaggctgctaagaagtacatcgtcccagcattggcaaaagcctgcgtcaactttctggggacaagtctgaaagccaagaacg

SEQ ID NO: 95594 - DNA, 878 bp, Homo sapiens
gcccagtattaaggatgcagaaacaggacaaggtcccttgtgcttaagagttcccagtgtggaagaggaggggaacagtgagaacagagggctgaatcagacaagcgagtagaaaattgaaatgcagaatgttaaagacttgatagagatcatcacagtaccacgggtaacacacagagggatgcctaatgaagacttggtgaatggaggattcctaaagaagttgatgtctaaactgagctttgaagaatgggttggaattcattaggcaaagaagagtgggcagagtgtccgaagcagaataagtagtagcttgtataatcataaaagaaggctgaagcccagtgtgcatgcttgggtttggatggggcagtgcaagaaatgaggttgactgggctggcagaggcagggtcatgggaaaccatatatacatatgagattatatatatcactctaagacatatggagttttatcctgaaggcacctcctactcctctccccctagttcattctgattttgtcacactggcctcctcactgttgctcaaacatgagtaggcacattcctctctcagcaagcactaactcttccctcatctgaactaccttttccccatgggtccctccttcacctttaagtgtttgctcaaatatcaccttctcaataatacttatcctgaccactccagttatattgcaacaccctcatcctgcactggatgctcctcactctgcttaatttttctccatagcattctcacattctaacatactgtatagtttgctgcagtgagctgtgatcacaccactgcactgcagcctgggcaatagagtgagaccctgtctcaaacaagaaaaacaaactgaaacaaaaaac

SEQ ID NO: 95595 - DNA, 547 bp, Homo sapiens
ctgtccagagggacatcctctggaaaaatggctagaactttcctatctgaactcaaggtccagaaactgagactctcaggcacatatctacagcattttgtttgtttgtctatttatttatttatttatttatttagtttttgtagtgacaggatcttgttatgttgcccaggctggtctcaaactcctgggctcaagcgatcctcccaccttgacctcccaaagtgctggtattacaggcatgagccaccatggtgcccggcctccaaagcattttggtgtggagcctgtcccctccagtcatccttaagggcttcctggaggaagcgaatttcagggagagcttaaataccctttgggtcaagagttatcttccatccttcatcattccttactttggctggcctgtgaaagtgggaccatctttctctaaagaaatgttggggctgggcacggtggctcacgtctgtaatcccagcactttgggaggctgaggtaggcggatcacgaggtaaagagatcaagaccatctggccaacacggtgaa

SEQ ID NO: 95596 - DNA, 854 bp, Homo sapiens
gtaacctctacagctccttgcacttattagggcgtcagcttcttcctttgcttgttcgtctcacacagctagcactgtacttataagctgtgaggggctcgctagccttcctgcttactcctgcttcccatagatttcatttaatcctcacagccacctctgaattaggcttccctcatgtattcagtcaacaaacatttgttacagttgtggttggcagacatgatgatccctgctcttgtggagtttataactcagtttagtaaaccaggtagttaacagatacagtgatgggagagtaccagagaactgagcctaggtgaggagggaggcttcctaggagaagtgccgtctttgccatgacctgaggggtgactaggcacaagccagactgcaggtggggccgtgccatggagctgaggtagcatcccacaccttggagtcaggaacacttggtttgagtcccagatttgccactctgtagacattggaaggcaaatcacatcccctctctcaccacttttcttacctgtaaaatcgtagggaattgacagaaatacaggagataatgcacctggggtacctgggccataaggtgagcttaaatgtcagctattattatgaatagtaatattagtgtttaaaaaaccatatgcttatgatttctttataaactctaaacaaattgtaccttaataaactgtcagtaggagaaaaatcactatggcttgaacagagggtgaggtgtaggggccagggaggcatgaaactgggcagtaagccacctggacccttttacaggtgagcaaagcaagtgtctgagggataagcatcacctaccttggcaggaggta

SEQ ID NO: 95597 - DNA, 410 bp, Homo sapiens
ctccatttatctgttgatggacagttgggttgtttccacctgtcagccattgtggatagtgctgtgtggacatgggtaagtaactgttcaaggccctgctttcaattcgtttgggtatattcctaagagcagaattgctgggttatatggtcattgttttagttttttgagggaccatccaactgttttccatagcagctacaccattttacatttccaccagcaagtatgagggctctaatttccctatatcttcagcaatacttgttttccactttttatttaacttttgttatagtcattttagtgggtgtgaagtgacatctccttggggtttcatctgcatttccctaggcactaatgatgctgatttgtcatgtccttattggccattcgtgtatcttctttgg

SEQ ID NO: 95598 - DNA, 780 bp, Homo sapiens
agctgtgaagttgtgatgcaaccctcctccttctcctaatgtttttcaggtctcagcacagatgcacacctgagggagtaacttctttggaaatgaaggacaaatagctgtgtaataataagtccaccttacaaagcacaactggaaatggaaacaagattatttctaaggccttttctactctaagagtaacttagtagcaagctgagaggtgaggatggggggatgttcatccacacgcaatgagtaccatgaggctctaccatgaagcatatagtcctcagtgtgaatcagagccctaagaagaataatgccctttacattgctttgccctctgccatcctaaacccatcccacccataattaagcagccatggaaatgaagggagccagaaggaatcaaaccctgctgcttggttcagtagacagagggacctgggggcagggtgttggctgggtctaggagaagatgatgagctcagaaaatagacaaggagaaaccccaggggaaagcttgtaaaatcctggaggaatcacaagatatattatttgagctcctttttatttattactaaattaatggcaggaatcccatataaagggatattccttatgaaacatgacatctaaagtacaaacagaggattcttccttaccctaaatcctgccctctctccctgagtctcttacgcatcaggccacctttgtgcccataagtcatgggcaacgcagtgtggtcaccttcatccacacctagaggacagtcagcaaagtgaggtg

SEQ ID NO: 95599 - DNA, 288 bp, Homo sapiens
ccacctcagcctcctgcgtaggtgggactataaggcgactgccaacaacctggactttttttattgttgtattttttgtagagatggggttttgccacgttgcccaggctggtcttgaattcctggacttaagcaatctgtccctcttggcctcccaaagtgctgggattacaggcatgagtccactgcccctggctgcctttgatttttaaaaaggtaacgctgattggccccaagcaggggaactggaaacactttcaccctattcccgtttataccttttgattc

SEQ ID NO: 95600 - DNA, 458 bp, Homo sapiens
cgcggtaggagtaggcgggcctgtgagtgctgagacctgggagccagctggggccagtgttgcttcctgcacatcagccctgtgactagggtgagtcacttgggcagtctgagcctctgtttccttgctgtaaaatggggatagtaaatgtaccgacctatgtggggttcctgagagctgcaggtgggcgctacctgcagggcccttcaaatacaatagaatctcacaaataaaaggaaaagacgattttttcggcagaaggaaatgatgtaagtcacaaacttggatctttcctaaagaatcgaagagcatggagaaaaatacacgtgaagatttttttttttttcaagacagagtcttgctctgttgcccaggctggagtgcagtgagctgaggtcacgccattgtactccagcctgggtggcgacaagagcaagactttgtctcaaaaacaaaac

SEQ ID NO: 95601 - DNA, 204 bp, Homo sapiens
gacagatcctgaaactttcctggggaaggtcagcctcagatactgacaagacaccaagggactgcagctgcttactatggaaagagcatgaccctatgaagaaaggagatgaagagaaaaagtcataagatcagcaagaagagaaactgtagatttgcctcaactcaacatgttaagtaatcgcctgacatctacataagacca

SEQ ID NO: 95602 - DNA, 912 bp, Homo sapiens
ccacaatgaggcagatcaaaatccaaacatttttataaatatgtgatgtaaatatatgcacagatatattctgtacatagtatgatggtgtgagcgcttactaaacgtgtacttctgttctaggatgcaggacttcaagaaaggttttttctgcgctgctgctgcttctgctgggaactcatgtttttgtcgagcatttagtgtttgaactcttcccatccttgactacctcttctctcccttaccccaccttctgttcactactattatttccaattgttgactgaggcagagaccactcggtttttcaattatccaggcccataaaccagcaaataggttttttttatttgtttggttggttggttgatgttttttttttttgaaagagcaacagaaagttcagcacaatctacagtattaaaattagccaaaagtcccatatctttattagctaaaaattccatctcaacagggttcatgcatgttttagccttcaagatccaatactttggggactcaagtatagagctaatgtgtttgaatacataattccccaggtgtttactgtgttaatgtagccaagggtccaatttcacagagctttcattcaatcaactgcctcaattggggttctttctttccatctcattagcatgactccatatatcacttcagtgcttgtttattaatgaaagaaaaataaaaattgactgagtttcaccagaatgatcctctgaagtacaccgaatatgtacatgtactgtatgtattaccgtagagattggaatcaacttactgtatgtaaagttttatgaatggttattttataatttatgtatttaatataggaatcgatgaactctggtgttttagtttatataaaaataaaacaagctgcattttttaaaa

SEQ ID NO: 95603 - DNA, 667 bp, Homo sapiens
agcacctggtatttccagaactagaaggtaaagaaattatttgtgcttgaacttgcagaaaactgccttttcccttcttctcttgcatcttaacctggagcttcccttttcttgagcctcagtgtgcttcccaactcaacttataattgacttcctgcagtttctccttaggacagggctttgttttgggggtggtcaatttgtagggttcataggaaacagaccactcacagcacctgctttatgccatcctcactctcagcaatgagttgaggcccaggaagccttctgccagcctcagctgctgttctcagattaatctgctgagttctttttgcctactaagaatctctgaatttaggaacatagatgttagcgcttgtatatctaggttttccagttcccagggccattaaacatttttttcctttcctttccttcttccaaaaaaattggtgattcccctgggtccctgtggtttaacctcacaaaaggtccatgatgacaccctgttacattgttttgtcgtagttaataccttgttatcctagttgctcagtccgtttttgtgagagattcagggatattaataaaactgtgctgctactgctactaacatcttgcataaaagccctattaattaaaatgtttattttgcatgtgattt

SEQ ID NO: 95604 - DNA, 469 bp, Homo sapiens
tatcacctctgctatctttctcttcttctttcagaacgccagtggcacaaatgttaggtcttttttttacagtcccagaggtccccctgaggctttgtcctttgcttttccccccagtctattttccctctgttgttcaaattgggtgatttctattgttatgtcttcaagttcactgattctttcctctgtcttcttcattcttctgtttagcttatctgttgagttttttattttggttatttatatttttaagttctaaaatttatatttgattcttctttataacttttttcctttggtgagagtttcttttgcagagactttcttgtttttttgtttcaaacatattcataattgttcattgcattattcacaatagcaaagacatggaatcaacttaaatggccatcaatcgcagactggataaagaaaatgcagtacatacatgccatggaatactagccgt

SEQ ID NO: 95605 - DNA, 186 bp, Homo sapiens
gcaacctctactgcctgattagagtcctaattttaccctctccctccctgatgcataggtaaaggcccctctgtggagtaaggagatcttcagagctgttagtgtaactaattgagaagtattgtttccattgcgtgttccactcatgttgcttctcttgtgaaccattaactttaattggatatt

SEQ ID NO: 95606 - DNA, 296 bp, Homo sapiens
caaaaaccaggaggaaggcatgtgcctgacctgttggaggagtggctggaagtcaaggtgcccggggtgggggtgacaacgaaagagaaggttctctggctcgctgtgcccaaggcccggcttgtcacaggaaaggcctctgggtgtctggggtcctctccctcctgtgatgacagcattctcaggcttccttgggcttgacaggcacactatggaaaacttccctcaaactactgcatggcctcttcatgccttggcctggaagaggcagaactattgatgctacattgcaggag

SEQ ID NO: 95607 - DNA, 502 bp, Homo sapiens
taaatatgccccaagctaggatttttcttcattctttagccttagagagaagttttgatgtatctcagcatctgtccttagcattacaacttgtttcctctgttaggctgttgacagtcatgaaagggcaatccacccaaggtaatgtaattatttgccctcactaaatgttaaaagcatgaccgtctttactcatggtcatttactcagaaatgagaaagctctgtctcagctgcttgatgcagagtcagtgtggtagagagtgacattcaacagatccagaaaggtgggtgcaggaaaacactgtaacatttgctaggccctctgggcagatgtgacttttctttccagcatggcatttcaaacatggattcttcggctgttcccaacccatgcggcagcaggcgcctgcatcgccctgacctttatttttactggatcttttcctttttctgttgatggtcactgtactccaccatctgggctgggacaagaaatcaaa

SEQ ID NO: 95608 - DNA, 425 bp, Homo sapiens
tgttgttgaacgagaagaagaccagacaagtagacacacgttcactaatcataggggtgacttcctttccagtgttcagcaagggatggggtataaggcaatgccaaacttcaacctgcccatcaggtgaaagagtgaagaatgtctaatgtagagttgttcttgaaactaggccagatgatgtcacatactggcttaattttttctattggatgcttaattatttgaggattctgcaggaaaagtccgggttgagttggcttgttcaatactaaaatatttttctcctgctaaagcacacacattcgctcacagcagtgtatatggaacttatagatgtttatttttacctctttttttcttttcccttcctttcttactctcactacctaagttcaaggtctgtggactgtgtacttgtggag

SEQ ID NO: 95609 - DNA, 333 bp, Homo sapiens
atatttgtaaaatggggtcaacacctacactagacttttgagagtcctcaattgcagccagtttttataacctaatcctgccctgtctcctaccagatcagcatgaaataaatgtgacctcatgacataaactaagccctggaatctggagtagcatcatgaaaactctaatcagttttatttggatgcctatactggggagtcacataacacaggaagtcgatagcgatgaatggcttatgtgcaaattaggcagggcaaaacagtttaaagagagcaatagagtagagggaagctcaagaaggaggttgatgaggtatcccataattatgg

SEQ ID NO: 95610 - DNA, 506 bp, Homo sapiens
agtcaccacaaagctaccattgatttataatgcacattaccacatcaagcctggcccaaggactctgggcccagaaggaaaaacagccatggcagaaatataatgaaaacatatctgtattcacagaaaacaattaggcttaatgtaattagagtgaacattcaggttcattttattcaaaggtaatgtttctgcccttgaagttccatgtagaaaagggtccttggagttagaacactgtgggaaggtgatataatttcacttggccctcggctatgtaaggtaaacattttacattattgcacagtaacaaaaatttacagccatagataacacaggatctgatcaacgttaacacacctgctgtttaagggcttacccacattggaaagcaatcatttccaggatggagatcaaatatcttaacacagtgtcacctgtgtgagttgctagaaaagacctctcatttaaaaatctgttcatagaacgtgctttcacatttttca

SEQ ID NO: 95611 - DNA, 1480 bp, Homo sapiens
gagcccgctgcggtcacgctgcgcccggcgccgcagggtgggcggcgaggcactcacgagggggacgctgagggcttccgcgcgggccacccgggtcaagcgcgctccgccgggaaacttctgcgggcgccgggctgaagctccgggcagggctgggaaggaaaggaaataccaaaatatttgcagactggatccaaatcaggagcccagatgaacttaaagaagcgagcatgggattcttagtttttcaagatccgtacacacgaagcctttaatcagcatcaactccagtgtccgttttctctggttttgtgaagactgcacaaaactctcatgatggagaaccaaaggacttagttacctgtttcagtgtcatctaaagtcaactgaaaagtgaagcaggcagtaatacagccatggaaagaaattcaagtttatggaagaacctaatagatgaacacccagtctgcacaacctggaagcaagaggccgaaggagccatttatcatcttgccagtattttatttgtagtaggtttcatgggtggcagtggattcttcgggctcctttatgtcttcagtttgctggggttgggttttctctgttctgctgtctgggcttgggtagatgtctgtgcagctgacatattttcctggaattttgtactgtttgtcatctgcttcatgcaatttgttcatattgcatatcaagttcgcagcataacctttgcccgagaattccaagtgttgtacagctcccttttccagcccctggggatctctttgcctgtcttcagaacgattgctttgagctctgaagtggttactttggaaaaggaacactgttatgccatgcaggggaaaacttccattgataaactctccttgcttgtttcaggaaggatcagagtgacagttgatggcgaatttctgcattacattttcccccttcagttcctggattctcctgagtgggattcactgagacccacagaggaaggcatttttcaggtaaccctcactgcagaaactgattgtcgatatgtgtcttggaggagaaagaaattatatctgctctttgctcagcatcgctacatctcccgccttttttcagtgctaattggcagtgacattgcagataaactctatgccttgaatgacagggtatatataggaaaaagatatcactatgatattcggctacccaacttctatcaaatgtcaactccagaaatacgcagatcacccctgacacaacattttcagaattccagacgatactgtgataaatgacatcaaagtctgaaatttataagtataaaaaaagactctctcttcatcattccccagtgaaatagcaaaatacaaaaaaagagctccctaatgtttttataaatcaaattcagaagcgagatgccattgccaactgttttattcctttcaacaactgcattgtgaataaactttacaaatttttcttg

SEQ ID NO: 95612 - DNA, 1454 bp, Homo sapiens
gagcccgctgcggtcacgctgcgcccggcgccgcagggtgggcggcgaggcactcacgagggggacgctgagggcttccgcgcgggccacccgggtcaagcgcgctccgccgggaaacttctgcgggcgccgggctgaagctccgggcagggctgggaaggaaaggaaataccaaaatatttgcagactggatccaaatcaggagcccagatgaacttaaagaagcgagcatgggattcttagtttttcaagatccgtacacacgaagcctttaatcagcatcaactccagtgtccgttttctctggttttgtgaagactgcacaaaactctcatgatggagaaccaaaggacttagttacctgtttcagtgtcatctaaagtcaactgaaaagtgaagcaggcagtaatacagccatggaaagaaattcaagtttatggaagaacctaatagatgaacacccagtctgcacaacctggaagcaagaggccgaaggagccatttatcatcttgccagtattttatttgtagatcagagtgacagttgatggcgaatttctgcattacattttcccccttcagttcctggattctcctgagtgggattcactgagacccacagaggaaggcatttttcaggtaaccctcactgcagaaactgattgtcgatatgtgtcttggaggagaaagaaattatatctgctctttgctcagcatcgctacatctcccgccttttttcagtgctaattggcagtgacattgcagataaactctatgccttgaatgacagggtatatataggaaaaagatatcactatgatattcggctacccaacttctatcaaatgtcaactccagaaatacgcagatcacccctgacacaacattttcagaattccagacgatactgtgataaatgacatcaaagtctgaaatttataagtataaaaaaagactctctcttcatcattccccagtgaaatagcaaaatacaaaaaaagagctccctaatgtttttataaatcaaattcagaagcgagatgccattgccaactgttttattcctttcaacaactgcattgtgaataaactttacaaatttttcttgtatttctcattgttataattggggagggggtggataactatgggcagtttgcccttttctgcatcaaaactgggagaatgaaattccactttctcaattcttttctcacatttactcaaatgcattgtcttgccctatggactcaggagttgcttctcaagaaacagccagcaagtattctcagcctgagggtgggttgctactgtccacataggcatttccggaattcacttttttgctacaacctccagtgaaagcaattattttaaatgtgcagttacttgatgtgactaaaaagtagaataaatgcaagagataataatatgtgaatcttgaagcctattt

SEQ ID NO: 95613 - DNA, 1825 bp, Homo sapiens
gagcccgctgcggtcacgctgcgcccggcgccgcagggtgggcggcgaggcactcacgagggggacgctgagggcttccgcgcgggccacccgggtcaagcgcgctccgccgggaaacttctgcgggcgccgggctgaagctccgggcagggctgggaaggaaaggaaataccaaaatatttgcagactggatccaaatcaggagcccagatgaacttaaagaagcgagcatgggattcttagtttttcaagatccgtacacacgaagcctttaatcagcatcaactccagtgtccgttttctctggttttgtgaagactgcacaaaactctcatgatggagaaccaaaggacttagttacctgtttcagtgtcatctaaagtcaactgaaaagtgaagcaggcagtaatacagccatggaaagaaattcaagtttatggaagaacctaatagatgaacacccagtctgcacaacctggaagcaagaggccgaaggagccatttatcatcttgccagtattttatttgtagtaggtttcatgggtggcagtggattcttcgggctcctttatgtcttcagtttgctggggttgggttttctctgttctgctgtctgggcttgggtagatgtctgtgcagctgacatattttcctggaattttgtactgtttgtcatctgcttcatgcaatttgttcatattgcatatcaagttcgcagcataacctttgcccgagaattccaagtgttgtacagctcccttttccagcccctggggatctctttgcctgtcttcagaacgattgctttgagctctgaagtggttactttggaaaaggaacactgttatgccatgcaggggaaaacttccattgataaactctccttgcttgtttcaggaaggatcagagtgacagttgatggcgaatttctgcattacattttcccccttcagttcctggattctcctgagtgggattcactgagacccacagaggaaggcatttttcaggtaaccctcactgcagaaactgattgtcgatatgtgtcttggaggagaaagaaattatatctgctctttgctcagcatcgctacatctcccgccttttttcagtgctaattggcagtgacattgcagataaactctatgccttgaatgacagggtatatataggaaaaagatatcactatgatattcggctacccaacttctatcaaatgtcaactccagaaatacgcagatcacccctgacacaacattttcagaattccagacgatactgtgataaatgacatcaaagtctgaaatttataagtataaaaaaagactctctcttcatcattccccagtgaaatagcaaaatacaaaaaaagagctccctaatgtttttataaatcaaattcagaagcgagatgccattgccaactgttttattcctttcaacaactgcattgtgaataaactttacaaatttttcttgtatttctcattgttataattggggagggggtggataactatgggcagtttgcccttttctgcatcaaaactgggagaatgaaattccactttctcaattcttttctcacatttactcaaatgcattgtcttgccctatggactcaggagttgcttctcaagaaacagccagcaagtattctcagcctgagggtgggttgctactgtccacataggcatttccggaattcacttttttgctacaacctccagtgaaagcaattattttaaatgtgcagttacttgatgtgactaaaaagtagaataaatgcaagagataataatatgtgaatcttgaagcctattt

SEQ ID NO: 95614 - DNA, 435 bp, Homo sapiens
ttcactcaatattggaatcctgactgtataacggaacgtgataacatgaatcttacaggacattatgtcacttattataatgtatgaatttaatattttgcctttcaaaatcataaagggcaagagtcatcagggatctgaaatacacttcctctaccccccacccctccccaattatgtgctctctttctccttcccttataaatgttgttcttgtgttttgataggatcagagtgacagttgatggcgaatttctgcattacattttcccccttcagttcctggattctcctgagtgggattcactgagacccacagaggaaggcatttttcaggtaagggataccagaacacacagttagcactccctctttcaaacagatgtttgtttaaaaataagtaaacaaataaacaacagtggataagacaagaat

SEQ ID NO: 95615 - DNA, 1121 bp, Homo sapiens
  misc_feature (958)..(958): n is a, c, g, or t
  misc_feature (1025)..(1025): n is a, c, g, or t
aacgacatctctaatattcatgctgatgcattttgatgctttgtgcattcatttctttctgtgctttgttggaatctggctatctgcttacagctattgaggaaactcagctttttaggagtgtttacagcctttttcatacctaaataggatgaacagtagatataaacttgccaaggcagaaatgtgttgataaatcaaaatgtgtatttgtggagggttgtgcatctcttggttgcagcttgctaaataggccatttaggaatcttctttcaatgcttttttcttgagcactgcctggggtggtgaaaaagcagagggcaagcctttgtctgacgccaaaaatgtcttcagtgaagaggccaagaggaaggcctccatcttccaagaagagcgatggttctgggacatatactaagttgcagaatacccaggtgagggtcatgtctgagaagaagcagagaaaaaaggtggaatcagaaagcaagcaagaaaaggctaatcgtataatatcagaggccatagcaaaagcaaaggagcgtggggaacgcaatattccacgagtaatgagccctgaaaactttcctactgcttcagttgaaggaaaagaggaaaagaaaggtagaaggatgaaatccaagccaaaggacaaagacagcaaaaaaacaaaaacatgttctaagttaaaagagaagacaaaaattggcaaactcattattacattgggtaagaaacaaaaaagaaagaatgagtcttcagatgaaatatctgatgcagaacagatgccacagcatacattaaaagatcaagactctcaaaaaagaagatcaaatcgacaaattaaaagaaaaaaatacgcagaagatatagaagggaagcaatctgaagaagaggttaaaggttctatgaaaataaaaaagaattcagctcctttacctggtgaacagcctttacaatngtttgtggagatccgagtgaagaagatgctgcaattgtagacaaaatctatcttctagaccgtaaanaaggaaatatcacctggagtgatgattgatacagaagaatttttcgtaaaatacaagaattactcctatcttcactgtgagtgggccacagaagag

SEQ ID NO: 95616 - DNA, 2409 bp, Homo sapiens
  misc_feature (2246)..(2246): n is a, c, g, or t
  misc_feature (2313)..(2313): n is a, c, g, or t
tgagtcccaggattccggggactggagggcagcgccggcagccaaggattttgacacttcatgacatgtcattatttagagcaataatgaatattgacctgttttggattagttgatgaccttcggaaatgatccaataatatctactatagagaagctgaatatactccatttggagtgaacagcccggattgttacagaattttcaagatgacagatccaatgatggacttttttgatgatgccaatctttttggtgagaccttagaaggtttgtcagatgatgcatttgtacaaccaggacctgtttcactagttgatgaattgaatttgggtgcagaatttgaaccgttgcacatagattcactgaaccatgttcaaggtactccaacacatcagaagatgactgattttgaacagttaaatcaatttgattcaataaaatttcaccatgttaatcaatcttttggtagcccagctgaacatgtgttatctccacactctcagtttaattgttctccaatccatccccaaaaccaacccaatggtttgtttccagatgtatcagatggcagtccaatgtggggccatcagacagctactaccatttcaaatcaaaatggatctccttttcaccaacaaggacattcacactctatgcatcaaaataaaagctttgtggcacaccatgactttgccttatttcaggccaatgaacaacaaacacagtgtacttcactacgctcacaacaaaacagaaataatctcaacccagggcagaattctcttagccagtctaaaaattttatgaatgtttctggtccacatagagtcaatgttaaccacccaccacagatgactaatgcatctaattcacaacagtctatttcaatgcagcaattttctcaaacgtcaaatccttcagcacacttccacaagtgtagcagtcatcaagaaggaaattttaatggaccttccccaaatatgacttcttgttctgtcagtaattcacagcaattttcttcacattattccttttccagtaatcatatatcaccaaacagtctacttcagtcctctgcagttcttgcatctaatcatacaaatcagactttatctgattttactggaagtaattccttttcacctcatagaggaatcaagcaagaatctactcagcatatcctaaaccccaatacatcattgaattcaaataatttccaaatattgcattcatcacatcctcagggtaattatagcaattcaaaattatctcctgtgcacatgaacttcccagatcctgttgactcaggaactcaaatgggccatttcaatgatcatgtagaaactaatggcttttcatctttagaagagaatttacttcatcaagtggaatctcaaactgagccattcacaggacttgaccccgaggacctccttcaggagggtcttcttcctcactttgatgagtcaacattcggacaagataattcaagtcacattttagatcatgaccttgatcggcagtttacttcgcatctggtaacacggccttctgatatggctcagactcagttgcaaagtcaggctcggagttggcattcatcattttctaatcatcagcatttacatgacagaaatcacctatgtttacagcgacagcctccatcttccaagaagagcgatggttctgggacatatactaagttgcagaatacccaggtgagggtcatgtctgagaagaagcagagaaaaaaggtggaatcagaaagcaagcaagaaaaggctaatcgtataatatcagaggccatagcaaaagcaaaggagcgtggggaacgcaatattccacgagtaatgagccctgaaaactttcctactgcttcagttgaaggaaaagaggaaaagaaaggtagaaggatgaaatccaagccaaaggacaaagacagcaaaaaaacaaaaacatgttctaagttaaaagagaagacaaaaattggcaaactcattattacattgggtaagaaacaaaaaagaaagaatgagtcttcagatgaaatatctgatgcagaacagatgccacagcatacattaaaagatcaagactctcaaaaaagaagatcaaatcgacaaattaaaagaaaaaaatacgcagaagatatagaagggaagcaatctgaagaagaggttaaaggttctatgaaaataaaaaagaattcagctcctttacctggtgaacagcctttacaatngtttgtggagatccgagtgaagaagatgctgcaattgtagacaaaatctatcttctagaccgtaaanaaggaaatatcacctggagtgatgattgatacagaagaatttttcgtaaaatacaagaattactcctatcttcactgtgagtgggccacagaagag

SEQ ID NO: 95617 - DNA, 2528 bp, Homo sapiens
  misc_feature (2365)..(2365): n is a, c, g, or t
  misc_feature (2432)..(2432): n is a, c, g, or t
gcggccgctgctcaactggtggggagatgcgggggcgggtcgtgtcagacgggtggtcgcctgaggccgcccccgcccggccagccgcgagtgtcagtctcagtcgaggcggggggcggcgggggcgcctcagtcatggcgaagcgcgagagtcagcgagcggcggattttgacacttcatgacatgtcattatttagagcaataatgaatattgacctgttttggattagttgatgaccttcggaaatgatccaataatatctactatagagaagctgaatatactccatttggagtgaacagcccggattgttacagaattttcaagatgacagatccaatgatggacttttttgatgatgccaatctttttggtgagaccttagaaggtttgtcagatgatgcatttgtacaaccaggacctgtttcactagttgatgaattgaatttgggtgcagaatttgaaccgttgcacatagattcactgaaccatgttcaaggtactccaacacatcagaagatgactgattttgaacagttaaatcaatttgattcaataaaatttcaccatgttaatcaatcttttggtagcccagctgaacatgtgttatctccacactctcagtttaattgttctccaatccatccccaaaaccaacccaatggtttgtttccagatgtatcagatggcagtccaatgtggggccatcagacagctactaccatttcaaatcaaaatggatctccttttcaccaacaaggacattcacactctatgcatcaaaataaaagctttgtggcacaccatgactttgccttatttcaggccaatgaacaacaaacacagtgtacttcactacgctcacaacaaaacagaaataatctcaacccagggcagaattctcttagccagtctaaaaattttatgaatgtttctggtccacatagagtcaatgttaaccacccaccacagatgactaatgcatctaattcacaacagtctatttcaatgcagcaattttctcaaacgtcaaatccttcagcacacttccacaagtgtagcagtcatcaagaaggaaattttaatggaccttccccaaatatgacttcttgttctgtcagtaattcacagcaattttcttcacattattccttttccagtaatcatatatcaccaaacagtctacttcagtcctctgcagttcttgcatctaatcatacaaatcagactttatctgattttactggaagtaattccttttcacctcatagaggaatcaagcaagaatctactcagcatatcctaaaccccaatacatcattgaattcaaataatttccaaatattgcattcatcacatcctcagggtaattatagcaattcaaaattatctcctgtgcacatgaacttcccagatcctgttgactcaggaactcaaatgggccatttcaatgatcatgtagaaactaatggcttttcatctttagaagagaatttacttcatcaagtggaatctcaaactgagccattcacaggacttgaccccgaggacctccttcaggagggtcttcttcctcactttgatgagtcaacattcggacaagataattcaagtcacattttagatcatgaccttgatcggcagtttacttcgcatctggtaacacggccttctgatatggctcagactcagttgcaaagtcaggctcggagttggcattcatcattttctaatcatcagcatttacatgacagaaatcacctatgtttacagcgacagcctccatcttccaagaagagcgatggttctgggacatatactaagttgcagaatacccaggtgagggtcatgtctgagaagaagcagagaaaaaaggtggaatcagaaagcaagcaagaaaaggctaatcgtataatatcagaggccatagcaaaagcaaaggagcgtggggaacgcaatattccacgagtaatgagccctgaaaactttcctactgcttcagttgaaggaaaagaggaaaagaaaggtagaaggatgaaatccaagccaaaggacaaagacagcaaaaaaacaaaaacatgttctaagttaaaagagaagacaaaaattggcaaactcattattacattgggtaagaaacaaaaaagaaagaatgagtcttcagatgaaatatctgatgcagaacagatgccacagcatacattaaaagatcaagactctcaaaaaagaagatcaaatcgacaaattaaaagaaaaaaatacgcagaagatatagaagggaagcaatctgaagaagaggttaaaggttctatgaaaataaaaaagaattcagctcctttacctggtgaacagcctttacaatngtttgtggagatccgagtgaagaagatgctgcaattgtagacaaaatctatcttctagaccgtaaanaaggaaatatcacctggagtgatgattgatacagaagaatttttcgtaaaatacaagaattactcctatcttcactgtgagtgggccacagaagag

SEQ ID NO: 95618 - DNA, 2407 bp, Homo sapiens
  misc_feature (2244)..(2244): n is a, c, g, or t
  misc_feature (2311)..(2311): n is a, c, g, or t
cttgaaaggaggcccctgccgtgtggacccgtaaaataaaatgggattttgacacttcatgacatgtcattatttagagcaataatgaatattgacctgttttggattagttgatgaccttcggaaatgatccaataatatctactatagagaagctgaatatactccatttggagtgaacagcccggattgttacagaattttcaagatgacagatccaatgatggacttttttgatgatgccaatctttttggtgagaccttagaaggtttgtcagatgatgcatttgtacaaccaggacctgtttcactagttgatgaattgaatttgggtgcagaatttgaaccgttgcacatagattcactgaaccatgttcaaggtactccaacacatcagaagatgactgattttgaacagttaaatcaatttgattcaataaaatttcaccatgttaatcaatcttttggtagcccagctgaacatgtgttatctccacactctcagtttaattgttctccaatccatccccaaaaccaacccaatggtttgtttccagatgtatcagatggcagtccaatgtggggccatcagacagctactaccatttcaaatcaaaatggatctccttttcaccaacaaggacattcacactctatgcatcaaaataaaagctttgtggcacaccatgactttgccttatttcaggccaatgaacaacaaacacagtgtacttcactacgctcacaacaaaacagaaataatctcaacccagggcagaattctcttagccagtctaaaaattttatgaatgtttctggtccacatagagtcaatgttaaccacccaccacagatgactaatgcatctaattcacaacagtctatttcaatgcagcaattttctcaaacgtcaaatccttcagcacacttccacaagtgtagcagtcatcaagaaggaaattttaatggaccttccccaaatatgacttcttgttctgtcagtaattcacagcaattttcttcacattattccttttccagtaatcatatatcaccaaacagtctacttcagtcctctgcagttcttgcatctaatcatacaaatcagactttatctgattttactggaagtaattccttttcacctcatagaggaatcaagcaagaatctactcagcatatcctaaaccccaatacatcattgaattcaaataatttccaaatattgcattcatcacatcctcagggtaattatagcaattcaaaattatctcctgtgcacatgaacttcccagatcctgttgactcaggaactcaaatgggccatttcaatgatcatgtagaaactaatggcttttcatctttagaagagaatttacttcatcaagtggaatctcaaactgagccattcacaggacttgaccccgaggacctccttcaggagggtcttcttcctcactttgatgagtcaacattcggacaagataattcaagtcacattttagatcatgaccttgatcggcagtttacttcgcatctggtaacacggccttctgatatggctcagactcagttgcaaagtcaggctcggagttggcattcatcattttctaatcatcagcatttacatgacagaaatcacctatgtttacagcgacagcctccatcttccaagaagagcgatggttctgggacatatactaagttgcagaatacccaggtgagggtcatgtctgagaagaagcagagaaaaaaggtggaatcagaaagcaagcaagaaaaggctaatcgtataatatcagaggccatagcaaaagcaaaggagcgtggggaacgcaatattccacgagtaatgagccctgaaaactttcctactgcttcagttgaaggaaaagaggaaaagaaaggtagaaggatgaaatccaagccaaaggacaaagacagcaaaaaaacaaaaacatgttctaagttaaaagagaagacaaaaattggcaaactcattattacattgggtaagaaacaaaaaagaaagaatgagtcttcagatgaaatatctgatgcagaacagatgccacagcatacattaaaagatcaagactctcaaaaaagaagatcaaatcgacaaattaaaagaaaaaaatacgcagaagatatagaagggaagcaatctgaagaagaggttaaaggttctatgaaaataaaaaagaattcagctcctttacctggtgaacagcctttacaatngtttgtggagatccgagtgaagaagatgctgcaattgtagacaaaatctatcttctagaccgtaaanaaggaaatatcacctggagtgatgattgatacagaagaatttttcgtaaaatacaagaattactcctatcttcactgtgagtgggccacagaagag

SEQ ID NO: 95619 - DNA, 2721 bp, Homo sapiens
  misc_feature (2558)..(2558): n is a, c, g, or t
  misc_feature (2625)..(2625): n is a, c, g, or t
gcggccgctgctcaactggtggggagatgcgggggcgggtcgtgtcagacgggtggtcgcctgaggccgcccccgcccggccagccgcgagtgtcagtctcagtcgaggcggggggcggcgggggcgcctcagtcatggcgaagcgcgagagtcagcgagcggcgtcattttttgagaccagtactgttataatccctatttacagatgaagaaactgagcttcaaaatgattaagtgtcttgcctaggattacatagctggtccctaatattaaggagctttgtggatgatactatgcatcttctagagaagcagtcctcaacctttttggcaccagggaccggtttcgtggatggggattttgacacttcatgacatgtcattatttagagcaataatgaatattgacctgttttggattagttgatgaccttcggaaatgatccaataatatctactatagagaagctgaatatactccatttggagtgaacagcccggattgttacagaattttcaagatgacagatccaatgatggacttttttgatgatgccaatctttttggtgagaccttagaaggtttgtcagatgatgcatttgtacaaccaggacctgtttcactagttgatgaattgaatttgggtgcagaatttgaaccgttgcacatagattcactgaaccatgttcaaggtactccaacacatcagaagatgactgattttgaacagttaaatcaatttgattcaataaaatttcaccatgttaatcaatcttttggtagcccagctgaacatgtgttatctccacactctcagtttaattgttctccaatccatccccaaaaccaacccaatggtttgtttccagatgtatcagatggcagtccaatgtggggccatcagacagctactaccatttcaaatcaaaatggatctccttttcaccaacaaggacattcacactctatgcatcaaaataaaagctttgtggcacaccatgactttgccttatttcaggccaatgaacaacaaacacagtgtacttcactacgctcacaacaaaacagaaataatctcaacccagggcagaattctcttagccagtctaaaaattttatgaatgtttctggtccacatagagtcaatgttaaccacccaccacagatgactaatgcatctaattcacaacagtctatttcaatgcagcaattttctcaaacgtcaaatccttcagcacacttccacaagtgtagcagtcatcaagaaggaaattttaatggaccttccccaaatatgacttcttgttctgtcagtaattcacagcaattttcttcacattattccttttccagtaatcatatatcaccaaacagtctacttcagtcctctgcagttcttgcatctaatcatacaaatcagactttatctgattttactggaagtaattccttttcacctcatagaggaatcaagcaagaatctactcagcatatcctaaaccccaatacatcattgaattcaaataatttccaaatattgcattcatcacatcctcagggtaattatagcaattcaaaattatctcctgtgcacatgaacttcccagatcctgttgactcaggaactcaaatgggccatttcaatgatcatgtagaaactaatggcttttcatctttagaagagaatttacttcatcaagtggaatctcaaactgagccattcacaggacttgaccccgaggacctccttcaggagggtcttcttcctcactttgatgagtcaacattcggacaagataattcaagtcacattttagatcatgaccttgatcggcagtttacttcgcatctggtaacacggccttctgatatggctcagactcagttgcaaagtcaggctcggagttggcattcatcattttctaatcatcagcatttacatgacagaaatcacctatgtttacagcgacagcctccatcttccaagaagagcgatggttctgggacatatactaagttgcagaatacccaggtgagggtcatgtctgagaagaagcagagaaaaaaggtggaatcagaaagcaagcaagaaaaggctaatcgtataatatcagaggccatagcaaaagcaaaggagcgtggggaacgcaatattccacgagtaatgagccctgaaaactttcctactgcttcagttgaaggaaaagaggaaaagaaaggtagaaggatgaaatccaagccaaaggacaaagacagcaaaaaaacaaaaacatgttctaagttaaaagagaagacaaaaattggcaaactcattattacattgggtaagaaacaaaaaagaaagaatgagtcttcagatgaaatatctgatgcagaacagatgccacagcatacattaaaagatcaagactctcaaaaaagaagatcaaatcgacaaattaaaagaaaaaaatacgcagaagatatagaagggaagcaatctgaagaagaggttaaaggttctatgaaaataaaaaagaattcagctcctttacctggtgaacagcctttacaatngtttgtggagatccgagtgaagaagatgctgcaattgtagacaaaatctatcttctagaccgtaaanaaggaaatatcacctggagtgatgattgatacagaagaatttttcgtaaaatacaagaattactcctatcttcactgtgagtgggccacagaagag

SEQ ID NO: 95620 - DNA, 1623 bp, Homo sapiens
  misc_feature (1460)..(1460): n is a, c, g, or t
  misc_feature (1527)..(1527): n is a, c, g, or t
gcggccgctgctcaactggtggggagatgcgggggcgggtcgtgtcagacgggtggtcgcctgaggccgcccccgcccggccagccgcgagtgtcagtctcagtcgaggcggggggcggcgggggcgcctcagtcatggcgaagcgcgagagtcagcgagcggcgtcattttttgagaccagtactgttataatccctatttacagatgaagaaactgagcttcaaaatgattaagtgtcttgcctaggattacatagctggtccctaatattaaggagctttgtggatgatactatgcatcttctagagaagcagtcctcaacctttttggcaccagggaccggtttcgtggatggggattttgacacttcatgacatgtcattatttagagcaataatgaatattgacctgttttggattagttgatgaccttcggaaatgatccaataatatctactatagagaagctgaatatactccatttggagtgaacagcccggattgttacagaattttcaagatgacagatccaatgatggacttttttgatgatgccaatctttttggtgagaccttagaagaagagaatttacttcatcaagtggaatctcaaactgagccattcacaggacttgaccccgaggacctccttcaggagggtcttcttcctcactttgatgagtcaacattcggacaagataattcaagtcacattttagatcatgaccttgatcggcagtttacttcgcatctggtaacacggccttctgatatggctcagactcagttgcaaagtcaggctcggagttggcattcatcattttctaatcatcagcatttacatgacagaaatcacctatgtttacagcgacagcctccatcttccaagaagagcgatggttctgggacatatactaagttgcagaatacccaggtgagggtcatgtctgagaagaagcagagaaaaaaggtggaatcagaaagcaagcaagaaaaggctaatcgtataatatcagaggccatagcaaaagcaaaggagcgtggggaacgcaatattccacgagtaatgagccctgaaaactttcctactgcttcagttgaaggaaaagaggaaaagaaaggtagaaggatgaaatccaagccaaaggacaaagacagcaaaaaaacaaaaacatgttctaagttaaaagagaagacaaaaattggcaaactcattattacattgggtaagaaacaaaaaagaaagaatgagtcttcagatgaaatatctgatgcagaacagatgccacagcatacattaaaagatcaagactctcaaaaaagaagatcaaatcgacaaattaaaagaaaaaaatacgcagaagatatagaagggaagcaatctgaagaagaggttaaaggttctatgaaaataaaaaagaattcagctcctttacctggtgaacagcctttacaatngtttgtggagatccgagtgaagaagatgctgcaattgtagacaaaatctatcttctagaccgtaaanaaggaaatatcacctggagtgatgattgatacagaagaatttttcgtaaaatacaagaattactcctatcttcactgtgagtgggccacagaagag

SEQ ID NO: 95621 - DNA, 916 bp, Homo sapiens
  misc_feature (753)..(753): n is a, c, g, or t
  misc_feature (820)..(820): n is a, c, g, or t
gcaattctaaaccctccttcctttcccagtgctgcagtgctgctatgaaacctttgatgaggcaggtatagaaaaaatatccagtgaagcacactggaatcagcatgaaaatgtgtttggaaattcctgatggttttttcctttggtatagtcagaggcatgtttacggcctccatcttccaagaagagcgatggttctgggacatatactaagttgcagaatacccaggtgagggtcatgtctgagaagaagcagagaaaaaaggtggaatcagaaagcaagcaagaaaaggctaatcgtataatatcagaggccatagcaaaagcaaaggagcgtggggaacgcaatattccacgagtaatgagccctgaaaactttcctactgcttcagttgaaggaaaagaggaaaagaaaggtagaaggatgaaatccaagccaaaggacaaagacagcaaaaaaacaaaaacatgttctaagttaaaagagaagacaaaaattggcaaactcattattacattgggtaagaaacaaaaaagaaagaatgagtcttcagatgaaatatctgatgcagaacagatgccacagcatacattaaaagatcaagactctcaaaaaagaagatcaaatcgacaaattaaaagaaaaaaatacgcagaagatatagaagggaagcaatctgaagaagaggttaaaggttctatgaaaataaaaaagaattcagctcctttacctggtgaacagcctttacaatngtttgtggagatccgagtgaagaagatgctgcaattgtagacaaaatctatcttctagaccgtaaanaaggaaatatcacctggagtgatgattgatacagaagaatttttcgtaaaatacaagaattactcctatcttcactgtgagtgggccacagaagag

SEQ ID NO: 95622 - DNA, 578 bp, Homo sapiens
  misc_feature (415)..(415): n is a, c, g, or t
  misc_feature (482)..(482): n is a, c, g, or t
ctttttttaccccacctttaaaaacctttgggccccttttttcccccaaaaggtttgaaggaaaagaggaaaagaaaggtagaaggatgaaatccaagccaaaggacaaagacagcaaaaaaacaaaaacatgttctaagttaaaagagaagacaaaaattggcaaactcattattacattgggtaagaaacaaaaaagaaagaatgagtcttcagatgaaatatctgatgcagaacagatgccacagcatacattaaaagatcaagactctcaaaaaagaagatcaaatcgacaaattaaaagaaaaaaatacgcagaagatatagaagggaagcaatctgaagaagaggttaaaggttctatgaaaataaaaaagaattcagctcctttacctggtgaacagcctttacaatngtttgtggagatccgagtgaagaagatgctgcaattgtagacaaaatctatcttctagaccgtaaanaaggaaatatcacctggagtgatgattgatacagaagaatttttcgtaaaatacaagaattactcctatcttcactgtgagtgggccacagaagag

SEQ ID NO: 95623 - DNA, 2186 bp, Homo sapiens
tgagtcccaggattccggggactggagggcagcgccggcagccaaggattttgacacttcatgacatgtcattatttagagcaataatgaatattgacctgttttggattagttgatgaccttcggaaatgatccaataatatctactatagagaagctgaatatactccatttggagtgaacagcccggattgttacagaattttcaagatgacagatccaatgatggacttttttgatgatgccaatctttttggtgagaccttagaaggtttgtcagatgatgcatttgtacaaccaggacctgtttcactagttgatgaattgaatttgggtgcagaatttgaaccgttgcacatagattcactgaaccatgttcaaggtactccaacacatcagaagatgactgattttgaacagttaaatcaatttgattcaataaaatttcaccatgttaatcaatcttttggtagcccagctgaacatgtgttatctccacactctcagtttaattgttctccaatccatccccaaaaccaacccaatggtttgtttccagatgtatcagatggcagtccaatgtggggccatcagacagctactaccatttcaaatcaaaatggatctccttttcaccaacaaggacattcacactctatgcatcaaaataaaagctttgtggcacaccatgactttgccttatttcaggccaatgaacaacaaacacagtgtacttcactacgctcacaacaaaacagaaataatctcaacccagggcagaattctcttagccagtctaaaaattttatgaatgtttctggtccacatagagtcaatgttaaccacccaccacagatgactaatgcatctaattcacaacagtctatttcaatgcagcaattttctcaaacgtcaaatccttcagcacacttccacaagtgtagcagtcatcaagaaggaaattttaatggaccttccccaaatatgacttcttgttctgtcagtaattcacagcaattttcttcacattattccttttccagtaatcatatatcaccaaacagtctacttcagtcctctgcagttcttgcatctaatcatacaaatcagactttatctgattttactggaagtaattccttttcacctcatagaggaatcaagcaagaatctactcagcatatcctaaaccccaatacatcattgaattcaaataatttccaaatattgcattcatcacatcctcagggtaattatagcaattcaaaattatctcctgtgcacatgaacttcccagatcctgttgactcaggaactcaaatgggccatttcaatgatcatgtagaaactaatggcttttcatctttagaagagaatttacttcatcaagtggaatctcaaactgagccattcacaggacttgaccccgaggacctccttcaggagggtcttcttcctcactttgatgagtcaacattcggacaagataattcaagtcacattttagatcatgaccttgatcggcagtttacttcgcatctggtaacacggccttctgatatggctcagactcagttgcaaagtcaggctcggagttggcattcatcattttctaatcatcagcatttacatgacagaaatcacctatgtttacagcgacagcctccatcttccaagaagagcgatggttctgggacatatactaagttgcagaatacccaggtgagggtcatgtctgagaagaagcagagaaaaaaggtggaatcagaaagcaagcaagaaaaggctaatcgtataatatcagaggccatagcaaaagcaaaggagcgtggggaacgcaatattccacgagtaatgagccctgaaaactttcctactgcttcagttgaaggaaaagaggaaaagaaaggtagaaggatgaaatccaagccaaaggacaaagacagcaaaaaaacaaaaacatgttctaagttaaaagagaagacaaaaattggcaaactcattattacattgggtaagaaacaaaaaagaaagaatgagtcttcagatgaaatatctgatgcagaacagatgccacagcatacattaaaagatcaagactctcaacttcttatccaatgggagagtagtggctcaaggctcctgggctgctgcaagagttgagaaaagaagatcaaatcgacaaa

SEQ ID NO: 95624 - DNA, 2113 bp, Homo sapiens
tgagtcccaggattccggggactggagggcagcgccggcagccaaggattttgacacttcatgacatgtcattatttagagcaataatgaatattgacctgttttggattagttgatgaccttcggaaatgatccaataatatctactatagagaagctgaatatactccatttggagtgaacagcccggattgttacagaattttcaagatgacagatccaatgatggacttttttgatgatgccaatctttttggtgagaccttagaaggtttgtcagatgatgcatttgtacaaccaggacctgtttcactagttgatgaattgaatttgggtgcagaatttgaaccgttgcacatagattcactgaaccatgttcaaggtactccaacacatcagaagatgactgattttgaacagttaaatcaatttgattcaataaaatttcaccatgttaatcaatcttttggtagcccagctgaacatgtgttatctccacactctcagtttaattgttctccaatccatccccaaaaccaacccaatggtttgtttccagatgtatcagatggcagtccaatgtggggccatcagacagctactaccatttcaaatcaaaatggatctccttttcaccaacaaggacattcacactctatgcatcaaaataaaagctttgtggcacaccatgactttgccttatttcaggccaatgaacaacaaacacagtgtacttcactacgctcacaacaaaacagaaataatctcaacccagggcagaattctcttagccagtctaaaaattttatgaatgtttctggtccacatagagtcaatgttaaccacccaccacagatgactaatgcatctaattcacaacagtctatttcaatgcagcaattttctcaaacgtcaaatccttcagcacacttccacaagtgtagcagtcatcaagaaggaaattttaatggaccttccccaaatatgacttcttgttctgtcagtaattcacagcaattttcttcacattattccttttccagtaatcatatatcaccaaacagtctacttcagtcctctgcagttcttgcatctaatcatacaaatcagactttatctgattttactggaagtaattccttttcacctcatagaggaatcaagcaagaatctactcagcatatcctaaaccccaatacatcattgaattcaaataatttccaaatattgcattcatcacatcctcagggtaattatagcaattcaaaattatctcctgtgcacatgaacttcccagatcctgttgactcaggaactcaaatgggccatttcaatgatcatgtagaaactaatggcttttcatctttagaagagaatttacttcatcaagtggaatctcaaactgagccattcacaggacttgaccccgaggacctccttcaggagggtcttcttcctcactttgatgagtcaacattcggacaagataattcaagtcacattttagatcatgaccttgatcggcagtttacttcgcatctggtaacacggccttctgatatggctcagactcagttgcaaagtcaggctcggagttggcattcatcattttctaatcatcagcatttacatgacagaaatcacctatgtttacagcgacaggtatgtagctctttgcttttattttggagatttgggggtagggcggactgttagtcattgggttaattttatatgaaacatagtcaagatttctcaaacttggtaattccattaagtgaacatacatattttgatataggtttatattgttttacaagtcttgtattgaaagtgattcactgatatgctcaaagcaatagattagcttctatatttagaaaattataaggtgttaagacttcttttgtgatgtttatgaatacctttgagagaaagttattttatcaaaaacaacttaataatcataattaaaagggaaaaaccagactgggaaaattttattgcaaatacaattaacattgagttaatattcctataaaaagctttataaattagcaaacttttaagacctcagttgataactagataaaacatataagctgaaattcac

SEQ ID NO: 95625 - DNA, 353 bp, Homo sapiens
tgctgggattacaggcgtgagccaccgctcccagcctacatttcttaaatctatcttgctagctcctctcgcacttgaaatcaaatactccagcaactaacacttgtgaagcatttttcaattttcctgcacagttacattatctcagaacggttcattaccgtggggtgtgtgctcttcataaatgcaaactgatgcagaagcagccaccagccaaaaaatcggctttagaacgtacagttttgtagccttcattttttacgttacattttcagttaagatgtgaaaatcattgaaccaattcatttaataaaaagttgagtaacatttatattttgtcacttccgtgggta

SEQ ID NO: 95626 - DNA, 4570 bp, Homo sapiens
atttgcctctggcaggcaaatgagcttgtcagtttctgcctccattagaccctcaacccaaaggagcaggagatttcggtagcgttttaactttatctcagaatctgaaagcggaaggccaggcaagctgcacacatcaagcgaaacgcctgaggggcggccagcgcgagggtttctggccatcgaccctcacctcccgggacttccagggtcttccccccaccccgcgcacacctccctgcctcgccccgagggcgtcacgtggcagcgtggggcccgcctcctggtgatgtcacggcgctcgcagccgtcgcgctgaagaaaggatgctcgaggatgctgtccaggtgggcggccgcgggcgcgatgcggcactgcaggtgtaattagcatggtcaatgcgggagcgatgagtggctctggaaacctgatggatttcctcgatgagccgttccctgatgtggggacgtatgaggacttccacaccatcgactggctaagggaaaagtcacgggacaccgacagacacaggaagatcaccagcaagagcaaggagtccatatgggagttcatcaagagcctgctggatgcctggtcgggatgggtggtgatgctgctcatcggcctgctggcgggcaccttggctggggtcatcgatctcgccgtggactggatgacggacctgaaggagggggtctgcctgtctgccttctggtatagccatgagcagtgttgctggacttctaacgagaccacttttgaggacagagacaagtgtcccctgtggcagaaatggtcggagctgctggtgaatcagtcagagggtgccagtgcttacattctgaattacttaatgtacatcctatgggcgctgctgtttgcatttttggctgtctccctggtgcgtgtatttgcaccatatgcctgtggctctggcataccagagataaagaccattttgagcggctttatcatcaggggctacttggggaagtggaccctgctaatcaagacagtcacgctggtgctggtagtgtcctccggtctgagccttgggaaggaagggccgctagtgcacgtggcttgttgctgtggcaacttcttcagcagccttttctccaagtacagcaagaatgagggcaagaggcgggaggtgctttcagctgcagcggctgctggagtctctgttgcctttggtgcaccaattggaggcgtgcttttcagtctagaagaggtcagttactactttcccctgaagaccttgtggaggtcatttttcgcagccctggtggcggcctttacgctgagatccatcaatccctttgggaatagccgtctcgttctcttttatgtggaataccacacgccctggtacatggctgaactcttccccttcatcctgcttggggtcttcgggggcttgtggggaaccctcttcatccgctgcaacatcgcctggtgcaggaggcgcaagaccaccaggctggggaagtacccggtgctggaggtcattgtggtgactgccatcactgccatcattgcctaccccaatccctacacacgccagagcaccagcgagctcatttctgagctgttcaatgactgtggagcccttgagtcttcccagctctgtgactacatcaatgaccccaacatgactcggcctgtggatgacattccagaccggccggctggtgtcggtgtttacacggccatgtggcagctggccctggcactgatcttcaaaatcgtcgttaccatatttacctttggcatgaagatcccgtcgggcctcttcatccccagcatggctgtgggcgcgatagcgggcaggatggtgggaattggcgtggagcagctggcctaccatcaccatgactggatcatcttcaggaactggtgcagacccggtgcagactgtgtcacgccagggctgtacgcaatggtgggagctgcggcctgcctcggtggagttaccaggatgacggtgtcattggtggtcatcatgtttgaattaaccgggggtctggagtacatcgtgcccctgatggcggcggctgtgaccagcaagtgggtagctgatgcatttgggaaagaaggcatctacgaggcccacatccacttaaatgggtaccctttccttgacgtgaaggacgagtttactcaccgcacactggccaccgacgtcatgcggccccggcggggagagccgccactgtcggtgctcacccaggacagcatgactgtcgaggacgtggagacgctcatcaaggagaccgactacaacggcttccccgtggtggtctccagagactccgagcgcctcattggatttgcccagaggagggaactgattctcgcaataaagaacgccagacagaggcaggagggcattgtgagcaattccatcatgtacttcacggaggaaccccccgagctgccggccaacagcccacatcccctgaagctgcggcgcatcctgaacctcagcccgtttacagtgacagaccacactccgatggaaacggtggtggatatcttccggaaactggggcttcggcagtgcctggtgacgcggagcgggagacttcttggcatcatcacaaaaaaggatgttctgagacatatggcccagatggcaaaccaggaccccgaatccatcatgtttaattagcaacaaggtggcaattattttcagaaaaacactgactgtgtcatttaaaaagaaataaatgatatgttattatcccaatgaaagatcatgcattggggacagcagaaacaaaagcttttttggaaaggcggggaagaaggatgaaacctttaaaaacaaaaacaaaaacatcaatgagtaggcattttatagctttaaccccgtatgagtttcaagctgtgtttcctaatgagtttgctactgctgtgggggcatgtgggtgggtaaatgatgtaaatgatgtgatctgtacaagtatgtggagcatgaatgctgactcaagaaacttttactccttctgctcaaggctgatgtttgtaacttatgaacacacgtgaagtgttgagtccaaaagacaaaggggcatcggcatgtcagcgtccttatttattggttcttgaagttttgctgctatgttactgaatcatactaaagacatttgcgcttactttgttgaaaaagaaaaagaaattaaatttgaacacagtgaaagctgcaagtatgccagtgggtccgctcacgaccgtcctgtttcttgctcctgttctcagcctgttatctggcttatccatcagtttctgaaccaacatcaggggcacctgccatgatgagtgtgaagaaatcatttctctatgcaagactggcatcctgggactgcacgatgaactattggagcatacagtactgcggtgtgtctcctcccatacaaagggacacatccttattttgagggtatactcacccgatcattgatttgcatccccatggcatttgcttcatttatttattgcttttgcccatgcattcaatattgatcagctcagcacttccatgggccatagccggtatgcccccagcctgccataagcgtgctttcattttcaagtagcatatgcaagagtccaaacaggctacccaatgttactacttatttttcctctcaggtcttatcagatacggctgtggagaggatgaggcatatgcgttgtcagttggaatccctccaaatggattgcaagagaaatactaaattgattctaaatctgttccattatcttctctgtaggatgcaaaacatccagttgtaatgtataagcatgcacttcatactagcaatcacagcacaggaggacagcattaaattttatatagccaatttgggcactgggcatctttgtatttgaacttaacgacacatttactcttttagtcaggatttcggtcttttctgcgggaaggaattaagctatgtattaggtccaccatacgatctgtgtaagtaagattatcccacttgccctttctctttagtctttgtcccttccttttcactaagtgcccctcatccttttcaatctcattgtcactggatagtgctgtatcacttaggtgtgcattcggctgcaaataacagaaaacccagcaaacactgaagggctggataagaaccctgagagggggtactccaggactgtctccataacatcattgggatccccatcccgttgctatttctttttcaccgtttttaccttttgtcctctggcttattgcctcagagttgcaagatggttcctgaactgtcaggtatcatgtctgctttctaagtgggaagaggaagggagaggcaagcaactaggtacaatgtctatcaggaaagcaaagcttccccagagacgctcagcttgtatccattgactggaagtctgtcacgtggctccccctagccgcacactagtgtgggaaggaaaatattgagctaggcacattactctctgaacgaaattcatattatcttattaaggaagagtgttggtcttcaggaggggaagtttgctgtattggatgccatcatcg

SEQ ID NO: 95627 - DNA, 3868 bp, Homo sapiens
atttgcctctggcaggcaaatgagcttgtcagtttctgcctccattagaccctcaacccaaaggagcaggagatttcggtagcgttttaactttatctcagaatctgaaagcggaaggccaggcaagctgcacacatcaagcgaaacgcctgaggggcggccagcgcgagggtttctggccatcgaccctcacctcccgggacttccagggtcttccccccaccccgcgcacacctccctgcctcgccccgagggcgtcacgtggcagcgtggggcccgcctcctggtgatgtcacggcgctcgcagccgtcgcgctgaagaaaggatgctcgaggatgctgtccaggtgggcggccgcgggcgcgatgcggcactgcaggtgtaattagcatggtcaatgcgggagcgatgagtggctctggaaacctgatggatttcctcgatgagccgttccctgatgtggggacgtatgaggacttccacaccatcgactggctaagggaaaagtcacgggacaccgacagacacaggaagatcaccagcaagagcaaggagtccatatgggagttcatcaagagcctgctggatgcctggtcgggatgggtggtgatgctgctcatcggcctgctggcgggcaccttggctggggtcatcgatctcgccgtggactggatgacggacctgaaggagggggtctgcctgtctgccttctggtatagccatgagcagtgttgctggacttctaacgagaccacttttgaggacagagacaagtgtcccctgtggcagaaatggtcggagctgctggtgaatcagtcagagggtgccagtgcttacattctgaattacttaatgtacatcctatgggcgctgctgtttgcatttttggctgtctccctggtgcgtgtatttgcaccatatgcctgtggctctggcataccagagataaagaccattttgagcggctttatcatcaggggctacttggggaagtggaccctgctaatcaagacagtcacgctggtgctggtagtgtcctccggtctgagccttgggaaggaagggccgctagtgcacgtggcttgttgctgtggcaacttcttcagcagccttttctccaagtacagcaagaatgagggcaagaggcgggaggtgctttcagctgcagcggctgctggagtctctgttgcctttggtgcaccaattggaggcgtgcttttcagtctagaagaggtcagttactactttcccctgaagaccttgtggaggtcatttttcgcagccctggtggcggcctttacgctgagatccatcaatccctttgggaatagccgtctcgttctcttttatgtggaataccacacgccctggtacatggctgaactcttccccttcatcctgcttggggtcttcgggggcttgtggggaaccctcttcatccgctgcaacatcgcctggtgcaggaggcgcaagaccaccaggctggggaagtacccggtgctggaggtcattgtggtgactgccatcactgccatcattgcctaccccaatccctacacacgccagagcaccagcgagctcatttctgagctgttcaatgactgtggagcccttgagtcttcccagctctgtgactacatcaatgaccccaacatgactcggcctgtggatgacattccagaccggccggctggtgtcggtgtttacacggccatgtggcagctggccctggcactgatcttcaaaatcgtcgttaccatatttacctttggcatgaagatcccgtcgggcctcttcatccccagcatggctgtgggcgcgatagcgggcaggatggtgggaattggcgtggagcagctggcctaccatcaccatgactggatcatcttcaggaactggtgcagacccggtgcagactgtgtcacgccagggctgtacgcaatggtgggagctgcggcctgcctcggtggagttaccaggatgacggtgtcattggtggtcatcatgtttgaattaaccgggggtctggagtacatcgtgcccctgatggcggcggctgtgaccagcaagtgggtagctgatgcatttgggaaagaaggcatctacgaggcccacatccacttaaatgggtaccctttccttgacgtgaaggacgagtttactcaccgcacactggccaccgacgtcatgcggccccggcggggagagccgccactgtcggtgctcacccaggacagcatgactgtcgaggacgtggagacgctcatcaaggagaccgactacaacggcttccccgtggtggtctccagagactccgagcgcctcattggatttgcccagaggagggaactgattctcgcaataaagaacgccagacagaggcaggagggcattgtgagcaattccatcatgtacttcacggaggaaccccccgagctgccggccaacagcccacatcccctgaagctgcggcgcatcctgaacctcagcccgtttacagtgacagaccacactccgatggaaacggtggtggatatcttccggaaactggggcttcggcagtgcctggtgacgcggagcgggagacttcttggcatcatcacaaaaaaggatgttctgagacatatggcccagatggcaaaccaggaccccgaatccatcatgtttaattagcaacaaggtggcaattattttcagaaaaacactgactgtgtcatttaaaaagaaataaatgatatgttattatcccaatgaaagatcatgcattggggacagcagaaacaaaagcttttttggaaaggcggggaagaaggatgaaacctttaaaaacaaaaacaaaaacatcaatgagtaggcattttatagctttaaccccgtatgagtttcaagctgtgtttcctaatgagtttgctactgctgtgggggcatgtgggtgggtaaatgatgtaaatgatgtgatctgtacaagtatgtggagcatgaatgctgactcaagaaacttttactccttctgctcaaggctgatgtttgtaacttatgaacacacgtgaagtgttgagtccaaaagacaaaggggcatcggcatgtcagcgtccttatttattggttcttgaagttttgctgctatgttactgaatcatactaaagacatttgcgcttactttgttgaaaaagaaaaagaaattaaatttgaacacagtgaaagctgcaagtatgccagtgggtccgctcacgaccgtcctgtttcttgctcctgttctcagcctgttatctggcttatccatcagtttctgaaccaacatcaggggcacctgccatgatgagtgtgaagaaatcatttctctatgcaagactggcatcctgggactgcacgatgaactattggagcatacagtactgcggtgtgtctcctcccatacaaagggacacatccttattttgagggtatactcacccgatcattgatttgcatccccatggcatttgcttcatttatttattgcttttgcccatgcattcaatattgatcagctcagcacttccatgggccatagccggtatgcccccagcctgccataagcgtgctttcattttcaagtagcatatgcaagagtccaaacaggctacccaatgttactacttatttttcctctcaggtcttatcagatacggctgtggagaggatgaggcatatgcgttgtcagttggaatccctccaaatggattgcaagagaaatactaaattgattctaaatctgttccattatcttctctgtaggatgcaaaacatccagttgtaatgtataagcatgcacttcatactagcaatcacagcacaggaggacagcattaaattttatatagcca

SEQ ID NO: 95628 - DNA, 3713 bp, Homo sapiens
atttgcctctggcaggcaaatgagcttgtcagtttctgcctccattagaccctcaacccaaaggagcaggagatttcggtagcgttttaactttatctcagaatctgaaagcggaaggccaggcaagctgcacacatcaagcgaaacgcctgaggggcggccagcgcgagggtttctggccatcgaccctcacctcccgggacttccagggtcttccccccaccccgcgcacacctccctgcctcgccccgagggcgtcacgtggcagcgtggggcccgcctcctggtgatgtcacggcgctcgcagccgtcgcgctgaagaaaggatgctcgaggatgctgtccaggtgggcggccgcgggcgcgatgcggcactgcagatcaccagcaagagcaaggagtccatatgggagttcatcaagagcctgctggatgcctggtcgggatgggtggtgatgctgctcatcggcctgctggcgggcaccttggctggggtcatcgatctcgccgtggactggatgacggacctgaaggagggggtctgcctgtctgccttctggtatagccatgagcagtgttgctggacttctaacgagaccacttttgaggacagagacaagtgtcccctgtggcagaaatggtcggagctgctggtgaatcagtcagagggtgccagtgcttacattctgaattacttaatgtacatcctatgggcgctgctgtttgcatttttggctgtctccctggtgcgtgtatttgcaccatatgcctgtggctctggcataccagagataaagaccattttgagcggctttatcatcaggggctacttggggaagtggaccctgctaatcaagacagtcacgctggtgctggtagtgtcctccggtctgagccttgggaaggaagggccgctagtgcacgtggcttgttgctgtggcaacttcttcagcagccttttctccaagtacagcaagaatgagggcaagaggcgggaggtgctttcagctgcagcggctgctggagtctctgttgcctttggtgcaccaattggaggcgtgcttttcagtctagaagaggtcagttactactttcccctgaagaccttgtggaggtcatttttcgcagccctggtggcggcctttacgctgagatccatcaatccctttgggaatagccgtctcgttctcttttatgtggaataccacacgccctggtacatggctgaactcttccccttcatcctgcttggggtcttcgggggcttgtggggaaccctcttcatccgctgcaacatcgcctggtgcaggaggcgcaagaccaccaggctggggaagtacccggtgctggaggtcattgtggtgactgccatcactgccatcattgcctaccccaatccctacacacgccagagcaccagcgagctcatttctgagctgttcaatgactgtggagcccttgagtcttcccagctctgtgactacatcaatgaccccaacatgactcggcctgtggatgacattccagaccggccggctggtgtcggtgtttacacggccatgtggcagctggccctggcactgatcttcaaaatcgtcgttaccatatttacctttggcatgaagatcccgtcgggcctcttcatccccagcatggctgtgggcgcgatagcgggcaggatggtgggaattggcgtggagcagctggcctaccatcaccatgactggatcatcttcaggaactggtgcagacccggtgcagactgtgtcacgccagggctgtacgcaatggtgggagctgcggcctgcctcggtggagttaccaggatgacggtgtcattggtggtcatcatgtttgaattaaccgggggtctggagtacatcgtgcccctgatggcggcggctgtgaccagcaagtgggtagctgatgcatttgggaaagaaggcatctacgaggcccacatccacttaaatgggtaccctttccttgacgtgaaggacgagtttactcaccgcacactggccaccgacgtcatgcggccccggcggggagagccgccactgtcggtgctcacccaggacagcatgactgtcgaggacgtggagacgctcatcaaggagaccgactacaacggcttccccgtggtggtctccagagactccgagcgcctcattggatttgcccagaggagggaactgattctcgcaataaagaacgccagacagaggcaggagggcattgtgagcaattccatcatgtacttcacggaggaaccccccgagctgccggccaacagcccacatcccctgaagctgcggcgcatcctgaacctcagcccgtttacagtgacagaccacactccgatggaaacggtggtggatatcttccggaaactggggcttcggcagtgcctggtgacgcggagcgggagacttcttggcatcatcacaaaaaaggatgttctgagacatatggcccagatggcaaaccaggaccccgaatccatcatgtttaattagcaacaaggtggcaattattttcagaaaaacactgactgtgtcatttaaaaagaaataaatgatatgttattatcccaatgaaagatcatgcattggggacagcagaaacaaaagcttttttggaaaggcggggaagaaggatgaaacctttaaaaacaaaaacaaaaacatcaatgagtaggcattttatagctttaaccccgtatgagtttcaagctgtgtttcctaatgagtttgctactgctgtgggggcatgtgggtgggtaaatgatgtaaatgatgtgatctgtacaagtatgtggagcatgaatgctgactcaagaaacttttactccttctgctcaaggctgatgtttgtaacttatgaacacacgtgaagtgttgagtccaaaagacaaaggggcatcggcatgtcagcgtccttatttattggttcttgaagttttgctgctatgttactgaatcatactaaagacatttgcgcttactttgttgaaaaagaaaaagaaattaaatttgaacacagtgaaagctgcaagtatgccagtgggtccgctcacgaccgtcctgtttcttgctcctgttctcagcctgttatctggcttatccatcagtttctgaaccaacatcaggggcacctgccatgatgagtgtgaagaaatcatttctctatgcaagactggcatcctgggactgcacgatgaactattggagcatacagtactgcggtgtgtctcctcccatacaaagggacacatccttattttgagggtatactcacccgatcattgatttgcatccccatggcatttgcttcatttatttattgcttttgcccatgcattcaatattgatcagctcagcacttccatgggccatagccggtatgcccccagcctgccataagcgtgctttcattttcaagtagcatatgcaagagtccaaacaggctacccaatgttactacttatttttcctctcaggtcttatcagatacggctgtggagaggatgaggcatatgcgttgtcagttggaatccctccaaatggattgcaagagaaatactaaattgattctaaatctgttccattatcttctctgtaggatgcaaaacatccagttgtaatgtataagcatgcacttcatactagcaatcacagcacaggaggacagcattaaattttatatagcca

SEQ ID NO: 95629 - DNA, 1610 bp, Homo sapiens
  misc_feature (1216)..(1216): n is a, c, g, or t
atttgcctctggcaggcaaatgagcttgtcagtttctgcctccattagaccctcaacccaaaggagcaggagatttcggtagcgttttaactttatctcagaatctgaaagcggaaggccaggcaagctgcacacatcaagcgaaacgcctgaggggcggccagcgcgagggtttctggccatcgaccctcacctcccgggacttccagggtcttccccccaccccgcgcacacctccctgcctcgccccgagggcgtcacgtggcagcgtggggcccgcctcctggtgatgtcacggcgctcgcagccgtcgcgctgaagaaaggatgctcgaggatgctgtccaggtgggcggccgcgggcgcgatgcggcactgcaggtgtaattagcatggtcaatgcgggagcgatgagtggctctggaaacctgatggatttcctcgatgagccgttccctgatgtggggacgtatgaggacttccacaccatcgactggctaagggaaaagtcacgggacaccgacagacacaggaagatcaccagcaagagcaaggagtccatatgggagttcatcaagagcctgctggatgcctggtcgggatgggtggtgatgctgctcatcggcctgctggcgggcaccttggctggggtcatcgatctcgccgtggactggatgacggacctgaaggagggggtctgcctgtctgccttctggtatagccatgagcagtgttgctggacttctaacgagaccacttttgaggacagagacaagtgtcccctgtggcagaaatggtcggagctgctggtgaatcagtcagagggtgccagtgcttacattctgaattacttaatgtacatcctatgggcgctgctgtttgcatttttggctgtctccctggtgcgtgtatttgcaccatatgcctgtggctctggcataccagagttttatgatttactcattatcgccttttgacagctgtgctgtaacacaagtagatgcctgaacttgaattaatccacacatcagtaatgtattctatctctctttacattttggtctctatactacattattaatgggttttgtgtactgtaaagaatttagctgtatcaaactagtgcatgaatagattctctcctgattatttatcacatagccccttagccagttgtatattattcttgtggcttgtgacccaattaagtcctactntacatatgctttaagaatcgatgggggatgcttcatgtgaacgtgggagttcagctgcttctcttgcctaagtattcctttcctgatcactatgcatcttaaagttaaacatctttaagtatttcagatgctttagagagatttttttttcatgactgcactctactgtacagattgctgcttctgctatatttgtgatataaggcattaagaggatacacacgtttggttcttcgtgccctgtttatgtgcacacatttatgcattgagacttcaagctcttcctttttttggccacgttatctttgggccttttgttaaagagttgctttggtgggccttcaattcccacgaattcttccaaacaacttttctgcaggaggatagtcacgct

SEQ ID NO: 95630 - DNA, 3891 bp, Homo sapiens
atttgcctctggcaggcaaatgagcttgtcagtttctgcctccattagaccctcaacccaaaggagcaggagatttcggtagcgttttaactttatctcagaatctgaaagcggaagtttttcataattcttcgcgaaaggccaggcaagctgcacacatcaagcgaaacgcctgaggggcggccagcgcgagggtttctggccatcgaccctcacctcccgggacttccagggtcttccccccaccccgcgcacacctccctgcctcgccccgagggcgtcacgtggcagcgtggggcccgcctcctggtgatgtcacggcgctcgcagccgtcgcgctgaagaaaggatgctcgaggatgctgtccaggtgggcggccgcgggcgcgatgcggcactgcaggtgtaattagcatggtcaatgcgggagcgatgagtggctctggaaacctgatggatttcctcgatgagccgttccctgatgtggggacgtatgaggacttccacaccatcgactggctaagggaaaagtcacgggacaccgacagacacaggaagatcaccagcaagagcaaggagtccatatgggagttcatcaagagcctgctggatgcctggtcgggatgggtggtgatgctgctcatcggcctgctggcgggcaccttggctggggtcatcgatctcgccgtggactggatgacggacctgaaggagggggtctgcctgtctgccttctggtatagccatgagcagtgttgctggacttctaacgagaccacttttgaggacagagacaagtgtcccctgtggcagaaatggtcggagctgctggtgaatcagtcagagggtgccagtgcttacattctgaattacttaatgtacatcctatgggcgctgctgtttgcatttttggctgtctccctggtgcgtgtatttgcaccatatgcctgtggctctggcataccagagataaagaccattttgagcggctttatcatcaggggctacttggggaagtggaccctgctaatcaagacagtcacgctggtgctggtagtgtcctccggtctgagccttgggaaggaagggccgctagtgcacgtggcttgttgctgtggcaacttcttcagcagccttttctccaagtacagcaagaatgagggcaagaggcgggaggtgctttcagctgcagcggctgctggagtctctgttgcctttggtgcaccaattggaggcgtgcttttcagtctagaagaggtcagttactactttcccctgaagaccttgtggaggtcatttttcgcagccctggtggcggcctttacgctgagatccatcaatccctttgggaatagccgtctcgttctcttttatgtggaataccacacgccctggtacatggctgaactcttccccttcatcctgcttggggtcttcgggggcttgtggggaaccctcttcatccgctgcaacatcgcctggtgcaggaggcgcaagaccaccaggctggggaagtacccggtgctggaggtcattgtggtgactgccatcactgccatcattgcctaccccaatccctacacacgccagagcaccagcgagctcatttctgagctgttcaatgactgtggagcccttgagtcttcccagctctgtgactacatcaatgaccccaacatgactcggcctgtggatgacattccagaccggccggctggtgtcggtgtttacacggccatgtggcagctggccctggcactgatcttcaaaatcgtcgttaccatatttacctttggcatgaagatcccgtcgggcctcttcatccccagcatggctgtgggcgcgatagcgggcaggatggtgggaattggcgtggagcagctggcctaccatcaccatgactggatcatcttcaggaactggtgcagacccggtgcagactgtgtcacgccagggctgtacgcaatggtgggagctgcggcctgcctcggtggagttaccaggatgacggtgtcattggtggtcatcatgtttgaattaaccgggggtctggagtacatcgtgcccctgatggcggcggctgtgaccagcaagtgggtagctgatgcatttgggaaagaaggcatctacgaggcccacatccacttaaatgggtaccctttccttgacgtgaaggacgagtttactcaccgcacactggccaccgacgtcatgcggccccggcggggagagccgccactgtcggtgctcacccaggacagcatgactgtcgaggacgtggagacgctcatcaaggagaccgactacaacggcttccccgtggtggtctccagagactccgagcgcctcattggatttgcccagaggagggaactgattctcgcaataaagaacgccagacagaggcaggagggcattgtgagcaattccatcatgtacttcacggaggaaccccccgagctgccggccaacagcccacatcccctgaagctgcggcgcatcctgaacctcagcccgtttacagtgacagaccacactccgatggaaacggtggtggatatcttccggaaactggggcttcggcagtgcctggtgacgcggagcgggagacttcttggcatcatcacaaaaaaggatgttctgagacatatggcccagatggcaaaccaggaccccgaatccatcatgtttaattagcaacaaggtggcaattattttcagaaaaacactgactgtgtcatttaaaaagaaataaatgatatgttattatcccaatgaaagatcatgcattggggacagcagaaacaaaagcttttttggaaaggcggggaagaaggatgaaacctttaaaaacaaaaacaaaaacatcaatgagtaggcattttatagctttaaccccgtatgagtttcaagctgtgtttcctaatgagtttgctactgctgtgggggcatgtgggtgggtaaatgatgtaaatgatgtgatctgtacaagtatgtggagcatgaatgctgactcaagaaacttttactccttctgctcaaggctgatgtttgtaacttatgaacacacgtgaagtgttgagtccaaaagacaaaggggcatcggcatgtcagcgtccttatttattggttcttgaagttttgctgctatgttactgaatcatactaaagacatttgcgcttactttgttgaaaaagaaaaagaaattaaatttgaacacagtgaaagctgcaagtatgccagtgggtccgctcacgaccgtcctgtttcttgctcctgttctcagcctgttatctggcttatccatcagtttctgaaccaacatcaggggcacctgccatgatgagtgtgaagaaatcatttctctatgcaagactggcatcctgggactgcacgatgaactattggagcatacagtactgcggtgtgtctcctcccatacaaagggacacatccttattttgagggtatactcacccgatcattgatttgcatccccatggcatttgcttcatttatttattgcttttgcccatgcattcaatattgatcagctcagcacttccatgggccatagccggtatgcccccagcctgccataagcgtgctttcattttcaagtagcatatgcaagagtccaaacaggctacccaatgttactacttatttttcctctcaggtcttatcagatacggctgtggagaggatgaggcatatgcgttgtcagttggaatccctccaaatggattgcaagagaaatactaaattgattctaaatctgttccattatcttctctgtaggatgcaaaacatccagttgtaatgtataagcatgcacttcatactagcaatcacagcacaggaggacagcattaaattttatatagcca

SEQ ID NO: 95631 - DNA, 3538 bp, Homo sapiens
atttgcctctggcaggcaaatgagcttgtcagtttctgcctccattagaccctcaacccaaaggagcaggagatttcggtagcgttttaactttatctcagaatctgaaagcggaaggccaggcaagctgcacacatcaagcgaaacgcctgaggggcggccagcgcgagggtttctggccatcgaccctcacctcccgggacttccagggtcttccccccaccccgcgcacacctccctgcctcgccccgagggcgtcacgtggcagcgtggggcccgcctcctggtgatgtcacggcgctcgcagccgtcgcgctgaagaaaggatgctcgaggatgctgtccaggtgggcggccgcgggcgcgatgcggcactgcaggtgtaattagcatggtcaatgcgggagcgatgagtggctctggaaacctgatggatttcctcgatgagccgttccctgatgtggggacgtatgaggacttccacaccatcgactggctaagggaaaagtcacgggacaccgacagacacaggaagatcaccagcaagagcaaggagtccatatgggagttcatcaagagcctgctggatgcctggtcgggatgggtggtgatgctgctcatcggcctgctggcgggcaccttggctggggtcatcgatctcgccgtggactggatgacggacctgaaggagggggtctgcctgtctgccttctggtatagccatgagcagtgttgctggacttctaacgagaccacttttgaggacagagacaagtgtcccctgtggcagaaatggtcggagctgctggtgaatcagtcagaggtgctttcagctgcagcggctgctggagtctctgttgcctttggtgcaccaattggaggcgtgcttttcagtctagaagaggtcagttactactttcccctgaagaccttgtggaggtcatttttcgcagccctggtggcggcctttacgctgagatccatcaatccctttgggaatagccgtctcgttctcttttatgtggaataccacacgccctggtacatggctgaactcttccccttcatcctgcttggggtcttcgggggcttgtggggaaccctcttcatccgctgcaacatcgcctggtgcaggaggcgcaagaccaccaggctggggaagtacccggtgctggaggtcattgtggtgactgccatcactgccatcattgcctaccccaatccctacacacgccagagcaccagcgagctcatttctgagctgttcaatgactgtggagcccttgagtcttcccagctctgtgactacatcaatgaccccaacatgactcggcctgtggatgacattccagaccggccggctggtgtcggtgtttacacggccatgtggcagctggccctggcactgatcttcaaaatcgtcgttaccatatttacctttggcatgaagatcccgtcgggcctcttcatccccagcatggctgtgggcgcgatagcgggcaggatggtgggaattggcgtggagcagctggcctaccatcaccatgactggatcatcttcaggaactggtgcagacccggtgcagactgtgtcacgccagggctgtacgcaatggtgggagctgcggcctgcctcggtggagttaccaggatgacggtgtcattggtggtcatcatgtttgaattaaccgggggtctggagtacatcgtgcccctgatggcggcggctgtgaccagcaagtgggtagctgatgcatttgggaaagaaggcatctacgaggcccacatccacttaaatgggtaccctttccttgacgtgaaggacgagtttactcaccgcacactggccaccgacgtcatgcggccccggcggggagagccgccactgtcggtgctcacccaggacagcatgactgtcgaggacgtggagacgctcatcaaggagaccgactacaacggcttccccgtggtggtctccagagactccgagcgcctcattggatttgcccagaggagggaactgattctcgcaataaagaacgccagacagaggcaggagggcattgtgagcaattccatcatgtacttcacggaggaaccccccgagctgccggccaacagcccacatcccctgaagctgcggcgcatcctgaacctcagcccgtttacagtgacagaccacactccgatggaaacggtggtggatatcttccggaaactggggcttcggcagtgcctggtgacgcggagcgggagacttcttggcatcatcacaaaaaaggatgttctgagacatatggcccagatggcaaaccaggaccccgaatccatcatgtttaattagcaacaaggtggcaattattttcagaaaaacactgactgtgtcatttaaaaagaaataaatgatatgttattatcccaatgaaagatcatgcattggggacagcagaaacaaaagcttttttggaaaggcggggaagaaggatgaaacctttaaaaacaaaaacaaaaacatcaatgagtaggcattttatagctttaaccccgtatgagtttcaagctgtgtttcctaatgagtttgctactgctgtgggggcatgtgggtgggtaaatgatgtaaatgatgtgatctgtacaagtatgtggagcatgaatgctgactcaagaaacttttactccttctgctcaaggctgatgtttgtaacttatgaacacacgtgaagtgttgagtccaaaagacaaaggggcatcggcatgtcagcgtccttatttattggttcttgaagttttgctgctatgttactgaatcatactaaagacatttgcgcttactttgttgaaaaagaaaaagaaattaaatttgaacacagtgaaagctgcaagtatgccagtgggtccgctcacgaccgtcctgtttcttgctcctgttctcagcctgttatctggcttatccatcagtttctgaaccaacatcaggggcacctgccatgatgagtgtgaagaaatcatttctctatgcaagactggcatcctgggactgcacgatgaactattggagcatacagtactgcggtgtgtctcctcccatacaaagggacacatccttattttgagggtatactcacccgatcattgatttgcatccccatggcatttgcttcatttatttattgcttttgcccatgcattcaatattgatcagctcagcacttccatgggccatagccggtatgcccccagcctgccataagcgtgctttcattttcaagtagcatatgcaagagtccaaacaggctacccaatgttactacttatttttcctctcaggtcttatcagatacggctgtggagaggatgaggcatatgcgttgtcagttggaatccctccaaatggattgcaagagaaatactaaattgattctaaatctgttccattatcttctctgtaggatgcaaaacatccagttgtaatgtataagcatgcacttcatactagcaatcacagcacaggaggacagcattaaattttatatagcca

SEQ ID NO: 95632 - DNA, 101 bp, Homo sapiens
ctatgttagccaagagctagacctacaaaggtcaagaaaacaaagtatctccctcttcaaaacacaagagttcattggaggacacaggtaatggcagcgcc

SEQ ID NO: 95633 - DNA, 600 bp, Homo sapiens
gtcgttaacagatgttaaatgttcattcattccacaaacagtaccatgtgccatcacgtaccttaagcccctggtcatataagattccttcagaaatcttgctgtctattgtctgaaggaaggtataagcaaatagcataatgtgtttatttaacaaatatatatgatgaattcatcctcactccaggcactaagaatatacaaagacatggtgactgttcttaaagagcctactatctagctaggccttaaagaagactaatataggaataattagttttgtatagactttcatgtacttttcacaaaccttaactcatggttacaataacctcataggcattgttatccttattttacaagggctaagattagagccaaaagttgttatattatttagtaaaggttagacaggtaagctgagatttgaagtcaagcactttgcaggattaactgaaatcaaggaggggatgcattctagtcaagagcagaagcaaagctaaaaggtgctcgcttcagcagcacgtatactgaaaattagaacgatgcagagaagttagcatgacccctgtgcagtgatgacacacaaattcgtggaaa

SEQ ID NO: 95634 - DNA, 279 bp, Homo sapiens
agatacgaatcgagccggtaccctcgccgctcgtggttgttcccgctgtagaggggaatctgtcaaaatagccactcggcagcatgtctgcatggtaacgggcggcgtacatctagcagaggatgatgaaatattatttggaaggggagaaaacattacagaaaattaagtagaaagaaatgagagttcctaactacttacagaattttctggtagaaagtagaaaaagaaaagaaaaactgttcctgccttctccataaagtccactcaccttttttt

SEQ ID NO: 95635 - DNA, 826 bp, Homo sapiens
cttatataaacttcatttatttttgacaaaagagcagaggtattttaattgacaaggagagtcttctgaagaaatagtactggaaaaactgaatattcacatgtaaaagatgaatatcaactcatatctcctgctatataaaaaaacccaaaatgcatcatatattaaaatgtaaaatataaaagtatagaatttctagaaagagacaataggagaaaatcagtgtaatcatggattaggcaaagatttcttacatataacaccaaaagtgcaatttatataagaaaatgttgctatattggactttgtaaaaaaaacttctgcactacgaaagacactattaataaagtgaaaagaaaagccatagactgggagaaaatatttgtgaatcatatatttgacaaaagactggtaagcatataaagtaactagaatgttcctacttgctgtgagactgaaaaatagaatggttactttggaaaacagtttggtcgtttttcacatgtttgaacaaacatacataccatataattcagtaattctactagtaagtatttacctaagagaaataaaaactgatgtttatacaaaaaatggtacatgaatgtttatagaaactgtattcataactgtccaaaactaaatacaaaccaaatattctccaaatagtggataaaacacctgtgatacctccatacaatgggtactcctcagcaatgcaaaggaatagactactaaggcacacagaaacatgggcaaatcttaatgcattaccctgaatgaaacaatccagacacaaaaagctacatacaatataattcaattt

SEQ ID NO: 95636 - DNA, 617 bp, Homo sapiens
cagatcagccagctcacaaagaacattagctgcaggatgttctacctccagtaacttcaggatggttgcaccatcattagtaatggttacatcaccagtatcatccaccaacattttatccaagacaacggaccaagagcactttttacaatattggcaatcgaagctgcagccataatgttctgggagcggatcgcctccccactgctgcggtctccgaacacggacaaaggcccctccatcttcctggcggcggtacataccgaattctgctcctactgcgggcaaccagttatcgtggcccctcggccaaccggctaccacagcagtggcgacggtgtggagcggacccgagtgatgcaccgccccatccgcttcccggctgccccggctggccgcggggcacggcgggaagcagatctctgaacttttattttgccatttgaaatattagctcttcttcccaactttcaggcaactatcaaagtactaaacaggatagacaacaaaatcttgtgacaacatttaaatgtatgaaatgtattttattactaaaatatataaaatttaaaaattacatttgaattatgtacttcaaaaataaaaattctaaatgt

SEQ ID NO: 95637 - DNA, 203 bp, Homo sapiens
agcaaggcaggtgcccaagtccctccatccctgacatctgggtctctgtgacctggagttgtgtcagagaggtccagatcctggctgtggggcttctgggatggcacattgtgaaagcggggcccctgacctcctgctgctcagcatccatagtggcatgctccctcctccgtgtaaagggctggagtccacactggtacccc

SEQ ID NO: 95638 - DNA, 798 bp, Homo sapiens
ctcctagaatcttggtgggcctgtgactacaaggaccagaagaatatggtagaagtggtttcagttctggaatcaaccctcaaccagtcaggtggcttctgcttccttttttggaccactcaattttgcgatgctccctctgagaagccagccaacatgctgtgacatgcacaaccacacggagagaccctgtggaggcactcttggcaactgccagcttcaactgtcagtcatgggaggcaaccatcttggatgcccagcccagtggagccttcaggtgactgcatcccagccaccatctgactgcaacctcaccagcaagcccacaggagatccacctagctgagcccaatcaacccacagaaacatgaaagaagataaattgtggctttgagtcactgaaatttggggacatttattatggagcaatagataaccagatacccctcttctaatttgtcatgtatgtgaaccagaccagacctggccactaagtgagtaactgtctccatgaaggaaccattagaaatgtcctgcttttctttgggtctccattttcccatctgggaaaaaagaggtagggctagatcagcagtcacagtctagagtctatgatgggtagtcaatagttagaaacaatatttctaaaaacctgatgaaagccacacatttacatgtgatgaagccactctggctaactaaaaaccaagtttccttgttttgggttgaaattacatcaactccgtgtatcagcactgttccttctgctagtcagaagctggttagcagtcccagatg

SEQ ID NO: 95639 - DNA, 336 bp, Homo sapiens
ctatttcctgaacacatgaaggaaagcaatatggtaaaatacacaaatgcaacccaaagtatagtcttccctcactggggaaatcccttggaagtaccccttagctcatattgcccctcagcgaataattattgaacagcttctataagctgtgctttctgctggattgtatcagacttgtaccaaaataaggtgcaaatgaccagtattatagtctttctgtgggatatttgaattttcatttgagtttattaaaacatattttaatgagaagtgtgaatacttttttgctttttgaaataggatcttgctccgatacccaggctggagtgcagt

SEQ ID NO: 95640 - DNA, 401 bp, Homo sapiens
gaatttttttatgggcagattaaaaaggaagttaactatgtaaagtaaggcattgccttcccaccccatcccacctcagttcgtgttaaattatgaatttttctaagagagttctttaatgacatggatagagaggaagctgaggtggcagtagagtagggagtggaaggcaaatacataagatactattaaactgtgaagctgtttgttacaattccaagattttataatttctccaacaaaaaacatttgtattttcttcccagtttaagttcaatgttaatttgagaaataattctactctcaaacttcatgttatgctgacagttcaactgatgctgtcaaaatgtgaattactaacttcagtattctctattcatctgatttttcttaaaatgttt

SEQ ID NO: 95641 - DNA, 510 bp, Homo sapiens
attttatgatgaattttaggaaaatgagtactccttgtgaaccaaagcagcagctctgtggtctgagtgagtggcagggagctctgggcatggagtagtgtttcacctcttctccaggggacagagcctcagaggccccagctggaaatgggcattggaatcacagtttcaccaaggtattggtgagacactactacctgccaggagggaatacgaaacattaagaaacaaaataaatgtccatattccatttcaacgagaaacacatagtcaatggctaacttcagtcaatgccagcaaaagtgtttctttatcctgggacaagtacatatgtaagacccatttacttgcaaatcaacttacataaacacaaactagcaaacaacacatctcaatcacaagttaaagttatttattccattttattttatttattggttattattttctgagacagggtctcttgctctgtctcccatgctggaaagcagtggcgtaatcaagggcccc

SEQ ID NO: 95642 - DNA, 397 bp, Homo sapiens
aatagatgctgggcgggcagccaaccaagagcactgcagtagtccaccctaccctaatcctgggttttgttttctgcagtttcacttacccacagtacaacacaataaaatactctattttgagagagaccacagtcatgtaacttttattacagtgtatttttataattgttctattttattagactgttgataatctcttactgaatctaatttataaatttaacgttattatagatacatgtgtataggaaaaagtatacatagggttcgatactatccatgatttcaggcatcctctggggatctatgaatgtatcccttgtggataaccgggagctactgtgccttgtatttttgtttgtttgtttttttgttttcgtttttgtttttgaga

SEQ ID NO: 95643 - DNA, 878 bp, Homo sapiens
cttcaggacagcactggagaaaaagaaactcttctcagttgactggcatgactagaggctggtaatgacaaggggctgaagttttcactaccatgagttgtcacatctaatggacttgacagccggagtgtctttaaacactaaacctagctgggtgtttctcaactctgctgcatcttagactcatgtggaaaattttatcccaaagaagggaaagagggcagtggacaggaggagagaagagaaaaagaaaacaccaatgcttggatcccactcctgggagactaatttaatgatctgggaagaataaatcctcagatccttgcccatgtgctcacttggctccagagcctataaccgagtgacatctaaaaacagagttatccaagaacactcaactggtaagggaagaacgcctcaattgagcatgtgtacaactccagtaaacacactgtgcctgcagcccctcccaactgctggcagaccactctacatgcagacagctcaccccaaggagagaatcaggggagaagagacacaaccgcctgaaagcatgccaacatattccccaagtcaaaaggttcaaaccatacacttgattctctcaagttgcttgcttggccttctttcaagtgtactttacttccctccatccttgccctaaaactttttactaaactttcactccataggctgggcccatggtaaacattccactttggctcaatggcagattgatcaatgaaagttaattgatcaattaactaagatgttagtctctttgccttcaagtactataagggaaaatacaacataaaagtaagaagtttaatgctccctgttgaaaataaagaaagagaacaaacccccaccctttt

SEQ ID NO: 95644 - DNA, 816 bp, Homo sapiens
aacccggatgcagccgcgatctcgggcggtgcagccgccgcttccgcccggcagtggggcaagctgaagtgagaagccgctgggcctgagaggagctctttaattccgggaggtgtgcgactagcggatcagcgggctggctttccgtgctgtgcggagcctttgggcggcggtcgtcttggaccggaggattccaagggctcgggtcgtctaagggtcggggagccccggagacttgatcccgccctgcagctagtgtggcccctcagggtttggggagtcccactctggacgggaccctgtgatgcgtaggcaggaataagatcccccgcccgtgccggtgtgccactgcttgtgtaaatgggccccttgaaacccccagcagtcgctctccgctgaaccttcttcgaattttctctcacctcatctccttttccttaaacgtctgttttgaatatcagacccctgtagcgttgaagccagcgctcgtttaattaatgcaggtgggaacgctgtcgccacagtttgcagtctattcattcagaataacccgccagtcagccgactgctcagagctcggaaagacccagctccaaactaggagtttcgagattttaattggcaagttggacccgaaagagttaatggagaagactacttaaatctatctagaacaagtgatgagatatttggagatgtgtttgcatgcttggtgaatgcagacggccaaatggtacatttccagataatattcttggattaatgtatttgaatgcaccctacgtacattttttgagaggaaaaaaggaagaaaga

SEQ ID NO: 95645 - DNA, 404 bp, Homo sapiens
ttcaacaacaactaattagggagacgcgcatatcatggctgcaagctcagatgctgaatccccaaccagagaagacctttatacgaaataaagccgcccaagtcttcgccttgctttttgttacagaatatctcactaagtggcccaagtatttttgtttacattctctcagtagtggacctaaatccaaggggagtagatgtgtgcctgcgaatcctcatggctatcgattcagagttggtggatcgtgatgtggtgcatacgtcagaggaggctcgtaggaatactctcattaaagataccatgagggaacagtgcattccaaatctggtggaatgatggtaccaaatattacaaaattatcagtatactaattctgaagtgaccgtcagtgctttgaagta

SEQ ID NO: 95646 - DNA, 624 bp, Homo sapiens
atacatataacacaaagtgtgtgttaactgtttatgttttcagtcaggcttccggtcaacaataggctattagtagttaagtttctggggagccaaaagttataccacagagttttgactgcatgaaaggttggcacccctaacctccaagttgttcaggggtcaactatattaaaagtctatgatatactcttggctttccagaaacttaatttgaagaagttaatttaaaaaccatagttttctatatattaatttgacagttcagcctttattaggtcaaagtttcaaaagagctcagctgttagatgtttagtaatgaatgccatcagcctttatgtcatcaggattcaggatgtttaggtgtgtgtttgctcagggctcagaaatagtcttggtggtgggtttacagctgcccatcttgttaggtgtggaacctgccttagcgctggggctgctgccagtctatgggaacattccctcccgtgcccttcctacactgtagaggcctacaggttgatgaccacttctgggacccttcattacacctctcactgaaagcatgtagagttgtgtaagtgacagcagccagccttgactcatcaaatagtctttcagtttgta

SEQ ID NO: 95647 - DNA, 1129 bp, Homo sapiens
agatctagatatatttacatgtagagatagatgatagatataaatagataatgataaattgatagacacatacatatctagatagataaatatagatagattatagaatgaataaatacatacatatatttatctaaatagatagagatggctggatggatagatggatgaatggatggatagatgattgatagacagatagatggtcctagccacactcaaagctaggagattctacagggtgtaacaccaggggacagagatcaaaagaattctgcctatggccagtaacttgagagttaagtagtatcatttctattttctagaagggaaactgaggtttagagagataactcacccaagttccaacagtggccattggccaagctggagttcagaccacgccctcctgcctctcaatgggtactgctttgttgtcattgtgacaacccttccttcagtgccccgagtaatgctaattacctgcacactgatgtggactgttgaggcaaaacatccagtactttctctagggaacactccttgtgctcatcatgtactgtgcagcatatatcttggcgaccccctgccaaatatgagctccaagaaggcaagggctgcatccatctggttcatggccatatctaagaccccagacaggttcctggcccatagtgtgccctctgtaaatagtcattcagtcattcaacaaatgcctgttgagctggactacatactgcagataccaagataatcaagacatagctctgtcttcccgctcccctccctatctagcatagcagaaacataaaataaaccacaagatagcgtgatatggcacaaacattactatggccaccttctcagggttattcattcttatgtccccagagcctaaaacaatagttggcacatagtaggtgctcaataatgtttgcagatcatttgtatgccttgctgtcttctctctgcatatggtagaaaatttagaagtcacgtgaggttaattggtcaagagaaaattaaaagtacatataacagcctcccagtctagcttccgaagtctctgacccatcctacaatcctggcacccccctttttgagcagagctttgcatttctaaatagga

SEQ ID NO: 95648 - DNA, 727 bp, Homo sapiens
gctttgtttcttctctccctcgcttccttctcttcttccttgcttctatttggtgccaaacaccgcgttttatttatgatattaaaaagtaaagtgagtgtgatggtggctggtcacccattgttttgaattaataacagaaaaaaagaaatattttagtggcccatatgtttatttttatgtgtttatgtatgtggttttggggttttttagtgccttctatccctagaagtcactttaatctcaagactgtccaaataaacttttcagcaaaagcatcaggtgagaagtctgggagaaaccatcctataaaacaatatgaacagaatggagcagtgaacacaatgctcccattctttctctgtcctccaagccatctttcttcttatagactccctgccatgtgttgcctggctcaggttctacatgttcatcctgccatattggcactggcttctttgaattctgctctagttctgagacggtggcgctttattcactactaactcccaggaccagtgcatgctattcttcaatttattgtgtagattaaaaggtatcttcttaaaaaatgatgcatgctgctgggaaatacagacactttaattttacttagaatcttacttggaatgtgttagtagccagataaacaagcaagactgactcaggaaagaagccagagaaagggtaagtgtgtcaagcaaaagtagacagcagcaccaaattg

SEQ ID NO: 95649 - DNA, 767 bp, Homo sapiens
aggtttaggtgggttgcctggctagctccagaactggtatacaggggcttgagacaagaatggaagcccgaaggaattcaaaggtatgcttacataggaggagatagcgtgcaattgcccagagaaatccttgcagcttcaacagcccttcccaacaagccaccccttagaacagtcaccaaaaatacgtaaaatattgccagctatgaagaattcttttaggcggcgccgtgacgcgcctcgggaacggtcctcggcgcgcgccgctctcttaccctcgggcctcagaagtcggtgccagtgaccggaggcgacagcggcagcgagtgggtccttgtgagctagaagaatcctgcaaaaatgtctctctatccatctcttgaagacttgaaggaagacaatgtaactcaggctcaaactgctttttctgcaaaccctgccaacccagcaattttgtcagaagctgctgctcccatctctcaagatggaaatctctatcccaaactatatccggagctctctcaataatacatgggcctgagttgaaatgaagaagaaatacgtgcaaatgtggccgtggtttctggtgcatcaattcagaggtagttggtagcaagatcttccggtatgatctgtatggtggttcctgtaactgaaaatgatgctggaattcgtagagcagaaattaaacaagggattcgcgaagtcattttgtgtaaggatcaagatggaaaaattggactcaggcttaaatcaatagatatgat

SEQ ID NO: 95650 - DNA, 476 bp, Homo sapiens
gcataatttaggttaagataccaaaaataagactatacatggacttccatggacttttaagacccatctaagattagagctaatcttggggtactgggaatataaaagcttatcattctttattttttagcataagtaatcaaagaatcaagctaactgaccaatatctatcttttccttggtaagtaaggcctctccaggaagttcaggcccttcagaaaggcttcaggaggaagacttagcagagagactctaaatcttccaagtttgttcccatctagtcttaccccccaccaagtttccatctgagaaaacgttgagtaagcatcaacagactttacggaaagattgttctcatagcctggcaaaaagagctctatccagccacaaccatcacatggtcaggaagatgtccccttgctgaatcacccccaccacttcctgaagttctctgggattttgggaggaaatatgtc

SEQ ID NO: 95651 - DNA, 906 bp, Homo sapiens
agcggaggcggccgccatgttgaatgtggctccgcccggggagctgctggagtacgagggagccaagaagggctccaaggacctctgcctcttctctgagctcgttcttaggcccctctgccgtctgcacgctcctttccagccacccggcctcccgatgccggcctagcacgttcctcgcgccaggcttttgcatctgcccttcccactgtctttcgtgtgcaaacgccacaggtcctgcgcaccgcacccctcatggaatagcgtcgcctcctctctaccttcacacacgccccgaaacttgcctctcatcctgtgtctctatagatttttgcaccatctgaccgacgaacccctacccttccctagaccatgtcacgattccgtcgcatcctctgccattgtccctcggaatattcctagatggcatttatcactgtggatagttaccactactcagcgttttggctaagatcaagtgttccatcatcgtgggtggctcatacgtgtaatcccagtactttggaaggtggaggcaagaggactgcttgaggccaggagtttcagatcagcccaagcaatatagcaagacctccatctctacaaaagatttttaaaaattagccaggtggtggcagcagacgcttgtgcagctatacgcaagattaaggctgggacttccttggcaagaagcaggagctgctgaagttgctggtcaacctatgggtgaagctgtcccagctgtgcatcaccaatgtcagcagtcccgtctttttgacaccagggaccagtttcgtggaagataattttcccatgaatgggggcagggggatggttttgggatgattcaagcacattacgcttattgcgtacaccatctctattattacattctaatatatgata

SEQ ID NO: 95652 - DNA, 688 bp, Homo sapiens
agcttccatagggggaaatttaaattttttttacaagttgtttaattataatgtgctttaaaaacactttagcatatcataaaccttcaaaacaaaatgagtaatcatcttctgagatccatagaaaatgtttcttaaatgtcactttcaattaccacttctggagctaacttgcaaaacaattgtgtttccaccaactgaaatatgttttcaccaaatttaagataatctgtggtcagtgtgagctttgtcttgatttaggaggaggaaagcaaagttccatttatgaatactttgaaaattttcagaaattctcctaaattgtttcagcaaccggggccaaaagagaggcctgggaatcccaaggtgaggagggaaacttttaaaagttacacttatgggccaggcacggtggctcacaccgtaattccagcactttgggagactgaaatgggtggatcacttgaggccaggagttcaggaccagcctggtcaatatggtgaaaccccatctctactaaaaatacaaaaattagcctggtgtggtggtgcatacctgtaatcccagccacttggcaggctgagacatgagaatcacttgcacccaggagacagaggctgcagtgagtgagatcatcccactgcactccaacctagacaacagagtgacactctgtctcaaaaaaaa

SEQ ID NO: 95653 - DNA, 748 bp, Homo sapiens
agctccgtgtgctcagcctcagagccgtaggcgagagcgcctgtctgcatgagtgagcatatgggtgtttttgagtctgtgggtgtcacagagaggagatcgggagctgcctgctcacaggcactttgggaccccgaaagaaaaggctgtgccgagagagttcttccagtcagaggtgtcatgaagactggacatgggcctatcagggccatgggcatgatgtcagccaaggaactcgcggcctgcctctgccaagagaccagcatctcggcctgagcactcccagcctcccatcgccttcaacctggctgcattcagctgccatgcccctacctccttgtgtggtcagcaccctccaggacttcatcttgggtcacccaaaggccgaggacattgctggccagcaggaaattcatggtgcatccaggaagacttccaagaggtggtggagcagggggcgccacacccagacagctgtgtgtaattgcgcagctgcgggctgctgcgggtgctggccggcagtgcattctgggcacactggactgtgtcaccgcatgcaggctgtggccggagggggaactgctggccgccaaggcctatgtgcctggaaaccagcagggctgctgcaggaggagggctgcagaatgctccagctcagacctgactcagggttttagagggcatagggcataaggctgtggacatagacagccctactgcgcaggaagagcataaaccagccggaggg

SEQ ID NO: 95654 - DNA, 3538 bp, Homo sapiens
  misc_feature (152)..(152): n is a, c, g, or t
  misc_feature (357)..(357): n is a, c, g, or t
  misc_feature (378)..(378): n is a, c, g, or t
  misc_feature (383)..(383): n is a, c, g, or t
  misc_feature (436)..(436): n is a, c, g, or t
cgcagaggtgtcctcagtgcccggagaggttggcagtgtcggccccgagggaagcgtggagcggacggccgacaggggatttctgcccaaacttcatcaccaactctttctgagagcaaaaacatggggccgagtccggcagctgcacgcanaatccaactctctggcagctctcggcaccgacgagctccagatcccgcgttcgcatcccggcgctttgcgcgcagagctaagccttcggacccgtggactgcagcccccgcgcgtcgcggtaaagcgggtcgcgtctccagcccccgaggcgcagcgacggtgggagccggctcggcgttgggggcgggggcggggccggcgaanggggagggctgcgcggcggangggangagccgcggcgacagacggcggcgcgcaccaaccgggcgccggctggcagganccgcgcagaggctggtccgagcgcgttgcgggcgcccggcgtaaggggagtcgggtagcagcatcctcctgggcgccgctttcgcgcggcggcggcggctgcggcggggtctttctttgcttaaatacctcgttggccagaagcgctggtaccgggggcgggttgggtcgggtcgggcagtgctgcacacctgggtttccttgcctagagctgtgtgttcggggtcctttggtccagtcggaggctgcggagcggcgggggttgcctgcgctgtccgcccgggcatcctcccggtgatggaagcagccgccgccgccgctgcggggtcgcgctgtgccccatccaccgctgccagagaggtgggaaaattcgccgcacggaggccgaaagcgagaggggctgcgccgctatgccgggagctgagtcccatataagccgcccccagccatcgcccccagccggcttcgttcccctgagcgagacaggaagctgcggtcccgagaaagcggaggagacgtcgctggagccgggaggcgccgggttcggcggagcgcggagcggggctctgggccgcgtgaaagtttttcttcccgagccgcagggcgcccgctgcccggaaactgcccagggataagtcggccgactccccagacccctcgaaggtgcggggacccccagcggaagcgagagggagcgaaatcgaggaacgagtgacagccggacagtccgccgggcggtgatccggggccgctcccgggcgcgccctcggctccaggtcctacccggagccgctgccatgggagagccagccttgggcgctggggaccagccgccgcgcccgcctcggagtcgcggcccgagtcccggcgccagcagccagcccgctgcgtccccttcccgggctgcagggctgcctccgccgcgccgccggcccggattgtgcctgtgatgagccgcagcccgcagcgagctctgcccccgggcgcgctccctcggctgctccaggctgcgcctgcagccgcgccgcgtgccctgctcccgcagtggccccggcgcccaggacgccgctggcccgcgtcccctctcggaatgaaggtgttccgtaggaaggcgctggtgttgtgcgcgggctatgcactgctgctggtgctcactatgctcaacctcctggactacaagtggcacaaggagccgctgcagcagtgcaaccccgatgggccgctgggtgccgcagcgggggcagccggaggcagctgggggcgcccagggccgcctccggccgggccgccccgtgctcatgcccgtttggacctccgcactccttaccgccctcccgctgccgccgtcggggcggctcctgcagccgcggcagggatggcgggggttgcggcccctccaggcaatggcactcggggcaccgggggcgtcggggacaagcggcagctggtgtacgtgttcaccacgtggcgctctggctcgtcgttcttcggcgagctattcaaccagaatcccgaggtgttctttctctacgagccagtgtggcatgtatggcaaaaactgtatccgggggacgccgtttccctgcagggggcagcgcgggacatgctgagcgctctttaccgctgcgacctctctgtcttccagttgtatagccccgcgggcagcggggggcgcaacctcaccacgctgggcatcttcggcgcagccaccaacaaggtggtgtgctcgtcaccactctgccccgcctaccgcaaggaggtcgtggggttggtggacgaccgcgtgtgcaagaagtgcccgccacagcgcctggcgcgtttcgaggaggagtgccgcaagtaccgcacactagtcataaagggtgtgcgcgtcttcgacgtggcggtcttggcgccactgctgcgagacccggccctggacctcaaggtcatccacttggtgcgtgatccccgcgcggtggcgagttcacggatccgctcgcgccacggcctcatccgtgagagcctacaggtggtgcgcagccgagacccgcgagctcaccgcatgcccttcttggaggccgcgggccacaagcttggcgccaagaaggagggcgtgggcggccccgcagactaccacgctctgggcgctatggaggtcatctgcaatagtatggctaagacgctgcagacagccctgcagccccctgactggctgcagggccactacctggtggtgcggtacgaggacctggtgggagaccccgtcaagacactacggagagtgtacgattttgtgggactgttggtgagccccgaaatggagcagtttgccctgaacatgaccagtggctcgggctcctcctccaagcctttcgtggtatctgcacgcaatgccacgcaggccgccaatgcctggcggaccgccctcaccttccagcagatcaaacaggtggaggagttttgctaccagcccatggccgtcctgggctatgagcgggtcaacagccctgaggaggtcaaagacctcagcaagaccctgcttcggaagccccgtctctaaaaggggttcccaggagacctgattccctgtggtgatacctataaagaggatcgtagtgtgtttaaataaacacagtccagactcaaacggaggaagcccacatattctattatagatatataaataatcacacacacacttgctgtcaatgttttgagtcagtgcatttcaaggaacagccacaaaatacacacccctaagaaaaggcaagacttgaacgttctgaccaggtgcccctcttcttctttgccttctcttgtcctctttctcctatttcttaccctgtcctccacctgccttccattttgaagtgggatgttaatgaaatcaagttccagtaacccaaatcttgtttacaaaatattcgtggtatctgtgaacatgttaagagtaatttggatgtgggggtgggggtggagaaaggggaagtggtccagaaacaaaaagccccattgggcatgataagccgaggaggcattcttctaaagcagacttttgtgtaaaaagcaaaggttacatgtgagtattaataaagaagataataaataatattctttttaa

SEQ ID NO: 95655 - DNA, 3486 bp, Homo sapiens
  misc_feature (152)..(152): n is a, c, g, or t
  misc_feature (357)..(357): n is a, c, g, or t
  misc_feature (378)..(378): n is a, c, g, or t
  misc_feature (383)..(383): n is a, c, g, or t
  misc_feature (436)..(436): n is a, c, g, or t
cgcagaggtgtcctcagtgcccggagaggttggcagtgtcggccccgagggaagcgtggagcggacggccgacaggggatttctgcccaaacttcatcaccaactctttctgagagcaaaaacatggggccgagtccggcagctgcacgcanaatccaactctctggcagctctcggcaccgacgagctccagatcccgcgttcgcatcccggcgctttgcgcgcagagctaagccttcggacccgtggactgcagcccccgcgcgtcgcggtaaagcgggtcgcgtctccagcccccgaggcgcagcgacggtgggagccggctcggcgttgggggcgggggcggggccggcgaanggggagggctgcgcggcggangggangagccgcggcgacagacggcggcgcgcaccaaccgggcgccggctggcagganccgcgcagaggctggtccgagcgcgttgcgggcgcccggcgtaaggggagtcgggtagcagcatcctcctgggcgccgctttcgcgcggcggcggcggctgcggcggggtctttctttgcttaaatacctcgttggccagaagcgctggtaccgggggcgggttgggtcgggtcgggcagtgctgcacacctgggtttccttgcctagagctgtgtgttcggggtcctttggtccagtcggaggctgcggagcggcgggggttgcctgcgctgtccgcccgggcatcctcccggtgatggaagcagccgccgccgccgctgcggggtcgcgctgtgccccatccaccgctgccagagaggtgggaaaattcgccgcacggaggccgaaagcgagaggggctgcgccgctatgccgggagctgagtcccatataagccgcccccagccatcgcccccagccggcttcgttcccctgagcgagacaggaagctgcggtcccgagaaagcggaggagacgtcgctggagccgggaggcgccgggttcggcggagcgcggagcggggctctgggccgcgtgaaagtttttcttcccgagccgcagggcgcccgctgcccggaaactgcccagggataagtcggccgactccccagacccctcgaaggtgcggggacccccagcggaagcgagagggagcgaaatcgaggaacgagtgacagccggacagtccgccgggcggtgatccggggccgctcccgggcgcgccctcggctccaggtcctacccggagccgctgccatgggagagccagccttgggcgctggggaccagccgccgcgcccgcctcggagtcgcggcccgagtcccggcgccagcagccagcccgctgcgtccccttcccgggctgcagggctgcctccgccgcgccgccggcccggattgtgcctgtgatgagccgcagcccgcagcgagctctgcccccgggcgcgctccctcggctgctccaggctgcgcctgcagccgcgccgcgtgccctgctcccgcagtggccccggcgcccaggacgccgctggcccgcgtcccctctcggaatgaaggtgttccgtaggaaggcgctggtgttgtgcgcgggctatgcactgctgctggtgctcactatgctcaacctcctggactacaagtggcacaaggagccgctgcagcagtgcaaccccgatgggccgctgggtgccgcagcgggggcagccggaggcagctgggggcgcccagggccgcctccggccgggccgccccgtgctcatgcccgtttggacctccgcactccttaccgccctcccgctgccgccgtcggggcggctcctgcagccgcggcagggatggcgggggttgcggcccctccaggcaatggcactcggggcaccgggggcgtcggggacaagcggcagctggtgtacgtgttcaccacgtggcgctctggctcgtcgttcttcggcgagctattcaaccagaatcccgaggtgttctttctctacgagccagtgtggcatgtatggcaaaaactgtatccgggggacgccgtttccctgcagggggcagcgcgggacatgctgagcgctctttaccgctgcgacctctctgtcttccagttgtatagccccgcgggcagcggggggcgcaacctcaccacgctgggcatcttcggcgcagccaccaacaaggtggtgtgctcgtcaccactctgccccgcctaccgcaaggaggtcgtggggttggtggacgaccgcgtgtgcaagaagtgcccgccacagcgcctggcgcgtttcgaggaggagtgccgcaagtaccgcacactagtcataaagggtgtgcgcgtcttcgacgtggcggtcttggcgccactgctgcgagacccggccctggacctcaaggtcatccacttggtgcgtgatccccgcgcggtggcgagttcacggatccgctcgcgccacggcctcatccgtgagagcctacaggtggtgcgcagccgagacccgcgagctcaccgcatgcccttcttggaggccgcgggccacaagcttggcgccaagaaggagggcgtgggcggccccgcagactaccacgctctgggcgctatggaggtcatctgcaatagtatggctaagacgctgcagacagccctgcagccccctgactggctgcagggccactacctggtggtgcggtacgaggacctggtgggagaccccgtcaagacactacggagagtgtacgattttgtgggactgttggtgagccccgaaatggagcagtttgccctgaacatgaccagtggctcgggctcctcctccaagcctttcgtggtatctgcacgcaatgccacgcaggccgccaatgcctggcggaccgccctcaccttccagcagatcaaacaggtggaggagttttgctaccagcccatggccgtcctgggctatgagcgggtcaacagccctgaggaggtcaaagacctcagcaagaccctgcttcggaagccccgtctctaaaaggggttcccaggagacctgattccctgtggtgatacctataaagaggatcgtagtgtgtttaaataaacacagtccagactcaaacggaggaagcccacatattctattatagatatataaataatcacacacacacttgctgtcaatgttttgagtcagtgcatttcaaggaacagccacaaaatacacacccctaagaaaaggcaagacttgaacgttctgaccaggtgcccctcttcttctttgccttctcttgtcctctttctcctatttcttaccctgtcctccacctgccttccattttgaagtgggatgttaatgaaatcaagttccagtaacccaaatcttgtttacaaaatattcgtggtatctgtgaacatgttaagagtaatttggatgtgggggtggggtcgaacagggcattgcccggcgtttaacagctcccataccccaaccccgggggcgcccacccctagagacccgccgccacggcggccgcgcctcgc

SEQ ID NO: 95656 - DNA, 3274 bp, Homo sapiens
  misc_feature (152)..(152): n is a, c, g, or t
  misc_feature (357)..(357): n is a, c, g, or t
  misc_feature (378)..(378): n is a, c, g, or t
  misc_feature (383)..(383): n is a, c, g, or t
  misc_feature (436)..(436): n is a, c, g, or t
cgcagaggtgtcctcagtgcccggagaggttggcagtgtcggccccgagggaagcgtggagcggacggccgacaggggatttctgcccaaacttcatcaccaactctttctgagagcaaaaacatggggccgagtccggcagctgcacgcanaatccaactctctggcagctctcggcaccgacgagctccagatcccgcgttcgcatcccggcgctttgcgcgcagagctaagccttcggacccgtggactgcagcccccgcgcgtcgcggtaaagcgggtcgcgtctccagcccccgaggcgcagcgacggtgggagccggctcggcgttgggggcgggggcggggccggcgaanggggagggctgcgcggcggangggangagccgcggcgacagacggcggcgcgcaccaaccgggcgccggctggcagganccgcgcagaggctggtccgagcgcgttgcgggcgcccggcgtaaggggagtcgggtagcagcatcctcctgggcgccgctttcgcgcggcggcggcggctgcggcggggtctttctttgcttaaatacctcgttggccagaagcgctggtaccgggggcgggttgggtcgggtcgggcagtgctgcacacctgggtttccttgcctagagctgtgtgttcggggtcctttggtccagtcggaggctgcggagcggcgggggttgcctgcgctgtccgcccgggcatcctcccggtgatggaagcagccgccgccgccgctgcggggtcgcgctgtgccccatccaccgctgccagagaggtgggaaaattcgccgcacggaggccgaaagcgagaggggctgcgccgctatgccgggagctgagtcccatataagccgcccccagccatcgcccccagccggcttcgttcccctgagcgagacaggaagctgcggtcccgagaaagcggaggtcctacccggagccgctgccatgggagagccagccttgggcgctggggaccagccgccgcgcccgcctcggagtcgcggcccgagtcccggcgccagcagccagcccgctgcgtccccttcccgggctgcagggctgcctccgccgcgccgccggcccggattgtgcctgtgatgagccgcagcccgcagcgagctctgcccccgggcgcgctccctcggctgctccaggctgcgcctgcagccgcgccgcgtgccctgctcccgcagtggccccggcgcccaggacgccgctggcccgcgtcccctctcggaatgaaggtgttccgtaggaaggcgctggtgttgtgcgcgggctatgcactgctgctggtgctcactatgctcaacctcctggactacaagtggcacaaggagccgctgcagcagtgcaaccccgatgggccgctgggtgccgcagcgggggcagccggaggcagctgggggcgcccagggccgcctccggccgggccgccccgtgctcatgcccgtttggacctccgcactccttaccgccctcccgctgccgccgtcggggcggctcctgcagccgcggcagggatggcgggggttgcggcccctccaggcaatggcactcggggcaccgggggcgtcggggacaagcggcagctggtgtacgtgttcaccacgtggcgctctggctcgtcgttcttcggcgagctattcaaccagaatcccgaggtgttctttctctacgagccagtgtggcatgtatggcaaaaactgtatccgggggacgccgtttccctgcagggggcagcgcgggacatgctgagcgctctttaccgctgcgacctctctgtcttccagttgtatagccccgcgggcagcggggggcgcaacctcaccacgctgggcatcttcggcgcagccaccaacaaggtggtgtgctcgtcaccactctgccccgcctaccgcaaggaggtcgtggggttggtggacgaccgcgtgtgcaagaagtgcccgccacagcgcctggcgcgtttcgaggaggagtgccgcaagtaccgcacactagtcataaagggtgtgcgcgtcttcgacgtggcggtcttggcgccactgctgcgagacccggccctggacctcaaggtcatccacttggtgcgtgatccccgcgcggtggcgagttcacggatccgctcgcgccacggcctcatccgtgagagcctacaggtggtgcgcagccgagacccgcgagctcaccgcatgcccttcttggaggccgcgggccacaagcttggcgccaagaaggagggcgtgggcggccccgcagactaccacgctctgggcgctatggaggtcatctgcaatagtatggctaagacgctgcagacagccctgcagccccctgactggctgcagggccactacctggtggtgcggtacgaggacctggtgggagaccccgtcaagacactacggagagtgtacgattttgtgggactgttggtgagccccgaaatggagcagtttgccctgaacatgaccagtggctcgggctcctcctccaagcctttcgtggtatctgcacgcaatgccacgcaggccgccaatgcctggcggaccgccctcaccttccagcagatcaaacaggtggaggagttttgctaccagcccatggccgtcctgggctatgagcgggtcaacagccctgaggaggtcaaagacctcagcaagaccctgcttcggaagccccgtctctaaaaggggttcccaggagacctgattccctgtggtgatacctataaagaggatcgtagtgtgtttaaataaacacagtccagactcaaacggaggaagcccacatattctattatagatatataaataatcacacacacacttgctgtcaatgttttgagtcagtgcatttcaaggaacagccacaaaatacacacccctaagaaaaggcaagacttgaacgttctgaccaggtgcccctcttcttctttgccttctcttgtcctctttctcctatttcttaccctgtcctccacctgccttccattttgaagtgggatgttaatgaaatcaagttccagtaacccaaatcttgtttacaaaatattcgtggtatctgtgaacatgttaagagtaatttggatgtgggggtgggggtggagaaaggggaagtggtccagaaacaaaaagccccattgggcatgataagccgaggaggcattcttctaaagcagacttttgtgtaaaaagcaaaggttacatgtgagtattaataaagaagataataaataatattctttttaa

SEQ ID NO: 95657 - DNA, 3109 bp, Homo sapiens
  misc_feature (152)..(152): n is a, c, g, or t
  misc_feature (357)..(357): n is a, c, g, or t
  misc_feature (378)..(378): n is a, c, g, or t
  misc_feature (383)..(383): n is a, c, g, or t
  misc_feature (436)..(436): n is a, c, g, or t
cgcagaggtgtcctcagtgcccggagaggttggcagtgtcggccccgagggaagcgtggagcggacggccgacaggggatttctgcccaaacttcatcaccaactctttctgagagcaaaaacatggggccgagtccggcagctgcacgcanaatccaactctctggcagctctcggcaccgacgagctccagatcccgcgttcgcatcccggcgctttgcgcgcagagctaagccttcggacccgtggactgcagcccccgcgcgtcgcggtaaagcgggtcgcgtctccagcccccgaggcgcagcgacggtgggagccggctcggcgttgggggcgggggcggggccggcgaanggggagggctgcgcggcggangggangagccgcggcgacagacggcggcgcgcaccaaccgggcgccggctggcagganccgcgcagaggctggtccgagcgcgttgcgggcgcccggcgtaaggggagtcgggtagcagcatcctcctgggcgccgctttcgcgcggcggcggcggctgcggcggggtctttctttgcttaaatacctcgttggccagaagcgctggtaccgggggcgggttgggtcgggtcgggcagtgctgcacacctgggtttccttgcctagagctgtgtgttcggggtcctttggtccagtcggaggctgcggagcggcgggggttgcctgcgctgtccgcccgggcatcctcccggtgatggaagcagccgccgccgccgctgcggggtcgcgctgtgccccatccaccgctgccagagaggtgggaaaattcgccgcacggaggccgaaagcgagaggggctgcgccgctatgccgggagctgagtcccatataagccgcccccagccatcgcccccagccggcttcgttcccctgagcgagacaggaagctgcggtcccgagaaagcggaggagacgtcgctggagccgggaggcgccgggttcggcggagcgcggagcggggctctgggccgcgtgaaagtttttcttcccgagccgcagggcgcccgctgcccggaaactgcccagggataagtcggccgactccccagacccctcgaaggtgcggggacccccagcggaagcgagagggagcgaaatcgaggaacgagtgacagccggacagtccgccgggcggtgatccggggccgctcccgggcgcgccctcggctccaggtcctacccggagccgctgccatgggagagccagccttgggcgctggggaccagccgccgcgcccgcctcggagtcgcggcccgagtcccggcgccagcagccagcccgctgcgtccccttcccgggctgcagggctgcctccgccgcgccgccggcccggattgtgcctgtgatgagccgcagcccgcagcgagctctgcccccgggcgcgctccctcggctgctccaggctgcgcctgcagccgcgccgcgtgccctgctcccgcagtggccccggcgcccaggacgccgctggcccgcgtcccctctcggaatgaaggtgttccgtaggaaggcgctggtgttgtgcgcgggctatgcactgctgctggtgctcactatgctcaacctcctggactacaagtggcacaaggagccgctgcagcagtgcaaccccgatgggccgctgggtgccgcagcgggggcagccggaggcagctgggggcgcccagggccgcctccggccgggccgccccgtgctcatgcccgtttggacctccgcactccttaccgccctcccgctgccgccgtcggggcggctcctgcagccgcggcagggatggcgggggttgcggcccctccaggcaatggcactcggggcaccgggggcgtcggggacaagcggcagctggtgtacgtgttcaccacgtggcgctctggctcgtcgttcttcggcgagctattcaaccagaatcccgaggtgttctttctctacgagccagtgtggcatgtatggcaaaaactgtatccgggggacgccgtttccctgcagggggcagcgcgggacatgctgagcgctctttaccgctgcgacctctctgtcttccagttgtatagccccgcgggcagcggggggcgcaacctcaccacgctgggcatcttcggcgcagccaccaacaaggtggtgtgctcgtcaccactctgccccgcctaccgcaaggaggtcgtggggttggtggacgaccgcgtgtgcaagaagtgcccgccacagcgcctggcgcgtttcgaggaggagtgccgcaagtaccgcacactagtcataaagggtgtgcgcgtcttcgacgtggcggtcttggcgccactgctgcgagacccggccctggacctcaaggtcatccacttggtgcgtgatccccgcgcggtggcgagttcacggatccgctcgcgccacggcctcatccgtgagagcctacaggtggtgcgcagccgagacccgcgagctcaccgcatgcccttcttggaggccgcgggccacaagcttggcgccaagaaggagggcgtgggcggccccgcagactaccacgctctgggcgctatggaggtcatctgcaatagtatggctaagacgctgcagacagccctgcagccccctgactggctgcagggccactacctggtggtgcggtacgaggacctggtgggagaccccgtcaagacactacggagagtgtacgattttgtgggactgttggtgagccccgaaatggagcagtttgccctgaacatgaccagtggctcgggctcctcctccaagcctttcgtggtatctgcacgcaatgccacgcaggccgccaatgcctggcggaccgccctcaccttccagcagatcaaacaggtggaggagttttgctaccagcccatggccgtcctgggctatgagcgggtcaacagccctgaggaggtcaaagacctcagcaagaccctgcttcggaagccccgtctctaaaaggggttcccaggagacctgattccctgtggtgatacctataaagaggatcgtagtgtgtttaaataaacacagtccagactcaaacggtgcgttggccctccgtgtatcctctagagtcagctatgaaga

SEQ ID NO: 95658 - DNA, 577 bp, Homo sapiens
aacgggtgtggctcgagaggtggattttggatttgttctacagggaatacagtataatcaaagtcaagataaagatccagtttttaaaatggtctcgatcctctgcacagcatttgatgctgttgggctggtagctgttctcttcatctgaggcactgtagagccctgtacctcaaaccttttctactgctgcttgtctgtttctttcacccagaacccttcaccccacagatgtagatgttcaaatcatatggttctgccttcttccctcttcacatatcactccctagggtgactcttaacactccatggaaatccttgttccccctgagtctcctccttaaacatcaagcaatccagaatatttactgctcccatcaggctgttattctataggatgcaccacctggcatcccaccctattctttccacctttcattaaattttctaacagtctttcactacggtttttgttacctaaaatctgcagtttcctgtgcatagcatagggcttgtcacacagtaggaattcagaattctttgttgactaaataatactccattctttctgcctcat

SEQ ID NO: 95659 - DNA, 632 bp, Homo sapiens
tgttgttctgagatagagtctcatctcttttgcccaggctgaaatgtggtggctcgatctcgtctcactgcagcctcaacctcccctcggctcaggtgatcctcccacctcagcctcccgggcacatgccaccatgcctggctaatttttgtatgttttgtagagacggggttttgccacgttgcccaggctagtcttgagctcctgagctcaagtgatccacctgtcttggcctccccaacaggcatgaaccaacacgcccagccagtttcagtgatttttcaagaaatacgtactcattttagaaagtacaaagagattgaaataagagctcactaaccagagatgacccattatggtttaaatttctttgtatatgtgcctaccttttcctgtgtgtgcatatttaatacacggcttgagtattccttctctgaaatcgttgggaccagaagtgttttggatttcaggcttgttcagactttggaatatttgcattacacttactgtctgagcatccctaatgggaagatctgactccatagcacatttcttttgaatgtcatgctggtgctcagaaagtttcagatttgggagaatttcagatgttggattagggatgttctacctat

SEQ ID NO: 95660 - DNA, 479 bp, Homo sapiens
aaagtagctgattctaggactgaacaaggaaatacacaagatgagtctgaaggatcttgtagtgccagatagtaagaaactgctcaaaacgaaagctaaaacaaaaagagaaaaccataacaatgggggtgtgccaaagagatacaggagccaactgaaagcgttcccagtggccaaaactgaaaaaatttgagcaggaaaataaaatagtatttataatttcaaagcagaaaatacataaacatgagtccatatggatataataaacgactgaataaagacataaataaaggagaactgacaatctcccttgtggaaaaaatccaaataatttctgtagataacccactcttaaggaggtagagcactagccagtatgcattggctgcacatagtaactttctttctttttctctttttttttttttttgagacggagtttcactgttgttgcccaggctggagtccaatggcatgac

SEQ ID NO: 95661 - DNA, 374 bp, Homo sapiens
acggtatacagtaggtgcaatttcagtattagttgctactattgtcataatcaccagagtgtttcaagagctgagcctccatggctctccacatcgcttcacaaactcccctgttctgggaaccagcctgaattgcaacctcaacccccgactgatgcaaccctataagcaaaccagaatcatggctggggtaggggctctaccctttgggatctggccaaaccaggaagaggtagagtggcctggaggcaaaccacaggtgattcagaatgttcaccacgtggttaaccctgtcttactcctgctttagagagaagccaccatgaaaagtcctcatcatcaggggacagacctctctgttccctggttataat

SEQ ID NO: 95662 - DNA, 615 bp, Homo sapiens
gatgactaccctccatggattcaaagaatggcatttaagacatgattgtgattaattaaacactagcatgctcagtgcagccaagaggaagaactgaaagctaatgaagagggaaattgggaggcagtagaaactgccactttgtgacaacatctgtggctcctgggagcttaaacaacatcagattttcctttcctcttctgcaaaattgagacaattttaatagttgtcacataggaaactgcaaagatgaaataaaataaagtttgcaaattactggctgagaatctgaacatggtaaatgatagttacctttaatttcaatgtaataaataacataatcctgtatagtccacatttaaccaaatccagacaagagaagctttgattgcagctcccctgacattcctgaggtctaacacgttgatgtccctcaaattgaaactctaggaaaggggactgtctgtaaaactgtgaaggagcagagcccaggttcccattgtcagagtagtgccttgcacagaggaaaaattgtacagcccccatgaagcttgttccagggaaccagtgtctcagcaagttgcgatagaaaatggctgctctgtgaatagtata

SEQ ID NO: 95663 - DNA, 411 bp, Homo sapiens
ggacagctccagctattcaaaagttcctctttacactaaattgagtccacatctgactgcccatgacttccaccagtcagtcctagatttccttccccggcccccatggggtcacacagaacaaatttgtggcctctttcgtgccctagtgcttaaacatgtaaaaggagacctcatctccttccgaaaacttctctgagccatcaccccaaaacctgcaactctttctcaggcgtcaaagttctgagtcctttcaccctttaacagggattaaaatgtaaaattgttttataaaatttggaagctgagacaggagaatcgcttgaacctagggagcagaggttgcagtgagccagggttgcaccactgcactccagcctgggtgacagaggaagactccatctctcaaaa

SEQ ID NO: 95664 - DNA, 732 bp, Homo sapiens
caaatacagcagtttactcttctgaagtaaagcatttttggcaaaggcaagagcttgagaaaaagagatgagaagatttggtacatttttaaagagcttgtgattatagtgtgtagtttatggtgagatttggcgggcaggaggtttagctctggtagaagcaaaagtctgcagtcccatcagggtgaagagtggtgatggttaacaggcatggaaaagcacaaggtgttaggagaacgcaaaggcaacagatgggaggtgtgactcattacttaaatgccacagactccttagaatgaaaatctagcctttatatccctatggcaaaagattgctggactttaaatcctgatttcacccctagccttgtaaccatggacaagggcttcagcctttctcggcttcagtaaaatagaattgataatgcctacctcacagaattaacacaaggattaaatatagcaaccgataagcaaacactgatagctctgatctaccacactgtaaggggctagtcatgagccggcgtcagctttgttagtagccttgtccaactgatgactatatttgcatttgtggtcaactaaaaattcctccacacctctgagaattgcatttggctgcatgccatagaaacctgatcgtggtggcttatcataatagctaagagatttatttttctcaaatccagagataggcagtccaaggctggtgcaggggcttaagaactgg

SEQ ID NO: 95665 - DNA, 464 bp, Homo sapiens
cagagaggagggttgttttccctgaacatgataaggagctgagcagggcaaagtgggggctctggcccgtgattggtagacaggatgccctggaatgcagttggcctgcagcccagaatccagcactttgtatttgtttgtttctgggagactgtggtctggtgctactgtgacaggaagtgagaaagctgggagtgggggaacagagagggtcgatgtctttgtggttctcctgtgaaatctctttgtccctggagagcagctctgctacagagctctgctgagaagagagcagcctttgtgtgtctaatgggtctcggagcatctagctactccgagggattagagagtgtgaattctgactgtggccttttgcgttttagcacttaagttatataaatggtcctgatctcttagcactgggaagcttactgagttttgtgtgtgctgctattctttgtgga

SEQ ID NO: 95666 - DNA, 137 bp, Homo sapiens
ccaagatcaagccactgcactccaggctgggtgacagagtgagactgtctcaaaaaaaaccaaaaatatcctctctggcctcagtttactcatcctttaatggtaaaatctgctttccctcctcatagggctcttgt

SEQ ID NO: 95667 - DNA, 786 bp, Homo sapiens
aggagaatttacaccatggaaactggcaaacgctgcaaacactgcctcccaccatcacagacagccagttattaagcatttatcagcacattatgttgccagggactgtgctcagagttattggggggagaggcagtagcagtgttatgtagtcaagcttataactgataaactgtagtcatttggaaaaacagaagcaacgcagaggagatgggagtgaaccaagaacatagtaaccaccctgaacctcctcaacaaaccccagagggacatgtccccagaggagatgcagaagcacggggaggagggtccactctgtgctccgcagtcagtcaagaacaacactgaagtgctcaccaactactgacaacaacaagctgctgggctgcgaaggccttgagtagacactgcaacatggtgctggagaatgtgaaggagatgtgtactgaggtccccaaggggggcaacggtggcaagggcaagaagaagtccaagccagccaacaaagaccacttcatctccaagctcttcctgtgcagggactcagtcatcaccaacaagtgggggccacctccccattgacagaactcactccctcatcctatgaagacctaccctttgttatggggataataaagccctgtgcttttttttttctagtagtaaaaacaaaacataacaacaacaataaaactttagtcatttggtcatattagggaagtcatttattattctgtttcttcagaaataaaaaacagataacaaaaatattatctatttctaggg

SEQ ID NO: 95668 - DNA, 743 bp, Homo sapiens
gtcaaattgtttatactcagaatataaaacccaaatgattttccaaagattttatatgatcttaagagacaaacatctcattattcttctctgtcatatcttatctgtgagagctagtgaatttagaaaacaagattaccgttaaataacaaggcaattaatttaagcagtgtatagctccatgtctttgtttataaactggaaattcccatctccaataaattcataaaggaactctgttacctgaatgtctacactatgaaaatgtttaaacagaggatcaataggttcaggaatactgttcttcttttttattatcttcaacaatggcaaaactttcttccaataatgaacacttctccctatgtattctcgttgatcataaaaagaattaagaccactgccctaaaaaagaaagttaaaagcacacaactttaaggaacacgcatgattagatctaaagttcatttacaagttgtaagaactggctaaaatttcaagtcaaaaccaaatggtacctcaatagtcatttgttcaacttctaaatactgtaataactaaaccaccttaataccagtgaactcactgcaacctctgccgtgcaggttcaagcaattctcctgcctcagcttcccaagtagctgggattacaggcacctgccaccatgtctggctaattttgtagttttagtagagttttttttgtatttttagtagagacggggtttcaccgtgttagccag

SEQ ID NO: 95669 - DNA, 530 bp, Homo sapiens
gtcctgcctttccagacagaaccaatgttcattttacatatattgattgatgtctcatgtttccctaaaatgtataaaaccaagctgtgctctgaccactttgggcacatgtcatcaggacctcctgaggctgtctgaagggcatgcatcctcaaccttggcagaataaactttctaaattgagacctgtctcaaattttgggacttcacaccactaacatttaattataaatgtttaaaactcatcactgggcctatataaacaagtgtaataatacaacacattagtgaccatttctataatatatgtttcatgctaggtatagtcctacaaacttgtcatgttttatttctgattttttttcacagctattctgagggatgtcatgctctgttacaagtgaggaatctagggtcagagagcttgtgtccaggcccaggggcacagggcaaggaaagcacagtatagttggggtttagaccacatgggctggtgttggttgacctgaccccaacacctttgcctttgg

SEQ ID NO: 95670 - DNA, 407 bp, Homo sapiens
acatgcatattgcaggatgagagcagatagaaggaaaatctgtttttggaattgcatgtgtaaaaattacctgagtagcataaagatgaggtggttagcactgataacgagagaaaatgtgtaggtgaagagaattcatttaaaatcttcaggctgagcatggtggctcacacctgtaattctagcactttgggaggttgagggatcacttgagcccaggattttgagatcagcctgggcaacatgatgaaacaccatctgtaccaaaaatacaaaaattagctgggcgtagtaccacactcttgtagtccctgctactcaggaggctgaagcatgaggatcacttgaatcaggaggttgaggctgctgtgagctgtgactgtgccactgcactccagcctagacaa

SEQ ID NO: 95671 - DNA, 249 bp, Homo sapiens
ttttgacggagtcttgctctgttgcccaggctggagtgcagtggtgcgaacgtggctcactgcaagctctgcctcccaggttcacgtcagcagaggtctgccctgatttaaaactttactagcagcctggaatacaagtcagttgttgttaacaaattgaaacagtttccctttttagttataacaagtaaattcagttctcatagcctgatcaattctgccttgacaataaattgatatcaaataaca

SEQ ID NO: 95672 - DNA, 925 bp, Homo sapiens
gaagaggaaatgactcgtagtcaggttcaggagttagtggagtatttggactttggtactgctgtcttccaaggtagctctaagttttgatgtgtgggcttctgagtttatattctgaaaggaaatacacttcttttgaacatccccactaggttcttttccattgtcaataaggagcatcagccagtgaatctgtttcaggtttccattctgcagaactcctccaaagcatgtgctagtggcaagacagtggttcttatgatgttttcccttaacttttccttgtatgttcttgggtggttcctaagggaaagggaagcacatgatcatgggaatgatagcccagaacaaaaagaaatcttgtcttaccacagtgttttataggagagattgggagaaatcatcctgttttctctgtgacctgatttcagaagagactgatccaaaaattataacggcagggaacctagtgcatttggcactgagatttaaatgcaaccagaattgtcctcaaggcccagccataaaagcattgtctctctcgaccttctggtatcttgttagagagcttttcactgtgaggaagtgtggaaaaatagctctgtgtgtgtgtgtgtgtgtgtgtgtgtgtgtgtgtgtaatctgttaggtgggggataggttttgtgctagccaatattaaaagagactgcaataaaaaaattaccctgatctgatagaaagcaagtgtttttgtatgtgtgggtgaatgtgtgttcatgcccgtatatgtctacacacagatgacaaattatatttgaaatcgttggaaaataaattcagatcaaaatgcctttcaggcccattacctagaaatctatcttaaaacctgggtatgttcctaaggtcatttctttgcttatgctaaattaattacaattatgaa

SEQ ID NO: 95673 - DNA, 290 bp, Homo sapiens
ttttgcatttttagtagagacggggtttcgccgtgttggccaggctggtcttgaacttctgacctcaagtgatctgcctgcctcagccttctgctgggattacaggcgtgagccaccacacctggccaggttgtatatttgtgtccatttatcttctcagcagttttgtgcgtttcgtaacaacaacaaaaaaaagttttagaaaatgtccccaaattagccgggcacggtagcgcatgcttgtggtctggtcccagctacttaagaggctgaggtgggaggatcaatcg

SEQ ID NO: 95674 - DNA, 100 bp, Homo sapiens
ttaaaagaagctgcagcaaccttcagagcctgtcgcagacgtgggtggtgactgtcagcggaggttctcaaatcattggtgacataagtgagacaacatt

SEQ ID NO: 95675 - DNA, 703 bp, Homo sapiens
agcgggcatgagccgctgcaccgggccttttctggttttattaatggtgcatttgctatatccctttaaataaaaagaatgttgacataaatccaggttaaactgacacaaattaaagcaactttctttttatttaaaaatggtaacctgaaacatgaagagctgttctcgttctcagaaaaagagaacgagaaactcacaatccaaaagcccataacactttctaaattagttaaataaataggatgcaagcacttgactttggcacgtagcagtcttgaagttcctacttcctaccactctaatataagatctcagctactaccttgtgaccctacaaggagttaaagactttaaataccagtcactttgtagctttgcagtggttcagcaattagccatctaaacacaaaatctatagttcttgtacatagaatttgccccatgaatatctgttaattgagaggtgagaacataagatttcctctggaaatttgctgctccagtgaacgctgtagctttctgggatgactctgatgtctccacagaagcataaaattctttactgttttttcagtcacctgaaaataaaccacttcatttcagaggcagtgggggtggtcacatgtcaccccaaaccactttgaggaacaaagtttcaataacttcttacttggaaaaaaaagaacctctagaaatgggt

SEQ ID NO: 95676 - DNA, 391 bp, Homo sapiens
gaaggcaggagcaaactagagagagagagaagaaaagtcgtggccttaccaacaacccaaaagccctgaattctctggtgagataggcaactctggaggttgaggcagctgtagctcagccaagaattagaaggatgattctagatatttaaaatcaacagcatccccacccacgtaacccaccttcaggaaccagtagctttaaccaagagaacaagaaactcaatgagcagcagcctcaacaactggctctttcctcctgggtaaggagagggcagtggggaaggacggtgcctcaaagggaagtggaggcgctatcaatctggcctagacaggtaggttgactgcttttacatgggtgggctggggcctggtctgggacccctgctca

SEQ ID NO: 95677 - DNA, 702 bp, Homo sapiens
tgcagccttgacctcccaggttgaagtgatcctcccaacctcagcctctgagtagctgggactacaggtgtgcacctcgtctgcctgatctttttgaatttttgtagagaggggtctcgctatgttgtccaggctggtctcaaacttctgggctcaagcaacccgcctgccttggcctcccaaaatgctgggattataggcatgagccactccatctggcctcaagatgttaaatgcagtctaggtgggattcagacttccccctaccccaagtggatgaaaaagtgggtgcaggctgtgagagttaaactgacactttgaggtgctgccattgtaaatcagagagttaagaaaaacaaatagctacatactgtgatgaaccagaaataaccaggtcatcctgtgcagttcagttcccccaaataaaagaaacttgagcattcccatactttactgattccctaaggaaaaacggcattatctcttatgactgcagtgcttacctatgtcaggggatatgatgtgacatttgtgggtttgataatcaagtgacaacatttctaatttcacacagtgagcagcctatcataaacttggtaaccttggcaaatttgtagttatttccctttggtttttttccatctttcaatggattcgttttctttttaagtagagacagggtctggctgtgtcacccagaat

SEQ ID NO: 95678 - DNA, 414 bp, Homo sapiens
atttcccctcactgcctacgacggctccaacagttactcattgtaatttgactggtagaaatgcatttttcacagcgtctgggaaatcagctttatggtccccactttaagtacatttgacacaactatttaaatatttaagacaattttacatttgtagtacccggaggagtatataattgggaagattttcattataagagtttttattttacttcagggcttctgacatttcttgctgggctctgctgtccttggagacaaagggagttagttattcattagcgtttgtgggttattcattattgttggtcagacaaaaaagacagaataatatcaacaaaggacaccaaactaatcgggattaaaaaactcttttgtgtcacttaaggttggtgtctcttgtaaagacct

SEQ ID NO: 95679 - DNA, 370 bp, Homo sapiens
tattgtgaggtattaaaatcaacctgcgaaaagtcattctgttacttgacttgagatattttcaatatcaacttttattattttttaaattacagaacaataaatagtaactagaaaaatatgactgcagataagcacgaaaaagaaaaaataaacttgtaattacattatccacagataatgttttaaaagatttataaattactttaataatatgttttgataactggtaggacccattctgcataattactcatttgtttcataattttcctgactatacttatgataatatatttgcacttaactcttatagattttaaataaacagtttcatacaggacatataattttgtaacctgtatgctat

SEQ ID NO: 95680 - DNA, 574 bp, Homo sapiens
ttagagacggggtcttgctgtcacccaggctggtctccaactcctgggttcaaatgatcctcctgcctcagcctcccaagtagctgggactacagatgcgtgccaccacgcccagcctgaataggctcttcttggtaatctcttcccaatgaaggggagctgcagcacacataaatgcttgcaaagacctctgatatttagttctgaaatgcaaatgctcaatttcacagagaagacactactaatgatactctggttcatcaaatatcaaacagctgactctctgcacacattgctcatgaggggtccaggagtgggctgggggcaaggatagtagacccaggtcagtaagacataatgcacccaacagccacacaccagcagcctaatgagaaaccactgtctatcaggacgagaggccccaggggctataaagcaaaagagtacttttccatccttagaaacatctgttaggaaggtaagtcctccttgatgtctaatttcaatccctgtgctgaagtttctattcttctagcagtccataaagataaaagaaacactcaaagaagaaaaa

SEQ ID NO: 95681 - DNA, 239 bp, Homo sapiens
ctaatttttatgtacttttagtagagacggggtttcaccatattgaccaggctggcctcaaactcctgacctcgtgatccacccacctcagcctcccaaagtgctgggattacaggtgtgagccactgcacccggccttcctgaatgtttctttactcactcatattatcatttagaacagggatcacaaactacagcctaaggaccaaattcagacaaccacctgttttggcaaataa

SEQ ID NO: 95682 - DNA, 873 bp, Homo sapiens
  misc_feature (839)..(840): n is a, c, g, or t
agggccaggattctggaacttgggttgcctgatagaccctatacaaaagatgtagtagggaaaaggagcgacagctggctaaaggggccccccacaaccctccccgacaccctaggaaagcagcctctctccgctgtcccagggtgccatggagatggagagcgcggcggcctccacacgtttccaccagcctcacatggagaggaagatgagtgcgatggcctgtgagatcttcaacgagcttagactagagggcaagctctgcgacgtggtcatcaaggtcaatggctttgagttcagtgcccataagaacatcctctgtagctgcagttcctactttagagctttgtttacaagtggctggaacaacactgaaaagaaggtatacaacatccctggcatttctcctgacatgatgaagctaatcattgagtatgcatacacccggaccgtgcctatcacaccggacaatgtggagaaactgcttgctgctgcagaccagtttaacatcatgggtatcgtcaggggttgctgcgagttcctcaagtcagagctgtgcttggataattgtatcggcatctgtaagttcacggactactactactgtcctgagctgaggcagaaggcctacatgttcatactgcacaactttgaggagatggtgaaagtctcggcagaatttttagagctctcggtcactgaacttaaggatatcattgagaaaagatgagctcaatgtcaaacaggaagatgctgtatttgaggccattttaaagtggatttctcatgaccccaaatagagagaccagacattttcaaatttggttcctaaggtgccnnggcctaatgctgccgagtaccttctgaaacact

SEQ ID NO: 95683 - DNA, 951 bp, Homo sapiens
ggtggaatgttacaatctgaatatgtaccccaaaatttgtagtgttaaggaggtgtggcctttcgggaggtgtttagttcatgggttctgtagcctcatacattgattaatgctattataaaaggacttgacagagaaagtgtggtcctttttcatccttccatcttctgtcatgtaacgacacagcattcctcccctctggaggatgccgcattcaaggcaccattttggaagcagctagcaaacttcattaaatgctggcatcttggatcttggccttcacaccctccagaactgtgagaaatgaatttctgttgtttataagctacccagtctcagatattctgttatagcagcacaggcagactaagacacaagtatagtgcacatccatacctacagcagcgcttgtccatgacattttctgtacctctgttgtcaccctaattagtttggcattgcctaccatctagatacctccttcagtccacactttcattccttatatacaatgctggatgattaatactcaacatgtccttcaaaactcagctctttttcctgggaacagaatatatgctaattaatttttgttaaatataattaaatttatctacctaactaccacacagcccaaagagatggggaggtgttatggactgaatgtatcccccataaaattcatctgttgaagtcctaaccccagtaactcaaaatgtgattgtctttggaggtagggtctttaaagaggtaattaaagtgaaatgaaatcattgaggtggtcccaattctaatctgactgatgttcttataagacgaggagattgaggccagacccagtggctcatgcctgtaatcccactatgttgggaaaccaaagcctgcagataactggaggccaggagttcaagaccagcctgggcaacatggcgaaactctgtctctacaaaa

SEQ ID NO: 95684 - DNA, 389 bp, Homo sapiens
tgttgcgccctttccatattcactagtgaaaagcctcacagcttgggctctgggagtcagcctggtccacctttgaaacccagctcctccacattaggctgtgtaaccatgggagagctggttatcatctctgcccttctgtgtcatcctgggcaaaatgggaataacaggagcagagcataggttgttgtgagaattcagtgaggcaatgcatgcccaatactgcctgacatacagcaagtgctccataaaagttagctattgcttcagagtttaggttagaatagagacttactatcctgtgcagctatggtttgcataacaagcacagatcagaaagttagacatatctattagcaatttattttagaaatgcattctcctgtctc

SEQ ID NO: 95685 - DNA, 597 bp, Homo sapiens
tcgaggccgtagtacactatgatcgcacctgtgaatagcagtttcactccagcctgggcaacatagcgagacttagtctctaaaatgtttttaaaaatgtgccacatactcatgttttgccacacccagaatggcctttctaactttgcaaattcaatcaattagtaagaacccctgagatctcaatttcaccatggagcttctcctaaccaaatcccacggccatagcgattgctccccaccctgtccatctctgttcctggagggcagaaactagatcttgtcctgatgtttttctagaagtgcctcataaaaaaatgagcatgttggagctgctctgaaaagacctgctcacccattagccttttccacatcacttttatcattaatgctgtaagatcatatggactttgtgatttctagttttcttgttttattaattactcgatttaacttttatttggtgtatattgttattccgggcttattaagttttactaattggaggtttgtgcaaatatgttgatgtacgatgattacattcttagttaaaaattttaatagctctactcttggctgaatataattttgattagg

SEQ ID NO: 95686 - DNA, 228 bp, Homo sapiens
caaactgttaaactctgggaataagactgacagacgggttttctgagttacatgctttcatataatagttgtgtattttttacaatagtcttgcattgctgttgtaataaaatagaagattttaaaaactcaagggtcctgggtatctaagaaagaaacattaactatagagattatttgatggtagagattttagagagacacaaagtccagaggcaggacaagcag

SEQ ID NO: 95687 - DNA, 934 bp, Homo sapiens
aaggaacttgaagggtgaattacaatatcatgtgaacaaaactagcagtgactgggatcataacaatcagactaaatgatgagggcatttttaaaaaaattggggaataaaggacttagcttgtttcattatttcaaaattgagagattattatttgaccctcacaatttcgatttgtgaatttatatcatttctttgttaaaaatggatgatcccaattgaggtggctctgaaagtacgtattgttgccagtaaccatgagactgtcactcattttcctgatagcctcagttccagtaggaaggggaaaattattgttggctgtggcttcccttttttgcaaataatatccccaactcaagcagttgcaaacagtttgtccccgtggttaggggctaggatgaatttatgtttcttgtacctggtgctatgcatggctcatgataagtactaaatttgatgtttatttttaagtgtttttttcttatcctagaatgctgaagaattttcgacactagaacccagggattaaagttttgatgcatctacacttttagttatcatatactgtgcactttacaaaacattccctcatttaatctacaccccccccattttaccagtgaggaaactgagacccacatatatttaactgacttgcccaactaaagtcacataggaaatggtgaggctgaggcgggggaatgacttgaacctgggaggtggcgattttactcagccgagatatgtgcgccattggcaactccaagcctggggtagacagacgtggagactcctggtctccacaaaattgaattacacagacaaggagagaacagacatgacagcaacgaaaacggaaacggacagaaagggacagaacacgaacagaaaaacaaaagaacacaacaacaacaaaaaaacaagaaagaaa

SEQ ID NO: 95688 - DNA, 551 bp, Homo sapiens
gaagtatgattatcaatccaccagagagacggggaagagtggcccacatgagctcagaattggctggtgatggcgttgcaggtagtagaggtgctgagaactgacactatatccctcacgtgatgctctctttagaagatcaggctctccctggctaactatggccttcagccctctagacaggaacctgctggaccacaggggagtgggccttgccatattcccataggttgagcacacacagactagcaaacatcaaacaccaataagccctcacacacctggtatgatattgccaacatcacttctcgggggatagcaattatgccacaatttcatgtccctgactcaccaggccacacacgacaagactgcaagagcacctcctccttgggcccctggcctgggcagaactcacgggagagcccctggattgcagagtgctctttccccaacacccatctgacctggccacccccaccctaaaactcattaagtgctccccatggccaaaagcagtggtctccgaagtagggtttagaagaaaaaga

SEQ ID NO: 95689 - DNA, 454 bp, Homo sapiens
acatttaaaactaaaacaatttatactaatacagtttatacatttcatactaatttagctacagttggataaatatttaatggaacaaagtaaatcaaagtaccttttcaaatgaattggaaattaaatccacataacaattttttatgaccacactattacagtgtgatggcatgccaaatgatcataatgtggaattatgtatttcttcattggctttcaagattctgttctttagtttgtgggctcctctccaacttgcttgtctcctcacagtttaggcgactgtttataattcttgtccatcctgcataaacacacacagtcaaaatgaaaaaaagcttctatcagcagatctgtgcttgctgtacagaaatgggaaaacaattgaagtttgcattatcttttttctaattaccagatcgtttttggagctatttaggcatacgctttt

SEQ ID NO: 95690 - DNA, 756 bp, Homo sapiens
agcggaggtacctcctggtacattattctaaaaggatcagtgaatgtagtcatttacggcaagggtgtggtctgcaccctgcatgaaggagatgacttcggcaagttagcactagtgaatgatgccctacgagctgcctctatcgtcttacgagaagataactgccatttcttaagagtagacaaggaggatttcaaccggatcctaagggacgtggaggcgaatacagtcagacttaaagaacatgaccaagatgtcttggtgctggagaaggtcccagcagggaacagagcttctaatcaaggaaactcacagcctcagcaaaagtatactgtgatgtcaggaacacctgaaaaaattttagagcattttctagaaacaatacgccttgaggcaactttaaatgaagcaacagattctgttttaaatgactttattatgatgcactgtgtttttatgccaaatacccagctttgcccggcactggtggcccactaccacgcacagccttcacaaggtacagaacaggagaaaatggattatgccctcaacaataagaggcgagtcatccgcctggttctacagtgggctgccatgtatggagacctcctgcaagaggatgacgtgtctatggccttcctggaggagtttatgtatctgtatcagatgatgcccggatgattgctgccctcaaggagcaactgccagagttggagaagattgtccagcaaatctcagaagatgcaaggtccacaa

SEQ ID NO: 95691 - DNA, 256 bp, Homo sapiens
acccctgcctcaagcctaatggtgtcccctgctttgacagttaggaccccacttaatttcagatcaagtactggtttttgtaagtcttctttcacaacaacttcctctgtcttcacccagtcactttccccaccttcattctttgtttgcactctgaactcataaatctggttttcaacacatctgtcaaccatgtagtgagtttctttaatgcttcctttatgcactctttcccagtcatcggagcccttaagcc

SEQ ID NO: 95692 - DNA, 2046 bp, Homo sapiens
acaattagtgtcagaaaaaatcagggatatgggctttagggatgcttggaaatactgaaaactggaatacatttgacatcgccaccaagaaagcttatctggacatatttctgcccaatgaacagagtattagaatcgaaattataacatcagacactgctgaaagagtcctagaggtggtgtcacacaaaattggactgtgtcgagagctcttgggctacttcggcctctttctcattcggtttggcaaggagggcaagctctctgttgtgaaaaaattggctgactttgaactcccttatgttagtcttggaagttctgaggtggaaaactgtaaggttggactccgaaagtggtatatggctccatccctcgactccgtgctgatggactgcagggtggcggtagatttgctctacatgcaggcaatacaggacattgaaaaaggatgggccaaacccacacaggcacagaggcagaaattagaagctttccagaaagaagacagtcaaacaaagtttttggagctggcccgggaggtacggcactatggatacctgcagctggatccttgtacctgtgactacccagaatcaggctctggagctgttctttctgttggcaataatgagatcagctgctgcatcaccctgcctgacagccagacccaggacatcgttttccagatgagcagggtgaagtgctggcaggtcactttccttggaactctgctggatacggatgggccccagagaactctcaaccagaacttagagctcagatttcaatacagtgaggatagttgctggcagtggtttgttatttacaccaaacaggcttttttgctgagtagctgcttgaaaaagatgatctcagaaaagatggtaaagctagctgctgagaatacagaaatgcagattgaagttccggaacaaagcaaaagtaaaaaataccacattcaacaaagccagcagaaagactattctagttttctatcaagaaaaagcaagattaagatagctaaagatgactgcgtttttgggaacataaaggaagaagatctctgaagaaagctctcatattttaaaatatccttggaggctatctcaagacagtgaaagaacttggggattcaggtgggctacctaccatcagtggaggaaatttgacctcttcccatttttttggcattaacatggactgtattcatcaaggtattataccacagcactctatggaaatctcaagattagaaaaaaaaaaagaaccaagttatagagttagtttttattttatttttgcacttcgtcatgacagtatagagtttgtttttaatgtctcataaatgacaagtggcaaattcaaatcaactcatataaaactcattctattttttctctaaaatagatctttatatggcttcatgaagtcttttatgtgttttgaatttacataaatgaaagtctcataaaatatcataaagatattttggatcgatttctaaagatgtgactcttcaacggaggagaatagggctctgagaaatggaatcactgaaaaagaaacctgggttctctgatctatccacacagaactagagcaaggaggtgatgaaatactgatctctttcctcacataagtctgagcctaccaatatggatgtactcaaagtgaaacgctgccctgttctctgcttgaccattgttataattttattctgtccttagagtactgaaggcagttcaataatcaacatgctatttggaatgttttaatttggaaagcaataaggctctgcacctgatatcagataccttataattctcttagctttaaaaatatgtatactttctcacaaggtttttccttatctagcttcatttctctcatggtaattaatgtaattatgtatagaattaagaccacaataagggagatgatcagaggaatctgtatagtgtaattagaaaaagtacaatattctaatgttctaactgggttgtatacctaattatataataaatacaaaataattccgagtgaata

SEQ ID NO: 95693 - DNA, 1989 bp, Homo sapiens
acaattagtgtcagaaaaaatcagggatatgggctttagggatgcttggaaatactgaaaactggaatacatttgacatcgccaccaagaaagcttatctggacatatttctgcccaatgaacagagtattagaatcgaaattataacatcagacactgctgaaagagtcctagaggtggtgtcacacaaaattggactgtgtcgagagctcttgggctacttcggcctctttctcattcggtttggcaaggagggcaagctctctgttgtgaaaaaattggctgactttgaactcccttatgttagtcttggaagttctgaggtggaaaactgtaaggttggactccgaaagtggtatatggctccatccctcgactccgtgctgatggactgcagggtggcggtagatttgctctacatgcaggcaatacaggacattgaaaaaggatgggccaaacccacacaggcacagaggcagaaattagaagctttccagaaagaagacagtcaaacaaagtttttggagctggcccgggaggtacggcactatggatacctgcagctggatccttgtacctgtgactacccagaatcaggctctggagctgttctttctgttggcaataatgagatcagctgctgcatcaccctgcctgacagccagacccaggacatcgttttccagatgagcagggtgaagtgctggcaggtcactttccttggaactctgctggatacggatgggccccagagaactctcaaccagaacttagagctcagatttcaatacagtgaggatagttgctggcagtggtttgttatttacaccaaacaggcttttttgctgagtagctgcttgaaaaagatgatctcagaaaagatggtaaagctagctgctgagaatacagaaatgcagaaagactattctagttttctatcaagaaaaagcaagattaagatagctaaagatgactgcgtttttgggaacataaaggaagaagatctctgaagaaagctctcatattttaaaatatccttggaggctatctcaagacagtgaaagaacttggggattcaggtgggctacctaccatcagtggaggaaatttgacctcttcccatttttttggcattaacatggactgtattcatcaaggtattataccacagcactctatggaaatctcaagattagaaaaaaaaaaagaaccaagttatagagttagtttttattttatttttgcacttcgtcatgacagtatagagtttgtttttaatgtctcataaatgacaagtggcaaattcaaatcaactcatataaaactcattctattttttctctaaaatagatctttatatggcttcatgaagtcttttatgtgttttgaatttacataaatgaaagtctcataaaatatcataaagatattttggatcgatttctaaagatgtgactcttcaacggaggagaatagggctctgagaaatggaatcactgaaaaagaaacctgggttctctgatctatccacacagaactagagcaaggaggtgatgaaatactgatctctttcctcacataagtctgagcctaccaatatggatgtactcaaagtgaaacgctgccctgttctctgcttgaccattgttataattttattctgtccttagagtactgaaggcagttcaataatcaacatgctatttggaatgttttaatttggaaagcaataaggctctgcacctgatatcagataccttataattctcttagctttaaaaatatgtatactttctcacaaggtttttccttatctagcttcatttctctcatggtaattaatgtaattatgtatagaattaagaccacaataagggagatgatcagaggaatctgtatagtgtaattagaaaaagtacaatattctaatgttctaactgggttgtatacctaattatataataaatacaaaataattccgagtgaata

SEQ ID NO: 95694 - DNA, 1125 bp, Homo sapiens
acaattagtgtcagaaaaaatcagggatatgggctttagggatgcttggaaatactgaaaactggaatacatttgacatcgccaccaagaaagcttatctggacatatttctgcccaatgaacagagtattagaatcgaaattataacatcagacactgctgaaagagtcctagaggtggtgtcacacaaaattggactgtgtcgagagctcttgggctacttcggcctctttctcattcggtttggcaaggagggcaagctctctgttgtgaaaaaattggctgactttgaactcccttatgttagtcttggaagttctgaggtggaaaactgtaaggttggactccgaaagtggtatatggctccatccctcgactccgtgctgatggactgcagggtggcggtagatttgctctacatgcaggcaatacaggacattgaaaaaggatgggccaaacccacacaggcacagaggcagaaattagaagctttccagaaagaagacagtcaaacaaagtttttggagctggcccgggaggtacggcactatggatacctgcagctggatccttgtacctgtgactacccagaatcaggctctggagctgttctttctgttggcaataatgagatcagctgctgcatcaccctgcctgacagccagacccaggacatcgttttccagatgagcagggtgaagtgctggcaggtcactttccttggaactctgctggatacggatgggccccagagaactctcaaccagaacttagagctcagatttcaatacagtgaggatagttgctggcagtggtttgttatttacaccaaacaggcttttttgctgagtagctgcttgaaaaagatgatctcagaaaagatggtaaagctagctgctgagaatacagaaatgaactgaacgtaccttttccagggaaaataaattcactgcctcttggtgactgaacaattcaagatgtgctagagagcagtaaatcaaagcaataaaagaatcaaggaaactctttttaaaagagtaatataataaaatccaacctctcaggcaggatggaccctcttaggctgagattattgtatgtattaaaaagaagaaagagaaaagt

SEQ ID NO: 95695 - DNA, 298 bp, Homo sapiens
tttggtaccacataatgaagttaatctttttctccaaaacagtaaacttttagtaaggagataggttttattttattttctaatcatttaatcttacactagaatcgatagctaaagcttttttccccaataaattaacagtttacagtagtaccttagatatagattgggaggtatgctggtgttattaaaaaatcagatgaactctataaacacccatttggaaaaatagctattttgacatctttcttttctttactttttggctttctcagttttgaagctacccaatgtattt

SEQ ID NO: 95696 - DNA, 658 bp, Homo sapiens
ctaggcggaaggatcccttgagcccaggagtttgagaccagcctgggcaacatagtgagaccttgcctctacaaataataaacagattagccaagcaaggtggcacgtgtctgtggtttcagctactcaggaggctaagtgcgaggattgcttgagctcagtcagacggttgagacggcagtgagctctgataatgccactgaactctagcctgggcgacagagcctgcccctgtttcgggaaaaaaaaataattcattattagaatgtgtggtcttttcatagagccacagattttgaagcacagatcctaatgttttgtgcccttccccttcttattcaaccccctttcttgaaattacagttatgtctgacaactgagtgacagtgtgaccttttatcccgtatcatcgagccttcaattagtgtctccttttgacagatgtctcatttactgcttcattttcaagcttttctcattattctaattgctaattagggtaataataaatatcttgccccaggttacatgtcaagatgttgctttattggggatatcattcacttctttaactttgatttagcttgtttgcctccatgtttctcggattccagaagattatacaccaccaaaaacttaaacctaactaaaaaattat

SEQ ID NO: 95697 - DNA, 772 bp, Homo sapiens
gcaacctaagtgtctaacagcagatgaatggataaataaaatatggtacataaacacaatggagtactattcagccataaaaaagaatgagatcctgtcatttgcaacattgtagatggaactagagatcattaagtgaaataagccaggcacagcaagacagacatcatgttctgacgtatttgttggagctaaagatgaaaacaactgaacttatagagggtagaaggatgtttaccagaggcgggaaaggcagtgagggcatggtgagggggaagtggggaatgttaacgggcacaaaatgtagaatgactaagacctagtatttgatagcacaaggttactacagtcaataataattgtgcattttaaaggtataattgaattgtaacacaaaggataaatgcttgaggttatggataccccatttaccctgatgtgattattagacattgcatgcctatatcaaaatatatcatgtaccccatagatatatacacctagtatgtacccacaaaaattaaaaataaagtaaaatttcaatgattaggaagaccattgttaatatcagtttcctttaaatgtttctataaatttaatacaatttcaataaagctcccaatatttattcttagtactggaaaaagttttccaaaatgtgtatggcagaaatagggccaaaataggcaagaaaactattttcgagatgtcagttttcctcaaattgttctattaattaaacgccacctgaattaaaatttgacaagtgaat

SEQ ID NO: 95698 - DNA, 314 bp, Homo sapiens
accaagcagccagaaggatcttccaaaaatccaaatgtgaccgaccatatcctttaaaacccttcagtggcttcagttaccctcaaagccccacacctcacagggtcctcaagaccctgtgacctctgccaactgcctacgtctccaacgtcggcttcttgtgaaaggtcagaatcaaaacgtagtcaccagtattaaacaaaacaaccctgacaccaagagcgaaactccgtctcaaaaaaacccccaaaaaaccctgacacagagtcagggaaggctatgcagtgaatgcttgcatgcctgataacaaaaac

SEQ ID NO: 95699 - DNA, 632 bp, Homo sapiens
aaccagtgacaagctgggggaaatgacactgtccagtagttggaggtcacacagccccttgccttattctcaaaccctaaccacatggctggatattcctgaaatgcattcctaaacctctgctgctgagaataattggacctgccatctattcccagtttaactgccctgtataccaaacaaatccaattcaagccaacaggcaaagtataggctcagacagagcccatcctatgtgcaaggcggtgagcaggggtggaaaatctcactgtgactcatccagctgatttctggagcacactaggtgatgcccctcacttggcacccgtgttggcgctggcatcatggacaatagaaacacccagatgtacacggagggtagaaccaaggctccagggacgcagccaagtcctggcctgaggatcaccataaagagggctggtgttgagcccatcataccaggagtcagcaaggtcatgtttccggatgcttcggaagtgggcagcaagaagcacctctcatcagcttcacgagggccagagaaggggcccagactcagagatgcatttgagaaggggccttcagagctcagaatccaggagcaggggcctccagcaagaccagggtgagct

SEQ ID NO: 95700 - DNA, 363 bp, Homo sapiens
ggaggctaccagtgtctggaggaggaatggagacttagtgcttcagggggacagagtttctggttaagatgatgcaagaggtctagaaatggatggtggtgatggctgggcaacattgtgaacgtacttaatggcactgaattgtacacttaaaatggtccaaacaatagattttatgctatacatatttactataattaaaaaaaacctagtgataccactaagtcactaaactgattccagtcaccagactgtgtttaggtcgaagtgtcccacctcccctaactggactgagtttaaggtctgagaccttttctttttctgagacagagtcttattctgtcgcccaggctggagtacaat

SEQ ID NO: 95701 - DNA, 699 bp, Homo sapiens
cttgcttgtgtctgaactctagtgcacttatgattttgtagaccatgtgaaatttaataagataccttttttttcctttctttgtgtgtagtgcagcaacagtttggtctgcatttgttagaagtttaactcctaacaacccaaagacctatttaacaattggtgcataaatgaaagtagtactgtatacttgaaactgtttaagtacaagttgaacaaaaattatgaaaaggtatatttgcttctcgggaaagcaaagaagctgctttaaaaaataaaaaggggactaaaaatttgttttgtataaagaggttagccctgcgcacgtaggactgaattcagtgatatccctatacactgccatttagtggataggttattgtacttccattcatactctgggcacttgtgttgtattgttctgttacatactttttttaacctgttttgttttatcatatatgcattaaaagtattatctttatcaacatttgctgctactgtgttaacatttttgttttgcttgccatgaatttcaacttccaccacccagtgaattgatttataaattgctatgctttgctgtttttctgttgctgtggaacttaaagaatgtgaaagctgtcaaagggtattttacgaatcacttttgtgtttgatatagtaaaacaatgtgattcattccaaagtaacagaagg

SEQ ID NO: 95702 - DNA, 356 bp, Homo sapiens
tagagatggggtcttgctttgttgcctaggtcggtctcaaactcctggcctcaagcaatcctcttgccttggcctcctaaaatgctggaactacaggtgtgagcccctgcacacagcttgaaacatttattgttgaactgagtacacaggaacccatcaacacatttttcaattactgaataaaccaaaaaaaaattgtagggctcctccactctccacttcaagctcattctatcatgggagagtatatccaaaattaaatgtcaaggatcctccaaccccccaatcaacaactgctacaaggagaaaccactgtcaattacattttaaacaggctgctgtggacacattcataa

SEQ ID NO: 95703 - DNA, 748 bp, Homo sapiens
ccacaatgagataccatatcataccagtcagagtggctaatattaaaaagttaaaaaataacagatgctgacaaggttatggagaaaagggaacacatatactgctggtaatggcagtgatgggccatctggagcagccactgccatcacaccagctgctacaaggaagcttggccagggctgctgcatgcttcatggagccagcaggagtcagggacaagtgggaaccccacccctactcagtagaggcaggagcttaccaggtgccactgcagccacccaagccatggctgcaaactggacatccctgtgctctttgttccaagagcaggcaggagccccaccctccagggcaaagctgcagctgctcgaatcatggctatggacccaggcatctctgtactctcaggggcccagaaacgccgccccccattccccgaccttcgcaggcttggaaatgcctgctcccgctgcttggcttctccctgctatttgtgcccgctctaatcctgtagcaaagttgggacaaagcctgggtactctcacagcccagctgggtgttcacacactcgaggcagtgctgaaacaccagtcccttgccgcctaagaccctccaaactttgggcactgataagcataggagggaagctgagcaggggctgagagcagctctgcactggcctgcagatacctctcgacacctatagcctgggcaccatgaacagcagcaggaagcagacaggttcct

SEQ ID NO: 95704 - DNA, 216 bp, Homo sapiens
tggaagtaaatccatcaggatgttaaatctcagggtaattggaaatgttgagtgcttgaatgctatttctcaagctagtcatgttagtggatcaagcatacccttgcagtctagtcggccctggtctactctgtgaagcccatctagagagaatgctagagaaaactcaccccaacacaggaacaagctaccaatgtctgggctcctaattgtgtg

SEQ ID NO: 95705 - DNA, 231 bp, Homo sapiens
gatgggtcatgaatgctttttccacaatactggtatcaacaaaaaggataagactgggaactgtggctctgaagaaggttttctctgcctcaaatcctcccaagtcacctttaaaaagcaaagtctactaccagtctttttttttttgagatggactcttactctgtcacccaggctggaatgcagcggcatgatcttggctcactgcaacctccgcctcccaggttcaag

SEQ ID NO: 95706 - DNA, 226 bp, Homo sapiens
agtcctctctttggaaatggagcaccccattttatttttccttttgatttaaacatgtggaaaattcccattagtaccaagagatggcaatgcggacagagcaggctgaatcctcctgttaagatatgatgacctgtgtttaattctgcagttaatatgatggccatgtgttcatttcaccaatttactatatggatactttcctactcaagactactctcatacc

SEQ ID NO: 95707 - DNA, 468 bp, Homo sapiens
tctactcccacccagccagaagtggagaaatacagaggcacccacttcatctacctctcctaagttcaagagttctgctaagatttttcctattttgtcgactcactagttctgtttcagaggtgagaggatggcaaaaaaaattctctgtttctctccttgggttctgcctttggcagtttttagcttgaggttgtatctctttccttatttcagtgtgatagtatattttttgctggattttaatgtttttgcttatttccccctgtctaagtgagggagacccccactaggggcacatggcatcctcagaagaacaaaggctctacaacctgacaggccagccatgggaccctgggttcttctgagagtcactttatcctctagtcatgagaacagtcatgattactctgcagattagagatgctgtatgcaaatgttggtgcctgagggtggggataccagggg

SEQ ID NO: 95708 - DNA, 663 bp, Homo sapiens
aggtaagacctattcacccaggaagtggtcagactagaaattgtacccaggcctatctggctgctcagcatctgctctttccactctaccagaatattcattatttaacacaagcttctctccttttttgccaaatagatgatctgttacagactgtacagagcacatctggattagctattattctttttattaagactatgtttcacccgtctgaaaagattcctcatttggtaagtgcatctcctttttagaattgtactttattgagagttagggtatgtttaaaaaataattttggcttggtgcagtggctcacacttataatcccaacactttgggaggccagggcaggagggtcacttgaggccaggagtttgagattagcctggggagtttagctagaccttgtctctacaaaaaaaaaaaaagaaaatttgctgggtatggtggtgcacagctgtagtcccagctctttgagaggttgaggtaggaggatcgcttgagcctaggagtttaaggctgcagtgagataagattgcaccagtctgggcaacagagtgagaccttgtctcttaaaaaaaaaaaaaattaaaaatatttttaaagaagtgaattaaaataatttttttttgcattgtctggttccttctgatgaccttt

SEQ ID NO: 95709 - DNA, 426 bp, Homo sapiens
tgcatatttaaaaggagaatcgattgcctggcctattgtaaaggccttgtaaactttaaaaagcaaattaaaaaacaaaatcaatgatgacgttaagctcttggggatccccataacgtcctggtgattagagtggctaggcgactaggctttggaattcatgggacagtgcacttttaaatttggcagttctaaaatgaaaataaagaattgtcctttgactctaataaagttagcttaatggaaaactcactgcattgtcctcgtttttctcactgtgtcacagaccaagaaaagcgtcatccaagctcatgacaggtgttccctgaatttctgagctgctgagtgccactgaggagctcagaaagcatgatctgaatcgtgagcttacatgcgacacggccacatctcagcttcaatgccatg

SEQ ID NO: 95710 - DNA, 573 bp, Homo sapiens
gcctggagcaggccttgtgcttttcccaacactgtgcgtgttgactcagggttactgtcaatggctaattctagtgtgtcttttgttgaagtctgcagaaaagcctcaaccagcaccagcttttgaaggacttacaaaacttgtgttcttctgattctgggatttttgcctgaaatgcctcgtatatttttggctaggtgttgttagcacttgtgttacggcatttggagctctgtatttttgtgatgtgctagctgtgaggatgtttaaaattagattcctagaaatcaggttataggagctctcggccacgcttcatgggttatgttttgacacctcatagtggatcccgttgcggtggctattcttagtatttgtggaacacctgactcttgatgctaggagaatgttatttgttttctttgtaagcctaaagtctaatgaccttgtagagtctttatacccatctcttataaatcagctttaatatgcttgaaaaagtcctcattgtgcccttgaaaagcaggtgcacattttaaaagtcatccttttaaaatccttttctccagtctg

SEQ ID NO: 95711 - DNA, 445 bp, Homo sapiens
aaaatacatcattccatcccaacagccccaaaggtcttaactcattctaacatcaactctaaagtccaaagtctcatctaaatatcctctacagcaggtaaatgagactccaagtacaattcatcccaacgcaaaatttctcttcgaatgtgagcctgtggaattagataagtcatgtggttccaaaacacaactgtgggaaaggcatagaatagatattctcattccagaaggagaaatcagaatgaaggagagtgatgagtcccaagcaagttcaaaatctcagcaagtcaaattccattagctcttaaggctcaagaataaccctctttggctcaatgctctgccctccaggtccactggggtgccagcatcactaccgtggctgtgtggggtggccctgtcccttaggctacccacggcaccagcccttctcctggttttg

SEQ ID NO: 95712 - DNA, 313 bp, Homo sapiens
ttgcgtaagctcctcttgaactcctggcctcaagagatcctcccgcctcagtctcccaaagcactgggatgtcaggtgctagccactgatcctggcatgagcagaacttaacaactagatctaatttgactccactcctcactagctgtgttgccctgggaaagtcactgagtcactgatctcagtttccctatctgtcagagggggccaatattcatttctcccattcatgggtgactgtgaggactaagtttggatgataggactaatacctcccatatctaaggggtattcagtaatatattaagaataa

SEQ ID NO: 95713 - DNA, 433 bp, Homo sapiens
attagcttcttcctcttgatgttgtacttattatcaccatgtcatgtgtctttaggtcacagcttcttccccttgatgttgtactatcaccatgtcatgtgacttgaggtctgcttaggtgcctctccaggggcttaacttatttctggtagtgttgagttgtggggtgggaggagagggttaaactcagaaaaggcactgctaatgttgagtgtatccttgagatgaactgaaggcttgcagcctgctgggcttgtgggaaaccctttctgggtggagttaggataggtgaattggggctgtttattctggacaaatatctgaggtatctaatttgaaaaataaaagttagacttgtctgagtaagaaaatggttggtaattctgtgaactctgtacattgagtcagatggacaggtaccttatcaaggacc

SEQ ID NO: 95714 - DNA, 582 bp, Homo sapiens
aaataattgccccaacttttgttttatgaactcaaattattcattatattcttagagatgaaagagtaaagggagttgatttactgggacaatccaaaagaaatacaagcttaattatttgatgaccatttctcacctcacttgctcattgtgaaggaaggtgtttcttacattgttgatgcaggctcccttttacttcccttttgtaatcctcaaataaagagctatcttttcttttacagtatggcagttctcaaaagcatggtccacgcacccctggttggtctctgagattccttaagggagtacatgaggcctatattattttcacaaaaatagtttgcttttctcatgtgtagtagtggacataactactggcaccttaatacatatcaagacagtggcaccaaaatacattaggtaatcatttaccaatgtgagcattagtaaaaagtgtgcagcagtaaagtgtgcatcctcactcctgcacactttgttaagaaaaaagccaattttgcctaagaatgtttttgataaacaggtaaaaattaacgttatttaacctcagctcttcagtgcaag

SEQ ID NO: 95715 - DNA, 420 bp, Homo sapiens
gtaaaatataaaaataaactagacttgaaattgtatactggagttagccataatctctacaatttattctaactattcaaaacctaattacatgcttaatgctactactgttttatggctccttagtgctgtggttacaaacaaaaacaggacttactaatatttatggctagagcattatatttctttttttttcttaactggaaatgaccgtttcaatcaatcatcacaagtcatttgaaaaagcaatgtactaaggatataacctttggttatctcaaagagtttactcaaagttagactcagcatcttcctacccttctctcccatatgtcttagcactccctaacccaagcccagcacaagaggatgtaagaaaaaccaaggtgctaaaatcaagggctgaccatacaggtacta

SEQ ID NO: 95716 - DNA, 650 bp, Homo sapiens
agcaccagcatctggcttgggtcgccttctacgctgtggaagctttgttcttttgctcttcatgataaatcttgctgctgctcgctgtttgggtctgcactacctttatgagctgtaacatgcaccacaagggtctacagcttcattcctgaagtcagcgagaccatgaacccatcagaaggaagaaactccagacacatctgaacattggaaggaagaaactccggacacaccatctttaagagctgtaacactcactgcgaaggtctgtggcttcattcttgaaatcagcaagaccaagaacccacgagaaggaataaattctggacacatttggcaacccagatgggacacattttggcgaccacaaagggacacattttggcaccccacatgggacagtcacctatcgccaagctgatcgaggccatcaagctacagatggtcttacaaagggaccccaaatgagctcaactaacaacttctaccaagaacccctggactgagccactgaccctttcactggcctaaagagttcccttctggaggacactacaactgcagggccccttcttcacccctatccagcaggaagtagctagagaggtcatcgcccaatacccaacagccgttggggtgtcctgtttaga

SEQ ID NO: 95717 - DNA, 291 bp, Homo sapiens
tcccaactctccaactcagactctcgctctgacccccaagtcaaatatggcaggtagcactgccttctttaggggtcttccagattatgctaccaccaccaccaccaccaccactccacttttcagaaacatgtgggtttccacttgtcaaaaataaaacaaccctcttgatcattatagacttggggtcttggctagagaacaaatgaaaacagaattaagaacaaagaggcggggcatggtggctcaagcctgtaatcccagcacttttggaggctgaagcaggtggat

SEQ ID NO: 95718 - DNA, 453 bp, Homo sapiens
gtgggggctgtgacacccacacacggcaggggcaggggaagagaggagatgaaatcagcctggatggccctcactctgggcctcctcttgcactattcatttcttgggcttctgattatctgctgactgggacaaaaaaagaagccaaatcctagggcatgaattctagtccattccaattttatttttgcatttctgaaatacacggattcttccaaccagaatattaatattcaaaatagcaataataaaagtattagcaacaaaacagctactttattcagtgcttacaaccacccttgagaagtcatatccccactttacagatgagaaaactgagactcagcttgcctgaagatacctagctaataaatggaaaaacaattgtgtctgacatccaagtgtatactttgactaccatgtctcttagaaagcacttaatcctggttgggt

SEQ ID NO: 95719 - DNA, 813 bp, Homo sapiens
agcgggtttcaccatgttcgttaggatgtcttggtctcttaacctcatgatccacccgcttggcctgccaaagtgctgggattacaagtgtgagccaccatgcctggcctacactattttttaattaatacatataagatgtagatatttttggggtacatgtcataatttgatacattcatatgatcaaatcatggtaattgggttagccatcaccttaaatatttatctttataccaggaacatttgaattattgtcttctagctattttgaaatgtgccatcaattatttttaactgtagctaccctactgtgacctatactatttctaaatatctttgtatttgattctaaagactcttaatcttgatgggaattgatttttttgttttttcatgttcttaggatcacaacttttacagatttttaaaatattggccgggcgcagtggcccacacctgtaatcccagcactttgggaggctgaggcaggagatcaagaccatcctggctaacacgatgaaatcccgtctctactgaaaatacacaaaattagccaggcgtggtgacacacacctgtagtcccagctacttgggaggctgaggcaggaggatcacctaaacccgggaggtggagattgcagtaagccgagatcgcgccactgcactccagcctgggcgacagagtaagactccgtctcaaaaaaaaagaaatttctgtattaagccttacaaaagatatccatattctaatccttggaatctgcgaatgttattttatatggcaaaagaagggtggaatctgtgtgtgtg

SEQ ID NO: 95720 - DNA, 574 bp, Homo sapiens
agcaatggggatagtgtaagcataaataataggtaagaagtggatcaatgcaatggaaagaaaggattaatagtgttttggcaggttagaaggagagaagaggagaggattttttttttttttttttactttggttggtcgtgtgggctggaagaacagagcagatcgttaaatactttggaaaagaagtaacatttgtgtggaccttgaaaggggtagaggctcaggtttacacagataattacaaggtagaaggctctctgttctctccataaatgagagataccatcatatatttaaagctatagaattggatgagatcatctatacttggtgagtatagctaaagaggtaaaaggattgagcctggagctttcccaacatttagtggttagaatgaaaaggaggagctggcagaggagactgacagggataagctggtgagacagaaggaaactagcagaatgtgacatccctagagccaagtgaagagttacaagaagaaaggagtgatcagtttagtcaaatgcttagtggtaatggagtaaagtgctttctagaaggtaatctgagc

SEQ ID NO: 95721 - DNA, 314 bp, Homo sapiens
ccactctggccctcagtttctgtctggaaagaggtagccagtcacactaaagggggacttctttttgggtaggctattagagaggctgattcgatcattgattttttttttttaaacaaagcttatgtttttcctccgagtataaaagtaaaacatgacggttatgtaattttgaaaaacagaaaaataaatttaggcctggcacggtggcttactcctgtaatctcagcactttgggaggccgaggtgggcagatcacttgaggccaggagttcaagaccagcctggccaacatagagaaaccttgtctctat

SEQ ID NO: 95722 - DNA, 311 bp, Homo sapiens
agtagcaccctaccaccaccatttcccttgttggagtggagtgagaggaagccaactaaacagtggtttaaataagacccagagtctcataacatagtatctaaaatacccatgtttcaatagaaaatcattcatcatacctagaaccaggaagatcttaaattgaatgaaaaaaagataataggtgccaacagtgaaatgacagtggtgtttgaattatcttacaaagattttaatgcagcaatcattaaaatgcctcaacaaacaaggaacatgcttgaaacagaagagtcttagcaaacaaacaatct

SEQ ID NO: 95723 - DNA, 451 bp, Homo sapiens
ctgatgagtagacaagataacagtgttaatatagatgtttctttgatgaatcccttatagttcagagaaaaagcatttaggaatataataaatcctattttgagctgttcggtcaattatttaaaaaccaggtgatatttaactcctcaaagtaaattaagtttcttttgggttaccttctgtattagtttgtttttatgctgctgataaagacatacccgaaactgggaacaaaaagaggtttgcttggacttacagttccacgtggctagggaagcctcagaatcatggtgggaggcaaaaggcacctcttacatggcggcagcaagagaaaaaatgaggaagaagcaaaagtggaaacctctgataaacccatcagatctcgtgagacttattcactatcatgagaatagcatgggaaagaccggcctccatgtttcagttatctccc

SEQ ID NO: 95724 - DNA, 460 bp, Homo sapiens
tgacagagtcctgctgttttgcccaggctggagtgcagtggtgcgattttggctcactgtaacctccgcctctttggttcaagcgattctcctgcctcagcctcccaagtagctgggattacaaggtgtgagccaccgcgccagccttaagaggcatctttaaggtgtcaaactcttaacatcatttatgaaaagccctgcctgtgaagcaggcctgaacactaatttgtatgttcttcatgaggaggtctccagcaaaagagaggtatgtactaataatttctgagaaatgtatgcagatcaggagactgcagtctttcactaacaaaagaagtttaacaacttttttgtgagaatatacattgtgatagtggaaataagcgtttacactgtttgtataaccactttgcattctctgaagaaggattggtatttgggagtgtgttgtgtattggggcaa

SEQ ID NO: 95725 - DNA, 405 bp, Homo sapiens
cagaagttttcatgggccgatctgctgagttcagcctaggagctgaggccaacatctgagtctcctcagcactcaagtttgagagaagtcctagtgacttcaagctcggaactaacgcggcagcggctccctctcgacgttgaagcctccctccctttccagggagagacgaggcacggaccgacaaagcccacgaacaccgatgagcgagctgccggccaccccagcttctacaatccgaccttctccttctgcctctaccgacaaaatggacagaaatttactttttaaaagacactttcaagagaatgagaagataatcatcaagtgggagaaaatatctgtaaatcttctatctaagaaaacacttgatccaggatgtaatgaagcactctgaaaactcag

SEQ ID NO: 95726 - DNA, 650 bp, Homo sapiens
cgggtgccccagcctctctccctgccttctcctccccaggctgtgaccactctcagctgacacctccgctgctctggcaacccaagaacagcctggagaaaggtcagctggccgccttccccagggcctgcctggatccttggaccccagtgttgcgtggtgtgggagcgccctctgttggctgtatgggccatgaacaccactggaaacagacttcctctttcccttgctgctcacccctgagacttccagccttcttaataagggactttaggagaggaatgggtagggtcgcctataatttgccgttgaaagcgagatgttttggagaatgaaagagggtgtgaataagtgcactgagatactgagtattcggcagatgcgtcttaagcagatggtgaggaaggcttccctgaccgcctacttgggtctcagccccatgggcataagccaacaaaatgtgtgctagccctcactggtgaaagggtcagctattcccaatttatgtttgaggaagtcagaatctcaaatctatgcttacccaatgacttcacgctttcccttgggaataatttcccaagaccccaatttcccctttgcagcagggacccaaggtggagacccaagggttccagttccagaaagaggga

SEQ ID NO: 95727 - DNA, 354 bp, Homo sapiens
acacactgttaatattacacaaagttacttaccaggcttaaaaacatagtgtgcttttacctgtcaccaggatttccagactgttgccagaaatactttagaggagagttttaaaagccctgggagaaccagattgttgctgaacaatttcaaagttaaaaatacaacccaggggtcgagaccttcccgaaccacatggacagccatgttctccatgctggacaccctttcaattatgtcctcccctaggtggtgtctccttcccttccacctctaacttccatcctcccttcctgatcccactacatatgtacttgttggcaagcaaatcagttccactgtcaaggaaaaagg

SEQ ID NO: 95728 - DNA, 135 bp, Homo sapiens
aactgctcctgctgaatgagaaagagaagagtcccggatgtgtgtgtggttacaacagaaaacactcttcctgccaggccgaactcccccggagatgccctcggcggcagacccagggccattgccactttttca

SEQ ID NO: 95729 - DNA, 243 bp, Homo sapiens
tgttgggattacaggcgtgagccatcgtgcccagccactcaggaggatttttctgtagaaatttttgtccaagtttctttttttgttttagctaaatctaagatctttcattaatgcctcattactcaaagatgttacataagatcgggcaaaaatctgtttgtaagctaatgttgattgattgattgattgagacgaaatcttgctctgtcgcccaggttggaatgcagtggcacgatgtca

SEQ ID NO: 95730 - DNA, 396 bp, Homo sapiens
atgggggtttccacccactttggaaaaatgtctggcagtttcttattgaagtcaacatgcacttatcctgtaatccagcaattctactcatttactaagagaaatttgtcaaaattagtcacaaaaaagcttgtataagcatgtttatagctattttagtcgtaaccaccaaaaattagaaacagcccatgtgtttatctgtagaagaatggacaaaatggaatttatccacaaaatgaactattatttagtgactaaaaggaacgaactaccaatttaagcaataacaggaatttaacaatattatgctgagtaaaagaagcattacacaaaaaaagtgcaagatatgatttcattcacaagaatctctggaaataatctgtggtagaaaaaaaa

SEQ ID NO: 95731 - DNA, 501 bp, Homo sapiens
gaggcatgtgggctagactgcctgctccctcagctcactctggcactctggccctgcatggacgccgtcctggccatgccattgccaccttctgatggatgctgctgggctgcctgacttcatgcctggggaggcctgacagagctcagctcacactgggaagtgtggatgcagggccatttgggggtcccatggacaagtgttctattctctgctgcaggtggtgcagacttgctctgggatcctggggcctgcgtggccatccttgcacctttcaaatgcttgcatcattgtcccttgcacagactcccttctgctgagacattttgtcaggtcatgagggaaagcttagcagtgaagccaccaccttgtgccagggaccgtcagtgccccacctcctaaccagaacagcaccctcttcacctgcagacagtgggtgggccaatcccaaatgtccatctgatcaccagttttctcaagctgcttctggcccatttgtgt

SEQ ID NO: 95732 - DNA, 368 bp, Homo sapiens
acggggcattcctttttgaacagtacccattcccttgatgtctacgatatcacctttcttatagattcacatatacatggccaaaggaacaactccatgttttctaaaaggcctagagaacatatatcgggtgcctctcctctttccctttgtgttcgtcattttggcgaattactagaagatggcagttccggctgaaaggaaaagatatgtccttatttttgtaccagtaccatgctgttttggtgactatggccttatagtataggttgaaatcaggtagtgtgatgcctccagctttttctttttgcttagtcttgcttcagttatgtgggctcttttctggttccatatgaattttggaattt

SEQ ID NO: 95733 - DNA, 412 bp, Homo sapiens
ttgtatttggttttctttggttagataaagtgctgggtataggattgagagtggagtatgaagaccagttaggatggaggatcagattggagttgggttagagatggggtaaaattgtgctccggatgagtttgggattgacactgtggaggtggtttgggatggcatggctttgggatggaaatagatttgttttgatgttggctcagacatccttggggattgaactggggatgaagctgggtttgattttggaggtagaagacgtggaagtagctgtcagatttgacagtggccatgagttttgtttgatggggaatcaaacaatgggggaagacataagggttggcttgttaggttaagttgcgttgggttgatggggtcggggctgtgtataatgcagttggattgg

SEQ ID NO: 95734 - DNA, 510 bp, Homo sapiens
ggtaaagcctgtagactgaagatcccaaagaacttgatctgaatgtcagacactcaagaaataagtttgtaaaagaaggcttacaattttcattacaattaggtgacatgaatgcaattttatacctattcagtactttgattaatgctattttttcccaggttttttgatctagaatctcttcttggctaagcatataggatgccacttcttgctacctccacagcaatacatcacctggacagcttgccactctttgttgccttgaacttctctgatgtttaggcagcccattctggtactgagaacacagtgaatgagctacatcctcctgctttcttcttctattattacttttacctgatttcttctcaggaggaagctgtacattttaacaggacagataggaggaaaagcaactatttttctgccgagataacaattgacaacttggggcagtatgtgcagagttttcctggagttgtattaaaaattatctgataagctgca

SEQ ID NO: 95735 - DNA, 227 bp, Homo sapiens
tgatacagcaaacacgttactgcaaaaacagctacagcagctacctgggtgagatggctgccacctgcagcctcagtgaatctggcttcacaccacatgccttgaatgtggcccctcccaaaagtaacatgtttattgcctcacacttccaatcatgggcctcaagagtttgtgatttatttattttataagctatagatatatataactgataactctggattact

SEQ ID NO: 95736 - DNA, 474 bp, Homo sapiens
aagttcaaggctgcaatgagctatgactgcacgactgcattccagcctgggagatcaaggaagatcctgactctaaaaataaaataaacatgtttatataagccacagttaaaaggggctcaatttgaacaggaaaactgtcaaagcaggaagaacatcaatagaaatgattaacactctctatcaatgcttaccgtaataccaaataaagctgcttaattaagattattttttaaataattattttaaaaatacgacatatttttaaatgttatttggaagcatgggaatttgctaagagaaatgtcaccaaatggggcatggttctatttcctacatttagcaaagccttatgatgcacagtgtattttctctagaattccatctggggttctcactacaaatttccagatgaagtcccctaatcaaatctatagcatcaagttggccaaagcctaagagtgatgcccactt

SEQ ID NO: 95737 - DNA, 514 bp, Homo sapiens
ggagagaccccgtctggcttctgtgtaggaagagccctgtcaccctttgtgaggaaggacctggggggtcaagagtgacagcagggggaggggctgttccctcaacacgtcatcacctgcctccctccaatcagttccacaggccacgaagcagacactaggaaaggaaggtgccaccccgcaccacccccagtctcgccttgagagaataaaggcagcgtgtgatgaaatgccaagttctgaggcaggtggttcccaggatggtcagcgccgcaatggccttctcagcatgttgctgagtcctgcagctggctgtcctgcaggccccaagagctgcagctgctccaggcagcatctccaaccgcagccatgcccaggctagcaaaacttccgacctcctttttattctttaatgaggtataatttacattaataacctgcacttatctaaagtgtacaatttgatgagctcagtcatgtgggaagccataaccacacattccatcgcccccga

SEQ ID NO: 95738 - DNA, 336 bp, Homo sapiens
cactgggacagggagaagagaatcgcaacaaacaagatttcttaaatgcccctgcatttcattaccattagatcataccattgtcctgcaatcatgttgcacaaatatctataaaaatacagttttccctctttctttggtgttttcatttttaaagcctcctgtgtaatataaaatttatactaaataaattcatgtgcttttctcttgttaatgtgtcttctgttatagacatctcagccatgagatttgtgatgggtgagaagatatttcttgtcaactcctttatcacaaacaaaaataattctctcaataagtgtttcttattttacacaa

SEQ ID NO: 95739 - DNA, 370 bp, Homo sapiens
tgatctcgccacccatgatttggttaaccatggtattcttcaagaccacaacctctgtttactttgattacaagtctaagccaagtacaagattttgtaaagaattttggaggaggacaccgatgtcccagcagaaggcggcatgagaccaacgtgggagccagaagagagaggttcctggctggcccaggtctagtcccttagtcacacacgtcaaagttcatcactagggtgttagtgaagaggaaatgggaccaggcgcggtggcttacgcctgtaatctcagcactttgggagatcgaggcgggtggatcacttgaggccatgagttcaagaccagcctggccaatatggcaaaaccctgtctcta

SEQ ID NO: 95740 - DNA, 612 bp, Homo sapiens
taccattatcaagtattacgtgctgtacatatgtatgtgctatactttcatatagtcatatgcatatagcagtgcagtaggtttacaccagcatcaccataaacacgtgagtaatgtgttgtgttatgaaggctgtgataatccttaggtgctaggaatttttcaccaacatagtcttatgggaccactatcatttatgcagtccattgttgactgaaatgtcattatgcagtgcgtgattgtattgatacagcaactagaatggatcccaaaagaattgcaggcacacctaggagatactgcgagttcagttccagacaaccatgaaaaagcgagtcatatacatttttgggtaccctggtgcatttaaaagttaggtttactactgatgttatcatttgaaaaaaaaaagagttttatacaattctgtagtctatttaaagtgtgaagagcattatgtctaaaaaatgcacatatcttaatttttaaatattgctaaaaaattttaatcatctgagccttcagcaggttgtaatctttttgctggtggagagtcttgcttcagtgttggtggctgctgacccatcaagatggtggttgctgaaggttgga

SEQ ID NO: 95741 - DNA, 667 bp, Homo sapiens
agttaatatcttatccttatatttgcactccctatttcattttctgcaagcatagctcctgcttcctgagatcagcacagcaaattaaactactcacacataagcctttgtctcaggccctgctttggggagaatataggctaagacaaatgctttaaggccataaacagaattgagagggtatttcagacttctgccttcagggactgggggttggagtcaaaagtttttctctattgtgctccaaggttaaataaacaatgctgttggtcataaaatgtcatccacattttcttcctgtgaaatagggtcacttgatgataatcagcagtccctttgctcttagaacattttgctttcatccttctcctggttgatattaatggtctttataaaattgatattgatatgatctgatggtatttggtagatgtggttaacatgtacagtcagttgacttttgaataaaagagactgtcttcaataatctgggtgtgcctcatccaatcagtgtaaaggcctaaagaacaaactgaagtcttccttggggaagaaacttactgtggattgctgttccactcctgcctgagtttcagcctgctggttggcctgcagattttaacttggcaagccagcctgaagagaaaaaagcaattctgcaataata

SEQ ID NO: 95742 - DNA, 801 bp, Homo sapiens
cagtaaattagccgagcatggtggctcgcgcctgtagttccagctattcgggatgctgaggcaggagaatcacttaaactttggaggcagaggttgcagtgagctgaggtcgcacattgcattccagcctgggcaacaagagcaaaactccatctcaaaaaaataaaaaaagaaagaaaaagtcagccttaatttagtgatgttattaagaataacaaatgccagtgtgatgatcagtcctggactctcaggtttgcctgttctgactagagttatggtgaaactttagttatcttccagtttttaatacggtccttgctgcaatgactttattctagagaactagcattactaaaacattttagtgcttagtggtttttaatacttatttcacaagaataattaaataagtcttttcctcgttgagtgtgtagtatgatgcaggttaggtatctgtgacacctataagtaaggctgacccatgaacaacactagcttgaactgtgtgggtccatttatatggagacttaaaaaaaataaatacattggaaaattatttggagagttgcaacagtttgaaaaaaattcagatgaactgggtagtctagaaatatgaaaacaattgagaaaaagttacatatgtcatgaatgcataaaatacatgtagatactaataatcagttttatcatttactaccataaaatatacacaaatctattataaaaagttaaaatttgtctaaacttatgcacacacagactgtacatggtgctattcatagttgagagaaatgtaaacaa

SEQ ID NO: 95743 - DNA, 859 bp, Homo sapiens
ctccataatggttgtactgattgacattctcaccaacagtgtaacaggggttccctttttcctcccatatcctcaccaatacttgttatcttgtgtcttattttattttattttttgagacagagtctcgctctgttgccccaggctggcgttgcagtgagctgaggtcgcacattgcattccagcctgggcaacaagagcaaaactccatctcaaaaaaataaaaaaagaaagaaaaagtcagccttaatttagtgatgttattaagaataacaaatgccagtgtgatgatcagtcctggactctcaggtttgcctgttctgactagagttatggtgaaactttagttatcttccagtttttaatacggtccttgctgcaatgactttattctagagaactagcattactaaaacattttagtgcttagtggtttttaatacttatttcacaagaataattaaataagtcttttcctcgttgagtgtgtagtatgatgcaggttaggtatctgtgacacctataagtaaggctgacccatgaacaacactagcttgaactgtgtgggtccatttatatggagacttaaaaaaaataaatacattggaaaattatttggagagttgcaacagtttgaaaaaaattcagatgaactgggtagtctagaaatatgaaaacaattgagaaaaagttacatatgtcatgaatgcataaaatacatgtagatactaataatcagttttatcatttactaccataaaatatacacaaatctattataaaaagttaaaatttgtctaaacttatgcacacacagactgtacatggtgctattcatagttgagagaaatgtaaacaa

SEQ ID NO: 95744 - DNA, 127 bp, Homo sapiens
atattcacagaactggaagatttcagaattttgagacccttctttgaatgaagggtcattagatgtaataatactttttgtactaacctattatttaagaagttggattatagtcaagtttgactgt

SEQ ID NO: 95745 - DNA, 434 bp, Homo sapiens
acctgcctcagcctcccaaagtgctgggattacaggcatgagccaccatgcccagccaatcatgttctgagttcttaaagccagaaacttatctttgcatttctgatgatagcaaaaattaattctatgaaaagtttgtgtgtgtatatgtgtaaatatgtatgtggatagctaagtatacattcagctcttactatgtccaaagcatatgaatgagaggctaaggactgcttactatggggaagaatgattcttactttacatttggccaagatcacagatcttataacaaaaggattaaatgttttagtattgatcctgatgaacacctgacttttaaagaagggttataagagcttataaaccaaggttaaggaaaaaaaaaagtggaacacggtggtaaaatattaatctttttgcagtagatatatatt

SEQ ID NO: 95746 - DNA, 274 bp, Homo sapiens
ccactttgagccacttagaaaattccaggtagaaataccgaacatgaacctcccacgcttcccccatcattctcccttcaaactggccgatgaggcatcagaagagtgagctgctattctgttgtggctgggaccttctcatgttttcatgaaacaagcccaggtaccaacttagagttcctaatcagaaggacaaaaccgaaaaagcaggtctcaggtctcattctgccttgcctttcttttatttatttttttttttgagacagagttttgc

SEQ ID NO: 95747 - DNA, 620 bp, Homo sapiens
ctaaagccacatacatggagacgacctgtcttcaactctcatatcccaggaacagcagctctcttgttatcctgtccctgtttcgctggtttctgcagacatccggtgatgcctcttctcccctgcacatggaggtaggctccatgcaacacactgcgtgcacacacgtgcccacctgtgcacacacccacatcctcactcagccgcctgccctcaagcacccaccatccctccctccacaatcctgcctggctcaggcccaggctaggggtgaaggggcatacggaggcaagcaggaaaggggccttggcctgaattccaaagtctgaaatagcccaccacaaattatctttgttctgacaggctgattagcataattatcccatcagaggaaaaaaaagcagaagagagaggacgaggacagtggtagaaagagagacagccaggggcagagacaaagaaagcagcaggcactgagaggggtggctctcaggaggccacagcccacgagcaagcacagatgcccaccgggccccaggcacagccctgggggagccccttccctccgacaggccaggcttgctgtgggcttcagggcctatctgtgagacgggagggct

SEQ ID NO: 95748 - DNA, 338 bp, Homo sapiens
caaatgacccacaagaggtgggccattaattattgggtcagatgcataaatgcacagtaatttatttaagcacctcttaatggtgacccacaaggaagattgctcgtagtagcggaaaggttcacaataaataagagaaaaaagcagaatgtagaactgtatgatagcaattctgcaaacaagaagcatcttttataaaagatggaaggagcccaggcacagtagctcatgcctgtaatcccagcactttaagaggctgaggtggaggatcacttgagctgcagtgacccatgattgtgccaccactccagcctgggtgatagaagtgagaccttctc

SEQ ID NO: 95749 - DNA, 390 bp, Homo sapiens
ggcacgagcacaaattaaaagttgtaagtttattataaaattagaaatagtgcaaaatatatgaatttcttagtataaataattttcaccatgccataaaacccattaaaatttaaaaatgaaaataagaaatatttatgtcaactttacatgtaaagttagccatactataccttttttgcatgcttctatcatcgtcatgaccaaaatttagtcaagactccatgtccaatttaagccctgatttatacactgcacacatatattttttcctacagaagaaatagctgcttgtttttccatcactaattctactgattaaatgttacttgtaagcaaaacttagttagtattaaatgaattcatatacatgaattctgtcatggtata

SEQ ID NO: 95750 - DNA, 150 bp, Homo sapiens
gaaatactgcttactctttcaaggttacctcaaatgccatgtcctcaatacaatatttatgtcctttatcagtaccgcctgaacttcagttcgacaaagctggggagcacctgctacagaacaggcatgtatgagccagtgggagtgtga

SEQ ID NO: 95751 - DNA, 551 bp, Homo sapiens
tgtggaaaattcatccattaattcccacattcattggaaaagagccaaaccaagatctcctgacttttgaactatcagactctccataaaaggtggtcactgtgaaattcttatgtcaattcatcttaattttccattgccttaaaataaaagagaacttcatgatgtacataggagtgattacaaatttaatttatactgatgctagttttatttttcttaggcaatactgggcaaagccacaagtcatacgcaggcagtgcttcaaaaaactatggaacaaaacagatccttggagaaggtatttggtgcttttagtgtagacttattgaatccaataagctgttaaatataatttccctaaactcaccatactaatggatctgtcacttgtgcctaccttctgctaggtgtgcttcagttctgatggtcttcccttttggagtttacaatctaaaacagattgtcatgtgcacaatgaattcaggttatttttatttccccatgttaaggtagtaggaggcctgccaaattggtacttctcatttctt

SEQ ID NO: 95752 - DNA, 248 bp, Homo sapiens
tcactgcactccagcctgggtgacagagcaagactctgtctcaaaaaaaaaaaagaaaaaaaggattacatacacacacacacacacacacacacacaaacagatgtttattgagcaatgctatgagtaagactgtgtcttagaccctgtagggaatacaaagattaaacaaatccctttccctcaaacactttacagcctactggaggttgaggaaagggagaaatcatgtgcacaagtagctacaa

SEQ ID NO: 95753 - DNA, 918 bp, Homo sapiens
accagaacagcatatccaaaaattatgaggcaatttgaaagtataacatatgtatagtcaaaataccaaaacaagagagaaggagcagagtacatatttcaagtaaaaatagatgacaacttttcaaaactaatgatagacaaaacacatgggtgaagtataggagatttttaagggtagtgaaactcttccgtgtaatactataatcgtgaataaatagcaatatgcatttgtcaaaacccgtatcagcttaatctgtgcaaactttcaaagaatcatttgataggttggaggataccagaatgaaatgcagaatgtgacaaagcaatccaactctattgtaaatgtataagacaaacttactgaagtgggtaagcaaaaaggtgctgacctgagtaattttgcaactgagtagtgtgtgagaataagagctaaagaaactctacataaagcactgtactatagttgatgaagtggtttcctagggaaatacaaatgatgagttctgatacttttatacatatacattgtaattgaacaattaagtaaatggatagaagagagtaggagccaggcttcttgctgttggagtgcaaccttaaaaataagcaacaggatgaggatataatcatccctgtggtaatggattacagttggagacagcagtatgaaatcatgattaactaattacagatacagatggttacacatagaaatatatatgggccaccaggctggcaacgaaacacatcctgattttacctaaactcttgacttgtgcttcctccaaaagcctgggtctgttatatctctcaactggcacatactgtttgctctgactggaaggccaccccaatacaactttcctaaccttaataaacgttccacagtatcactcccggaaaagccttggaaacc

SEQ ID NO: 95754 - DNA, 479 bp, Homo sapiens
tagagacgggtttcaccatgttgaccaggctcgtcttaaactcctgacctcgggtgatccacctgcctcagcctcccaaagtgctgggattacctgcatgagccactgtgcccagccaaaacttcttgacgttgagagtttgaatcttctgaatcatgaaacatttttaaatttttacatttacatacagtaaaattcactctttttagtgtacggttctaggagtttcggcaaaggtggagagttgtgtaaacactggcacagtcaagagacagaaccgttcccatcacttcatgccgtcccttagtggtcagcccttccccacatccgatcccctaatttgttccctgtttcttgatttctcttgggcctgttcctgtagtaaggcagccggggtagggggtggcaggcaggctctttgggggtccatgatcattcttctggcacatgggcctccttctctacatagacaacatgcc

SEQ ID NO: 95755 - DNA, 624 bp, Homo sapiens
aacgtggggcgctgacgcgctcctccccggagcctatggcagcgcagcgccggacggggcgttctccctccccccctcctctcgcttccatctccgccgtctcctcggtctcccttcccatcccggcccctcctccgccagccgcgtcctcccgggcttggtgaggaactgttcctggaggagccgcgggacgccaaaaccagccaatgggaagcggcgattcgcggagattggcactgatgatgggaaggaatattgatctcagcgttactttgaccattaatgaattatgatggcaataagcaaagattcgcacctctagcctccggggagcttaatcttctgctacaacatttgcatttggtgtctctctactgctcaggctggagtgcagtggtgcgatcatagctcactgcagcctcgacttcctgggctcaggtgaccctctcgcctgaaaccatattccccctcaagtagctgagactacagagacaaggtctcactatgttgcctaggctggtcttcaactcctggcctgaagttatcctctcatcttggactgccaaagtgctgggatttggcaccactgagccaaatcccaggcgtgagccactgagcctgggc

SEQ ID NO: 95756 - DNA, 1129 bp, Homo sapiens
aacgtggggcgctgacgcgctcctccccggagcctatggcagcgcagcgccggacggggcgttctccctccccccctcctctcgcttccatctccgccgtctcctcggtctcccttcccatcccggcccctcctccgccagccgcgtcctcccgggcttggtgaggaactgttcctggaggagccgcgggacgccaaaaccagccaatgggaagcggcgattcgcggagattggcactgatgatgggaagcaatgataaggaaactaaactggattaagtgctatcatcttggaggtgcaaaggcaaacaaggagaaagaagtgattgaagagcacttcagaaagcttggtacattcaaatcagcagggcttgattactcgcatcccaggacacttaaggaattggcaaatataattgcaagaccaccagcctttattttagaaaatgaaggttggacagaagaaggtcctgacaagtaaaatcagcagatggagtacctgttttttaaaagagggaaaaggacagctgtagtaattatagactattcagtttatcttggatacctgggaagatacaagagcaaatcatcaaacaatcaatttgcaaccacctagaagagtacaagctactgggtcgtaatcaacgtgattttgtgaagtgcaaattatgccacaccaatttaattttatctatgatagagtgatgagcctggcagaagaggggaaagcaatatctacaactggacttcaataaggaatattgatctcagcgttactttgaccattaatgaattatgatggcaataagcaaagattcgcacctctagcctccggggagcttaatcttctgctacaacatttgcatttggtgtctctctactgctcaggctggagtgcagtggtgcgatcatagctcactgcagcctcgacttcctgggctcaggtgaccctctcgcctgaaaccatattccccctcaagtagctgagactacagagacaaggtctcactatgttgcctaggctggtcttcaactcctggcctgaagttatcctctcatcttggactgccaaagtgctgggatttggcaccactgagccaaatcccaggcgtgagccactgagcctgggc

SEQ ID NO: 95757 - DNA, 1144 bp, Homo sapiens
gaaagaaagagatagagagaaggaaggagggaaaataggagggagggaagaagaaaggaaggaatgaatgaggcaggaagggagaaaaaatggaaggaagaataccggcaggaatttgctctataggatgtaaaatgcaaccactaaaactactaaaaaaaaatactatcaacagatactgctaaataaaaactattaacaaagaactgtaatagcagaggctttcactgtgtttttaacctgtttcattttcctttttaatcagcaatgataaggaaactaaactggattaagtgctatcatcttggaggtgcaaaggcaaacaaggagaaagaagtgattgaagagcacttcagaaagcttggtacattcaaatcagcagggcttgattactcgcatcccaggacacttaaggaattggcaaatataattgcaagaccaccagcctttattttagaaaatgaaggttggacagaagaaggtcctgacaagtaaaatcagcagatggagtacctgttttttaaaagagggaaaaggacagctgtagtaattatagactattcagtttatcttggatacctgggaagatacaagagcaaatcatcaaacaatcaatttgcaaccacctagaagagtacaagctactgggtcgtaatcaacgtgattttgtgaagtgcaaattatgccacaccaatttaattttatctatgatagagtgatgagcctggcagaagaggggaaagcaatatctacaactggacttcaataaggaatattgatctcagcgttactttgaccattaatgaattatgatggcaataagcaaagattcgcacctctagcctccggggagcttaatcttctgctacaacatttgcatttggtgtctctctactgctcaggctggagtgcagtggtgcgatcatagctcactgcagcctcgacttcctgggctcaggtgaccctctcgcctgaaaccatattccccctcaagtagctgagactacagagacaaggtctcactatgttgcctaggctggtcttcaactcctggcctgaagttatcctctcatcttggactgccaaagtgctgggatttggcaccactgagccaaatcccaggcgtgagccactgagcctgggc

SEQ ID NO: 95758 - DNA, 280 bp, Homo sapiens
aggcatcagcttcctcatctgtaaaaatgcagataacaaaagcacctaccgcacaaggtccatgatgaaaaagactttgaacagcctggaatttaataaacattttgtttgctattattattactgtgggagttttctctcctgctttgatgttttagcctgtgctgtatttatatttgttcttcaaacaacaaaatgagtatgtataattcaaaaatcctggacactgctgggactcacatttttcccattaagtcctagatggatttaggtctagctg

SEQ ID NO: 95759 - DNA, 776 bp, Homo sapiens
agtcacctgacttcagaaaatcaatttggattctacagaaaggttctgttggattctgagtggaacctctttggatatgcctttggatttcaagattgagccaagtgttgacatgggaagatgctccagttcctccagttatctcaaagaagctcattaccttgctaaggaatagcacacagtgaagacagtcagtgagaaccagagctattgttacaactgacagcagccagctcaggaggcagaggacgagagcgatcgggctgcacacacatggatgaggctgatttttcagaacacacgacttataagcaggaggatttgccttatgatggggacctctctcagattaagataggcaatgattacagttttacctcaaaaaaggatggccttgaagtcttaaatcaaattattttcatagcagatgaccctcaagagaaggctatgcatagtgagacttgtggaaatacagctgtgaccatacccctgggtaaaattactgaaaatgctgccaacaaaaaagacgagaaagagaaacaatgcactgcagctcttcatattccagcaaatgaaggagacgcttctaagtcaagcatttctgatattttacttcatcatctttccaaagagccattcttaagaggtcaaggcattgattgtgaaaccctcccagagatctcaaatgccgacagttttgaagaggaagctattattaaaagtattatttcatgttataataagaattcttggccaaaagaacaaaccccagaact

SEQ ID NO: 95760 - DNA, 362 bp, Homo sapiens
aattcaagcttctaacgatgtacggggacatcttgctgttatctctagctctttccctcctcccatttcctttagtagttgaattttgcaaagcttgtagcagtagctcagttgcctgcagcatccttgtgtgtagataaattagtcgacagaaactcagcactggggacaggattgcaaagtcggggacatagatgcagacagttgttgagatttggggatagccgggcttgtgagcggtgcccatttccagatgaagcctttcagcccttctgagtccccggcccttggtgcgatgtctgtgagtttgacctgcccagcgtgtgggctggctcaatgctgaataaagtgggtttgtgtca

SEQ ID NO: 95761 - DNA, 399 bp, Homo sapiens
  misc_feature (4)..(4): n is a, c, g, or t
  misc_feature (46)..(46): n is a, c, g, or t
atancctaggagttagaatgtgaccagacaatagatggtcttaaanataccaataagattaggcccatcttgctgttatctctagctctttccctcctcccatttcctttagtagttgaattttgcaaagcttgtagcagtagctcagttgcctgcagcatccttgtgtgtagataaattagtcgacagaaactcagcactggggacaggattgcaaagtcggggacatagatgcagacagttgttgagatttggggatagccgggcttgtgagcggtgcccatttccagatgaagcctttcagcccttctgagtccccggcccttggtgcgatgtctgtgagtttgacctgcccagcgtgtgggctggctcaatgctgaataaagtgggtttgtgtca

SEQ ID NO: 95762 - DNA, 963 bp, Homo sapiens
  misc_feature (96)..(96): n is a, c, g, or t
  misc_feature (792)..(793): n is a, c, g, or t
taaatcggcacgaggggtacctgaggtgcaccattgagtgtcggatttggggttagcatccagaaagaagaatgcgcatgacgctctgtgaaggcnaggagaacaaggggtctgtggaaatcatgagaaaggacttgaatgacgcccgggacctgcatggccaggcagagtcagcagctgcagtgtggaagggacacgtgatggaccgtaggaagaaggcactgaccgactacaagaagctgcgggccttctttgtggaggaggaggagcatttcctgcaggaggctgagaaggaggaggggctccctgaggacgagctggctgaccccactgagcggttcaggtcactgctgcaggcggtctcggagctggagaagaagcatcgcaacctgggcctcagcatgctgctgcagtgatggcgccaacccgtggcagtcccagagctggaggcaggaggatggatcctcatctccatgggaagtgtcagcgtgtggctgccagggaagcgtggcaggcgcctggccttgggtccatctacatagttgcgtgtttcaacaatgtccatttatccttcaccccgaggcgtgttttgggggctgcaaacacctcccggtagaggctggacctgaggacccttcccacctgtgcccgtcccttcctgaagtcctagccacagcccatcctccatgagtcccggcagctctgggtcatgcccttccctggtcacccatctgcccctcacctcgtcatccagggacccagaccctgcaccttccatgtgggcccacaggnngtggtaccccattagcatctccaggcctgccatggtgtttcatcttgcggtatctctatttttcctctccctttcttatagttgatttgcgagtgttcgggtcgtgctgggctctggggttgtatggcggaaacccgggcggtttgagtgggaatatccacgtgattggg

SEQ ID NO: 95763 - DNA, 869 bp, Homo sapiens
gcctggctaatttctttatttttatttttttgtagagatggggtcttgctatattgcccagggtgtcctcaaactcctggcctcaagcaattttcccgcctcagcctcccaaaatgctggatgacagctgcaagccaccacaagcaactctgtcataatgcagtctttataaccagctgagcacaatctctactctcaaaatagggctctgaagtctaggaacaagtcctcagctcctgaaatgacagaggaggaagtgagtgaagtgaatgaatgaaggacacagtcaatattgagaataatcacagtgattgcaactgtaaaccctccctgacgcggccttgctctgaatgctactctgttggtctttcaggatggtatcagcactcccagcagacagagtggctcagggctcacaccaggtccctcagcccacacccatcagacttggggttcaaactcagatctgtctgttttcaagacagagcccaaccagcctgcctgaaatcagccagtgaagacttaattgagggattgctaggagacagatggtctcactgggtagatcataatcaggcaatgccagagggaggatccccactggccaccccattcctactgtgtctgaggacacatggacgaagcctcagctcagggcttcgtgttagggtcctggatttggggtgggggggcaggatgtgccttgtcggggctccctgctcaccacgccatggctcagccttgtcgctgctggtgggccgcctctgctccttttctcttcactccctctcttcttccagtgatgctttgttcttttccctttgacgtttccagaagatgcagatgcctccagctattacgagtcccat

SEQ ID NO: 95764 - DNA, 3028 bp, Homo sapiens
tcacgcctgtaatcccagcactttgggaggccgaggcgggtggattacgagtcaggattcgagccacctgccaacatggtgaaaccccgtctgtactaaaataccaaaattagccggcgtcgtggcaggcgcctgcaataccggctactcggggggctgaggcaggagaatcgcttgaacccgggacgcggaggttgcagtgagccgagatcgcgccactgcactcaagcctgcctggcaacagagcgaggctgtctcaaaaaagaaagaaaagcaaagcaaagctaacaaatgctcttctgtcatgcatcatcacagaatcaatgagagctccccccagccaggagacagcggacaaccagggtagcttcccagggggccagagggaggctgcgcgagaagaggctcagcgggatgggtccacgcagggagatcccacgcagggtgggcgtatacgagtgtccacgtccggagggccgttcaagggcgggtccctgaaggaagggtgcacgcagggcacgtccacgcgggcaggcccgtgcacgcagggcgtgcccatgcagggcgggtccgtgcaggatgagagcagcggaggaggcccacgcaggccatttcccgccccgtccccagcccacgcgggcgagctaccgcgggggtacgcgcagctcagatcctagcagcttacaaaaacaaccttttaaaaatggaaccttcaagtaaaaataaaactttgtttccctctttcgcaggagttactgaagtaggaagggacagcccagtaagatttcaggatacgacttgggccggtccgcaggcagtagagtgaagcgcgcagctgccaggacttgcgcggtgacgtgcgccgctgccaggaccttgcaggtggagagcatagttgccaaaatcaaggcggaggagcgcaccgccgctaggatccaggcggagaagcccaccgcggccaggacctaaggatgcagtacactgctgccaggatcttgtctgtggagcgcagcgcggccaggacctccggctgcagcacaccgctgccaggatcttatcggcagagcgctccgcggtccggaccccgccccgtgcgcgtccccgaccccgccccgtgcgcgtccccggcgttggcgtcttcgtcctgttgctggtctccgtccggtcgccggccgtctaggtctccggccctccccagccgctcctgcgcccttgccggccccgccgcccgcagccctggcgctccctgcgggccccgccgaggccgcctgcgccctgtgccagcgcgcgccccgggaaccggtgcgcgccgactgcggccaccgcttctgtcgggcgtgcgtggtgcgcttctgggccgaggaggacgggcccttcccgtgccccgagtgcgccgacgactgctggcagcgcgccgtggagcccggcaggcccccgctcagccgccgccttctggcgctcgaggaggcggccgcggcgcccgcgcgcgacggcccggccagcgaggccgcgctgcagctgctgtgccgcgccgacgccggcccgctctgcgccgcctgccgtatggctgcgggccccgagccgcccgagtgggaaccgcgctggaggaaggcgctgcgcggcaaggagaacaaggggtctgtggaaatcatgagaaaggacttgaatgacgcccgggacctgcatggccaggcagagtcagcagctgcagtgtggaagggacacgtgatggaccgtaggaagaaggcactgaccgactacaagaagctgcgggccttctttgtggaggaggaggagcatttcctgcaggaggctgagaaggaggaggggctccctgaggacgagctggctgaccccactgagcggttcaggtcactgctgcaggcggtctcggagctggagaagaagcatcgcaacctgggcctcagcatgctgctgcagtgatggcgccaacccgtggcagtcccagagctggaggcaggaggatggatcctcatctccatgggaagtgtcagcgtgtggctgccagggaagcgtggcaggcgcctggccttgggtccatctacatagttgcgtgtttcaacaatgtccatttatccttcaccccgaggcgtgttttgggggctgcaaacacctcccggtagaggctggacctgaggacccttcccacctgtgcccgtcccttcctgaagtcctagccacagcccatcctccatgagtcccggcagctctgggtcatgcccttccctggtcacccatctgcccctcacctcgtcatccagggacccagaccctgcaccttccatgtgggcccacagatccttggcaggtacctgaggtgcaccattgagtgtcggatttggggttagcatccagaaagaagaatgcgcatgacgctctgtgaaggctggaactcaggtcttcagggagagaaaggaagactggattgcaccttgatgcctcctgaggaggcggcccccctcttgaggtgggcgtgggcccggcccagccttatccaagtcgctctgtccacctcccccttcctggcccccaccccactcctgtgcctcccaggagccctccctgtgctccacctgcctccgcagaaggaagcctctttctctgtttccctgggtgagggggctggcaggtggctaaccccatttagcatctccaggccctgccatggtgtctcatcttgctgttatctctagctctttccctcctcccatttcctttagtagttgaattttgcaaagcttgtagcagtagctcagttgcctgcagcatccttgtgtgtagataaattagtcgacagaaactcagcactggggacaggattgcaaagtcggggacatagatgcagacagttgttgagatttggggatagccgggcttgtgagcggtgcccatttccagatgaagcctttcagcccttctgagtccccggcccttggtgcgatgtctgtgagtttgacctgcccagcgtgtgggctggctcaatgctgaataaagtgggtttgtgtca

SEQ ID NO: 95765 - DNA, 3005 bp, Homo sapiens
tcacgcctgtaatcccagcactttgggaggccgaggcgggtggattacgagtcaggattcgagccacctgccaacatggtgaaaccccgtctgtactaaaataccaaaattagccggcgtcgtggcaggcgcctgcaataccggctactcggggggctgaggcaggagaatcgcttgaacccgggacgcggaggttgcagtgagccgagatcgcgccactgcactcaagcctgcctggcaacagagcgaggctgtctcaaaaaagaaagaaaagcaaagcaaagctaacaaatgctcttctgtcatgcatcatcacagaatcaatgagagctccccccagccaggagacagcggacaaccagggtagcttcccagggggccagagggaggctgcgcgagaagaggctcagcgggatgggtccacgcagggagatcccacgcagggtgggcgtatacgagtgtccacgtccggagggccgttcaagggcgggtccctgaaggaagggtgcacgcagggcacgtccacgcgggcaggcccgtgcacgcagggcgtgcccatgcagggcgggtccgtgcaggatgagagcagcggaggaggcccacgcaggccatttcccgccccgtccccagcccacgcgggcgagctaccgcgggggtacgcgcagctcagatcctagcagcttacaaaaacaaccttttaaaaatggaaccttcaagtaaaaataaaactttgtttccctctttcgcaggagttactgaagtaggaagggacagcccagtaagatttcaggatacgacttgggccggtccgcaggcagtagagtgaagcgcgcagctgccaggacttgcgcggtgacgtgcgccgctgccaggaccttgcaggtggagagcatagttgccaaaatcaaggcggaggagcgcaccgccgctaggatccaggcggagaagcccaccgcggccaggacctaaggatgcagtacactgctgccaggatcttgtctgtggagcgcagcgcggccaggacctccggctgcagcacaccgctgccaggatcttatcggcagagcgctccgcggtccggaccccgccccgtgcgcgtccccggcgttggcgtcttcgtcctgttgctggtctccgtccggtcgccggccgtctaggtctccggccctccccagccgctcctgcgcccttgccggccccgccgcccgcagccctggcgctccctgcgggccccgccgaggccgcctgcgccctgtgccagcgcgcgccccgggaaccggtgcgcgccgactgcggccaccgcttctgtcgggcgtgcgtggtgcgcttctgggccgaggaggacgggcccttcccgtgccccgagtgcgccgacgactgctggcagcgcgccgtggagcccggcaggcccccgctcagccgccgccttctggcgctcgaggaggcggccgcggcgcccgcgcgcgacggcccggccagcgaggccgcgctgcagctgctgtgccgcgccgacgccggcccgctctgcgccgcctgccgtatggctgcgggccccgagccgcccgagtgggaaccgcgctggaggaaggcgctgcgcggcaaggagaacaaggggtctgtggaaatcatgagaaaggacttgaatgacgcccgggacctgcatggccaggcagagtcagcagctgcagtgtggaagggacacgtgatggaccgtaggaagaaggcactgaccgactacaagaagctgcgggccttctttgtggaggaggaggagcatttcctgcaggaggctgagaaggaggaggggctccctgaggacgagctggctgaccccactgagcggttcaggtcactgctgcaggcggtctcggagctggagaagaagcatcgcaacctgggcctcagcatgctgctgcagtgatggcgccaacccgtggcagtcccagagctggaggcaggaggatggatcctcatctccatgggaagtgtcagcgtgtggctgccagggaagcgtggcaggcgcctggccttgggtccatctacatagttgcgtgtttcaacaatgtccatttatccttcaccccgaggcgtgttttgggggctgcaaacacctcccggtagaggctggacctgaggacccttcccacctgtgcccgtcccttcctgaagtcctagccacagcccatcctccatgagtcccggcagctctgggtcatgcccttccctggtcacccatctgcccctcacctcgtcatccagggacccagaccctgcaccttccatgtgggcccacagatccttggcaggtacctgaggtgcaccattgagtgtcggatttggggttagcatccagaaagaagaatgcgcatgacgctctgtgaaggctggaactcaggtcttcagggagagaaaggaagactggattgcaccttgatgcctcctgaggaggcggcccccctcttgaggtgggcgtgggcccggcccagccttatccaagtcgctctgtccacctcccccttcctggcccccaccccactcctgtgcctcccaggagccctccctgtgctccacctgcctccgcagaaggaagcctctttctctgtttccctgggtgagggggctggcaggtggctaaccccatttagcatctccaggccctgccatggtgtctcatcttgctgttatctctagctctttccctcctcccatttcctttagtagttgaattttgcaaagcttgtagcagtagctcagttgcctgcagcatccttgtgtgtagataaattagtcgacagaaactcagcactggggacaggattgcaaagtcggggacatagatgcagacagttgttgagatttggggatagccgggcttgtgagcggtgcccatttccagatgaagcctttcagcccttctgagtccccggcccttggtgcgatgtctgtgagtttgacctgcccagcgtgtgggctggctcaatgctgaataaagtgggtttgtgtca

SEQ ID NO: 95766 - DNA, 2751 bp, Homo sapiens
tcacgcctgtaatcccagcactttgggaggccgaggcgggtggattacgagtcaggattcgagccacctgccaacatggtgaaaccccgtctgtactaaaataccaaaattagccggcgtcgtggcaggcgcctgcaataccggctactcggggggctgaggcaggagaatcgcttgaacccgggacgcggaggttgcagtgagccgagatcgcgccactgcactcaagcctgcctggcaacagagcgaggctgtctcaaaaaagaaagaaaagcaaagcaaagctaacaaatgctcttctgtcatgcatcatcacagaatcaatgagagctccccccagccaggagacagcggacaaccagggtagcttcccagggggccagagggaggctgcgcgagaagaggctcagcgggatgggtccacgcagggagatcccacgcagggtgggcgtatacgagtgtccacgtccggagggccgttcaagggcgggtccctgaaggaagggtgcacgcagggcacgtccacgcgggcaggcccgtgcacgcagggcgtgcccatgcagggcgggtccgtgcaggatgagagcagcggaggaggcccacgcaggccatttcccgccccgtccccagcccacgcgggcgagctaccgcgggggtacgcgcagctcagatcctagcagcttacaaaaacaaccttttaaaaatggaaccttcaagtaaaaataaaactttgtttccctctttcgcaggagttactgaagtaggaagggacagcccagtaagatttcaggatacgacttgggccggtccgcaggcagtagagtgaagcgcgcagctgccaggacttgcgcggtgacgtgcgccgctgccaggaccttgcaggtggagagcatagttgccaaaatcaaggcggaggagcgcaccgccgctaggatccaggcggagaagcccaccgcggccaggacctaaggatgcagtacactgctgccaggatcttgtctgtggagcgcagcgcggccaggacctccggctgcagcacaccgctgccaggatcttatcggcagagcgctccgcggtccggaccccgccccgtgcgcgtccccgaccccgccccgtgcgcgtccccggcgttggcgtcttcgtcctgttgctggtctccgtccggtcgccggccgtctaggtctccggccctccccgcggcgcccgcgcgcgacggcccggccagcgaggccgcgctgcagctgctgtgccgcgccgacgccggcccgctctgcgccgcctgccgtatggctgcgggccccgagccgcccgagtgggaaccgcgctggaggaaggcgctgcgcggcaaggagaacaaggggtctgtggaaatcatgagaaaggacttgaatgacgcccgggacctgcatggccaggcagagtcagcagctgcagtgtggaagggacacgtgatggaccgtaggaagaaggcactgaccgactacaagaagctgcgggccttctttgtggaggaggaggagcatttcctgcaggaggctgagaaggaggaggggctccctgaggacgagctggctgaccccactgagcggttcaggtcactgctgcaggcggtctcggagctggagaagaagcatcgcaacctgggcctcagcatgctgctgcagtgatggcgccaacccgtggcagtcccagagctggaggcaggaggatggatcctcatctccatgggaagtgtcagcgtgtggctgccagggaagcgtggcaggcgcctggccttgggtccatctacatagttgcgtgtttcaacaatgtccatttatccttcaccccgaggcgtgttttgggggctgcaaacacctcccggtagaggctggacctgaggacccttcccacctgtgcccgtcccttcctgaagtcctagccacagcccatcctccatgagtcccggcagctctgggtcatgcccttccctggtcacccatctgcccctcacctcgtcatccagggacccagaccctgcaccttccatgtgggcccacagatccttggcaggtacctgaggtgcaccattgagtgtcggatttggggttagcatccagaaagaagaatgcgcatgacgctctgtgaaggctggaactcaggtcttcagggagagaaaggaagactggattgcaccttgatgcctcctgaggaggcggcccccctcttgaggtgggcgtgggcccggcccagccttatccaagtcgctctgtccacctcccccttcctggcccccaccccactcctgtgcctcccaggagccctccctgtgctccacctgcctccgcagaaggaagcctctttctctgtttccctgggtgagggggctggcaggtggctaaccccatttagcatctccaggccctgccatggtgtctcatcttgctgttatctctagctctttccctcctcccatttcctttagtagttgaattttgcaaagcttgtagcagtagctcagttgcctgcagcatccttgtgtgtagataaattagtcgacagaaactcagcactggggacaggattgcaaagtcggggacatagatgcagacagttgttgagatttggggatagccgggcttgtgagcggtgcccatttccagatgaagcctttcagcccttctgagtccccggcccttggtgcgatgtctgtgagtttgacctgcccagcgtgtgggctggctcaatgctgaataaagtgggtttgtgtca

SEQ ID NO: 95767 - DNA, 3636 bp, Homo sapiens
tcacgcctgtaatcccagcactttgggaggccgaggcgggtggattacgagtcaggattcgagccacctgccaacatggtgaaaccccgtctgtactaaaataccaaaattagccggcgtcgtggcaggcgcctgcaataccggctactcggggggctgaggcaggagaatcgcttgaacccgggacgcggaggttgcagtgagccgagatcgcgccactgcactcaagcctgcctggcaacagagcgaggctgtctcaaaaaagaaagaaaagcaaagcaaagctaacaaatgctcttctgtcatgcatcatcacagaatcaatgagagctccccccagccaggagacagcggacaaccagggtagcttcccagggggccagagggaggctgcgcgagaagaggctcagcgggatgggtccacgcagggagatcccacgcagggtgggcgtatacgagtgtccacgtccggagggccgttcaagggcgggtccctgaaggaagggtgcacgcagggcacgtccacgcgggcaggcccgtgcacgcagggcgtgcccatgcagggcgggtccgtgcaggatgagagcagcggaggaggcccacgcaggccatttcccgccccgtccccagcccacgcgggcgagctaccgcgggggtacgcgcagctcagatcctagcagcttacaaaaacaaccttttaaaaatggaaccttcaagtaaaaataaaactttgtttccctctttcgcaggagttactgaagtaggaagggacagcccagtaagatttcaggatacgacttgggccggtccgcaggcagtagagtgaagcgcgcagctgccaggacttgcgcggtgacgtgcgccgctgccaggaccttgcaggtggagagcatagttgccaaaatcaaggcggaggagcgcaccgccgctaggatccaggcggagaagcccaccgcggccaggacctaaggatgcagtacactgctgccaggatcttgtctgtggagcgcagcgcggccaggacctccggctgcagcacaccgctgccaggatcttatcggcagagcgctccgcggtccggaccccgccccgtgcgcgtccccgaccccgccccgtgcgcgtccccggcgttggcgtcttcgtcctgttgctggtctccgtccggtcgccggccgtctaggtctccggccctccccagccgctcctgcgcccttgccggccccgccgcccgcagccctggcgctccctgcgggccccgccgaggccgcctgcgccctgtgccagcgcgcgccccgggaaccggtgcgcgccgactgcggccaccgcttctgtcgggcgtgcgtggtgcgcttctgggccgaggaggacgggcccttcccgtgccccgagtgcgccgacgactgctggcagcgcgccgtggagcccggcaggcccccgctcagccgccgccttctggcgctcgaggaggcggccgcggcgcccgcgcgcgacggcccggccagcgaggccgcgctgcagctgctgtgccgcgccgacgccggcccgctctgcgccgcctgccgtatggctgcgggccccgagccgcccgagtgggaaccgcgctggaggaaggcgctgcgcggcaaggagaacaaggggtctgtggaaatcatgagaaaggacttgaatgacgcccgggacctgcatggccaggcagagtcagcagctgcagtgtggaagggacacgtgatggaccgtaggaagaaggcactgaccgactacaagaagctgcgggccttctttgtggaggaggaggagcatttcctgcaggaggctgagaaggaggaggggctccctgaggacgagctggctgaccccactgagcggttcaggtcactgctgcaggcggtctcggagctggagaagaagcatcgcaacctgggcctcagcatgctgctgcaggtgcgggagccccgctgggtctgcccaccatcgggccagggtggacgcaggcagcagcgagccattgggggaccattgcccgaagtcaaggcttaaaagcccagcctgactcccactgccgtggccttgcagggctgaatttcgggaatgggtgggtggtcagggaaggtgatgggaaggggttttaagttgaggagggtctgaggtgtccctgaccttcacaaaggagggcacttggcatcccgagtgcccgagcatggaaggctcctgcctcgccctggggtcctgaaggcagaagcagccaagaaacccaacctcagggcttttcttctgcctctgcccagggcctggcctgaaccccagaccctgcagcaacccagatggccctgaacggttcagttgcccgtgccagccataggtgacaaggctttggccctggggagacggaagtctgggccaggccctgggtttgttgtgctcaggacagtacctcatgcgctgtctcatgtgcgctctctctttcgctctctccttttgcctctgtctctgactctgtgtgtctctttctctttttgtctctctgtctttccctctcccctcccatgcagtgatggcgccaacccgtggcagtcccagagctggaggcaggaggatggatcctcatctccatgggaagtgtcagcgtgtggctgccagggaagcgtggcaggcgcctggccttgggtccatctacatagttgcgtgtttcaacaatgtccatttatccttcaccccgaggcgtgttttgggggctgcaaacacctcccggtagaggctggacctgaggacccttcccacctgtgcccgtcccttcctgaagtcctagccacagcccatcctccatgagtcccggcagctctgggtcatgcccttccctggtcacccatctgcccctcacctcgtcatccagggacccagaccctgcaccttccatgtgggcccacagatccttggcaggtacctgaggtgcaccattgagtgtcggatttggggttagcatccagaaagaagaatgcgcatgacgctctgtgaaggctggaactcaggtcttcagggagagaaaggaagactggattgcaccttgatgcctcctgaggaggcggcccccctcttgaggtgggcgtgggcccggcccagccttatccaagtcgctctgtccacctcccccttcctggcccccaccccactcctgtgcctcccaggagccctccctgtgctccacctgcctccgcagaaggaagcctctttctctgtttccctgggtgagggggctggcaggtggctaaccccatttagcatctccaggccctgccatggtgtctcatcttgctgttatctctagctctttccctcctcccatttcctttagtagttgaattttgcaaagcttgtagcagtagctcagttgcctgcagcatccttgtgtgtagataaattagtcgacagaaactcagcactggggacaggattgcaaagtcggggacatagatgcagacagttgttgagatttggggatagccgggcttgtgagcggtgcccatttccagatgaagcctttcagcccttctgagtccccggcccttggtgcgatgtctgtgagtttgacctgcccagcgtgtgggctggctcaatgctgaataaagtgggtttgtgtca

SEQ ID NO: 95768 - DNA, 1475 bp, Homo sapiens
  misc_feature (54)..(54): n is a, c, g, or t
  misc_feature (71)..(71): n is a, c, g, or t
taggctaggtacgaggctgggttgtggctgcccgagtgggaaccgcgctggagngtaagcgctgcgcggcnaggagaacaaggggtctgtggaaatcatgagaaaggacttgaatgacgcccgggacctgcatggccaggcagagtcagcagctgcagtgtggaagggacacgtgatggaccgtaggaagaaggcactgaccgactacaagaagctgcgggccttctttgtggaggaggaggagcatttcctgcaggaggctgagaaggaggaggggctccctgaggacgagctggctgaccccactgagcggttcaggtcactgctgcaggcggtctcggagctggagaagaagcatcgcaacctgggcctcagcatgctgctgcagtgatggcgccaacccgtggcagtcccagagctggaggcaggaggatggatcctcatctccatgggaagtgtcagcgtgtggctgccagggaagcgtggcaggcgcctggccttgggtccatctacatagttgcgtgtttcaacaatgtccatttatccttcaccccgaggcgtgttttgggggctgcaaacacctcccggtagaggctggacctgaggacccttcccacctgtgcccgtcccttcctgaagtcctagccacagcccatcctccatgagtcccggcagctctgggtcatgcccttccctggtcacccatctgcccctcacctcgtcatccagggacccagaccctgcaccttccatgtgggcccacagatccttggcaggtacctgaggtgcaccattgagtgtcggatttggggttagcatccagaaagaagaatgcgcatgacgctctgtgaaggctggaactcaggtcttcagggagagaaaggaagactggattgcaccttgatgcctcctgaggaggcggcccccctcttgaggtgggcgtgggcccggcccagccttatccaagtcgctctgtccacctcccccttcctggcccccaccccactcctgtgcctcccaggagccctccctgtgctccacctgcctccgcagaaggaagcctctttctctgtttccctgggtgagggggctggcaggtggctaaccccatttagcatctccaggccctgccatggtgtctcatcttgctgttatctctagctctttccctcctcccatttcctttagtagttgaattttgcaaagcttgtagcagtagctcagttgcctgcagcatccttgtgtgtagataaattagtcgacagaaactcagcactggggacaggattgcaaagtcggggacatagatgcagacagttgttgagatttggggatagccgggcttgtgagcggtgcccatttccagatgaagcctttcagcccttctgagtccccggcccttggtgcgatgtctgtgagtttgacctgcccagcgtgtgggctggctcaatgctgaataaagtgggtttgtgtca

SEQ ID NO: 95769 - DNA, 2867 bp, Homo sapiens
tcacgcctgtaatcccagcactttgggaggccgaggcgggtggattacgagtcaggattcgagccacctgccaacatggtgaaaccccgtctgtactaaaataccaaaattagccggcgtcgtggcaggcgcctgcaataccggctactcggggggctgaggcaggagaatcgcttgaacccgggacgcggaggttgcagtgagccgagatcgcgccactgcactcaagcctgcctggcaacagagcgaggctgtctcaaaaaagaaagaaaagcaaagcaaagctaacaaatgctcttctgtcatgcatcatcacagaatcaatgagagctccccccagccaggagacagcggacaaccagggtagcttcccagggggccagagggaggctgcgcgagaagaggctcagcgggatgggtccacgcagggagatcccacgcagggtgggcgtatacgagtgtccacgtccggagggccgttcaagggcgggtccctgaaggaagggtgcacgcagggcacgtccacgcgggcaggcccgtgcacgcagggcgtgcccatgcagggcgggtccgtgcaggatgagagcagcggaggaggcccacgcaggccatttcccgccccgtccccagcccacgcgggcgagctaccgcgggggtacgcgcagctcagatcctagcagcttacaaaaacaaccttttaaaaatggaaccttcaagtaaaaataaaactttgtttccctctttcgcaggagttactgaagtaggaagggacagcccagtaagatttcaggatacgacttgggccggtccgcaggcagtagagtgaagcgcgcagctgccaggacttgcgcggtgacgtgcgccgctgccaggaccttgcaggtggagagcatagttgccaaaatcaaggcggaggagcgcaccgccgctaggatccaggcggagaagcccaccgcggccaggacctaaggatgcagtacactgctgccaggatcttgtctgtggagcgcagcgcggccaggacctccggctgcagcacaccgctgccaggatcttatcggcagagcgctccgcggtccggaccccgccccgtgcgcgtccccgaccccgccccgtgcgcgtccccggcgttggcgtcttcgtcctgttgctggtctccgtccggtcgccggccgtctaggtctccggccctccccagccgctcctgcgcccttgccggccccgccgcccgcagccctggcgctccctgcgggccccgccgaggccgcctgcgccctgtgccagcgcgcgccccgggaaccggtgcgcgccgactgcggccaccgcttctgtcgggcgtgcgtggtgcgcttctgggccgaggaggacgggcccttcccgtgccccgagtgcgccgacgactgctggcagcgcgccgtggagcccggcaggcccccgctcagccgccgccttctggcgctcgaggaggcggccgcggcgcccgcgcgcgacggcccggccagcgaggccgcgctgcagctgctgtgccgcgccgacgccggcccgctctgcgccgcctgccgtatggctgcgggccccgagccgcccgagtgggaaccgcgctggaggaaggcgctgcgcggcaaggagaacaaggggtctgtggaaatcatgagaaaggacttgaatgacgcccgggacctgcatggctgaccccactgagcggttcaggtcactgctgcaggcggtctcggagctggagaagaagcatcgcaacctgggcctcagcatgctgctgcagtgatggcgccaacccgtggcagtcccagagctggaggcaggaggatggatcctcatctccatgggaagtgtcagcgtgtggctgccagggaagcgtggcaggcgcctggccttgggtccatctacatagttgcgtgtttcaacaatgtccatttatccttcaccccgaggcgtgttttgggggctgcaaacacctcccggtagaggctggacctgaggacccttcccacctgtgcccgtcccttcctgaagtcctagccacagcccatcctccatgagtcccggcagctctgggtcatgcccttccctggtcacccatctgcccctcacctcgtcatccagggacccagaccctgcaccttccatgtgggcccacagatccttggcaggtacctgaggtgcaccattgagtgtcggatttggggttagcatccagaaagaagaatgcgcatgacgctctgtgaaggctggaactcaggtcttcagggagagaaaggaagactggattgcaccttgatgcctcctgaggaggcggcccccctcttgaggtgggcgtgggcccggcccagccttatccaagtcgctctgtccacctcccccttcctggcccccaccccactcctgtgcctcccaggagccctccctgtgctccacctgcctccgcagaaggaagcctctttctctgtttccctgggtgagggggctggcaggtggctaaccccatttagcatctccaggccctgccatggtgtctcatcttgctgttatctctagctctttccctcctcccatttcctttagtagttgaattttgcaaagcttgtagcagtagctcagttgcctgcagcatccttgtgtgtagataaattagtcgacagaaactcagcactggggacaggattgcaaagtcggggacatagatgcagacagttgttgagatttggggatagccgggcttgtgagcggtgcccatttccagatgaagcctttcagcccttctgagtccccggcccttggtgcgatgtctgtgagtttgacctgcccagcgtgtgggctggctcaatgctgaataaagtgggtttgtgtca

SEQ ID NO: 95770 - DNA, 1418 bp, Homo sapiens
aaaatactgaaacaacatacacacaacaaacagaagaacacacactactaaaatacatcataagaaattaggctaggacgaggcccggggtttaatcggcaccgaggagggacacgtgatggaccgtaggaagaaggcactgaccgactacaagaagctgcgggccttctttgtggaggaggaggagcatttcctgcaggaggctgagaaggaggaggggctccctgaggacgagctggctgaccccactgagcggttcaggtcactgctgcaggcggtctcggagctggagaagaagcatcgcaacctgggcctcagcatgctgctgcagtgatggcgccaacccgtggcagtcccagagctggaggcaggaggatggatcctcatctccatgggaagtgtcagcgtgtggctgccagggaagcgtggcaggcgcctggccttgggtccatctacatagttgcgtgtttcaacaatgtccatttatccttcaccccgaggcgtgttttgggggctgcaaacacctcccggtagaggctggacctgaggacccttcccacctgtgcccgtcccttcctgaagtcctagccacagcccatcctccatgagtcccggcagctctgggtcatgcccttccctggtcacccatctgcccctcacctcgtcatccagggacccagaccctgcaccttccatgtgggcccacagatccttggcaggtacctgaggtgcaccattgagtgtcggatttggggttagcatccagaaagaagaatgcgcatgacgctctgtgaaggctggaactcaggtcttcagggagagaaaggaagactggattgcaccttgatgcctcctgaggaggcggcccccctcttgaggtgggcgtgggcccggcccagccttatccaagtcgctctgtccacctcccccttcctggcccccaccccactcctgtgcctcccaggagccctccctgtgctccacctgcctccgcagaaggaagcctctttctctgtttccctgggtgagggggctggcaggtggctaaccccatttagcatctccaggccctgccatggtgtctcatcttgctgttatctctagctctttccctcctcccatttcctttagtagttgaattttgcaaagcttgtagcagtagctcagttgcctgcagcatccttgtgtgtagataaattagtcgacagaaactcagcactggggacaggattgcaaagtcggggacatagatgcagacagttgttgagatttggggatagccgggcttgtgagcggtgcccatttccagatgaagcctttcagcccttctgagtccccggcccttggtgcgatgtctgtgagtttgacctgcccagcgtgtgggctggctcaatgctgaataaagtgggtttgtgtca

SEQ ID NO: 95771 - DNA, 2878 bp, Homo sapiens
tcacgcctgtaatcccagcactttgggaggccgaggcgggtggattacgagtcaggattcgagccacctgccaacatggtgaaaccccgtctgtactaaaataccaaaattagccggcgtcgtggcaggcgcctgcaataccggctactcggggggctgaggcaggagaatcgcttgaacccgggacgcggaggttgcagtgagccgagatcgcgccactgcactcaagcctgcctggcaacagagcgaggctgtctcaaaaaagaaagaaaagcaaagcaaagctaacaaatgctcttctgtcatgcatcatcacagaatcaatgagagctccccccagccaggagacagcggacaaccagggtagcttcccagggggccagagggaggctgcgcgagaagaggctcagcgggatgggtccacgcagggagatcccacgcagggtgggcgtatacgagtgtccacgtccggagggccgttcaagggcgggtccctgaaggaagggtgcacgcagggcacgtccacgcgggcaggcccgtgcacgcagggcgtgcccatgcagggcgggtccgtgcaggatgagagcagcggaggaggcccacgcaggccatttcccgccccgtccccagcccacgcgggcgagctaccgcgggggtacgcgcagctcagatcctagcagcttacaaaaacaaccttttaaaaatggaaccttcaagtaaaaataaaactttgtttccctctttcgcaggagttactgaagtaggaagggacagcccagtaagatttcaggatacgacttgggccggtccgcaggcagtagagtgaagcgcgcagctgccaggacttgcgcggtgacgtgcgccgctgccaggaccttgcaggtggagagcatagttgccaaaatcaaggcggaggagcgcaccgccgctaggatccaggcggagaagcccaccgcggccaggacctaaggatgcagtacactgctgccaggatcttgtctgtggagcgcagcgcggccaggacctccggctgcagcacaccgctgccaggatcttatcggcagagcgctccgcggtccggaccccgccccgtgcgcgtccccgaccccgccccgtgcgcgtccccggcgttggcgtcttcgtcctgttgctggtctccgtccggtcgccggccgtctaggtctccggccctccccagccgctcctgcgcccttgccggccccgccgcccgcagccctggcgctccctgcgggccccgccgaggccgcctgcgccctgtgccagcgcgcgccccgggaaccggtgcgcgccgactgcggccaccgcttctgtcgggcgtgcgtggtgcgcttctgggccgaggaggacgggcccttcccgtgccccgagtgcgccgacgactgctggcagcgcgccgtggagcccggcaggcccccgctcagccgccgccttctggcgctcgaggaggcggccgcggcgcccgcgcgcgacggcccggccagcgaggccgcgctgcagctgctgtgccgcgccgacgccggcccgctctgcgccgcctgccgtatggctgcgggccccgagccgcccgagtgggaaccgcgctggaggaaggcgctgcgcggcaaggagaacaaggggtctgtggaaatcatgagaaaggacttgaatgacgcccgggacctgcatggccaggcagagtcagcagctgcagtgtggaagggacacgtgatggaccgtaggaagaaggcactgaccgactacaagaagctgcgggccttctttgtggaggaggaggagcatttcctgcaggaggctgagaaggaggaggggctccctgaggacgagctggctgaccccactgagcggttcaggtcactgctgcaggcggtctcggagctggagaagaagcatcgcaacctgggcctcagcatgctgctgcagtgatggcgccaacccgtggcagtcccagagctggaggcaggaggatggatcctcatctccatgggaagtgtcagcgtgtggctgccagggaagcgtggcaggcgcctggccttgggtccatctacatagttgcgtgtttcaacaatgtccatttatccttcaccccgaggcgtgttttgggggctgcaaacacctcccggtagaggctggacctgaggacccttcccacctgtgcccgtcccttcctgaagtcctagccacagcccatcctccatgagtcccggcagctctgggtcatgcccttccctggtcacccatctgcccctcacctcgtcatccagggacccagaccctgcaccttccatgtgggcccacagatccttggcaggtacctgaggtgcaccattgagtgtcggatttggggttagcatccagaaagaagaatgcgcatgacgctctgtgaaggctggaactcaggtcttcagggagagaaaggaagactggattgcaccttgatgcctcctgaggaggcggcccccctcttgaggtgggcgtgggcccggcccagccttatccaagtcgctctgtccacctcccccttcctggcccccaccccactcctgtgcctcccaggagccctccctgtgctccacctgcctccgcagaaggaagcctctttctctgtttccctgggtgagggggctggcaggtggctaaccccatttagcatctccaggccctgccatggtgtctcatcttgctgttatctctagctctttccctcctcccatttcctttagtagttgaattttgcaaagcttgtagcagtagctcagttgcctgcagcatccttgtgtgtagataaattagtcgacagaaactcagcactggggaccagaactgggatcctctagaacgcgcagacagactgcgtatt

SEQ ID NO: 95772 - DNA, 2584 bp, Homo sapiens
tcacgcctgtaatcccagcactttgggaggccgaggcgggtggattacgagtcaggattcgagccacctgccaacatggtgaaaccccgtctgtactaaaataccaaaattagccggcgtcgtggcaggcgcctgcaataccggctactcggggggctgaggcaggagaatcgcttgaacccgggacgcggaggttgcagtgagccgagatcgcgccactgcactcaagcctgcctggcaacagagcgaggctgtctcaaaaaagaaagaaaagcaaagcaaagctaacaaatgctcttctgtcatgcatcatcacagaatcaatgagagctccccccagccaggagacagcggacaaccagggtagcttcccagggggccagagggaggctgcgcgagaagaggctcagcgggatgggtccacgcagggagatcccacgcagggtgggcgtatacgagtgtccacgtccggagggccgttcaagggcgggtccctgaaggaagggtgcacgcagggcacgtccacgcgggcaggcccgtgcacgcagggcgtgcccatgcagggcgggtccgtgcaggatgagagcagcggaggaggcccacgcaggccatttcccgccccgtccccagcccacgcgggcgagctaccgcgggggtacgcgcagctcagatcctagcagcttacaaaaacaaccttttaaaaatggaaccttcaagtaaaaataaaactttgtttccctctttcgcaggagttactgaagtaggaagggacagcccagtaagatttcaggatacgacttgggccggtccgcaggcagtagagtgaagcgcgcagctgccaggacttgcgcggtgacgtgcgccgctgccaggaccttgcaggtggagagcatagttgccaaaatcaaggcggaggagcgcaccgccgctaggatccaggcggagaagcccaccgcggccaggacctaaggatgcagtacactgctgccaggatcttgtctgtggagcgcagcgcggccaggacctccggctgcagcacaccgctgccaggatcttatcggcagagcgctccgcggtccggaccccgccccgtgcgcgtccccgaccccgccccgtgcgcgtccccggcgttggcgtcttcgtcctgttgctggtctccgtccggtcgccggccgtctaggtctccggccctccccagccgctcctgcgcccttgccggccccgccgcccgcagccctggcgctccctgcgggccccgccgaggccgcctgcgccctgtgccagcgcgcgccccgggaaccggtgcgcgccgactgcggccaccgcttctgtcgggcgtgcgtggtgcgcttctgggccgaggaggacgggcccttcccgtgccccgagtgcgccgacgactgctggcagcgcgccgtggagcccggcaggcccccgctcagccgccgccttctggcgctcgaggaggcggccgcggcgcccgcgcgcgacggcccggccagcgaggccgcgctgcagctgctgtgccgcgccgacgccggcccgctctgcgccgcctgccgtatggctgcgggccccgagccgcccgagtgggaaccgcgctggaggaaggcgctgcgcggcaaggagaacaaggggtctgtggaaatcatgagaaaggacttgaatgacgcccgggacctgcatggccaggcagagtcagcagctgcagtgtggaagggacacgtgatggaccgtaggaagaaggcactgaccgactacaagaagctgcgggccttctttgtggaggaggaggagcatttcctgcaggaggctgagaaggaggaggggctccctgaggacgagctggctgaccccactgagcggttcaggtcactgctgcaggcggtctcggagctggagaagaagcatcgcaacctgggcctcagcatgctgctgcagtgatggcgccaacccgtggcagtcccagagctggaggcaggaggatggatcctcatctccatgggaagtgtcagcgtgtggctgccagggaagcgtggcaggcgcctggccttgggtccatctacatagttgcgtgtttcaacaatgtccatttatccttcaccccgaggcgtgttttgggggctgcaaacaccctccctgtgctccacctgcctccgcagaaggaagcctctttctctgtttccctgggtgagggggctggcaggtggctaaccccatttagcatctccaggccctgccatggtgtctcatcttgctgttatctctagctctttccctcctcccatttcctttagtagttgaattttgcaaagcttgtagcagtagctcagttgcctgcagcatccttgtgtgtagataaattagtcgacagaaactcagcactggggacaggattgcaaagtcggggacatagatgcagacagttgttgagatttggggatagccgggcttgtgagcggtgcccatttccagatgaagcctttcagcccttctgagtccccggcccttggtgcgatgtctgtgagtttgacctgcccagcgtgtgggctggctcaatgctgaataaagtgggtttgtgtca

SEQ ID NO: 95773 - DNA, 2818 bp, Homo sapiens
tcacgcctgtaatcccagcactttgggaggccgaggcgggtggattacgagtcaggattcgagccacctgccaacatggtgaaaccccgtctgtactaaaataccaaaattagccggcgtcgtggcaggcgcctgcaataccggctactcggggggctgaggcaggagaatcgcttgaacccgggacgcggaggttgcagtgagccgagatcgcgccactgcactcaagcctgcctggcaacagagcgaggctgtctcaaaaaagaaagaaaagcaaagcaaagctaacaaatgctcttctgtcatgcatcatcacagaatcaatgagagctccccccagccaggagacagcggacaaccagggtagcttcccagggggccagagggaggctgcgcgagaagaggctcagcgggatgggtccacgcagggagatcccacgcagggtgggcgtatacgagtgtccacgtccggagggccgttcaagggcgggtccctgaaggaagggtgcacgcagggcacgtccacgcgggcaggcccgtgcacgcagggcgtgcccatgcagggcgggtccgtgcaggatgagagcagcggaggaggcccacgcaggccatttcccgccccgtccccagcccacgcgggcgagctaccgcgggggtacgcgcagctcagatcctagcagcttacaaaaacaaccttttaaaaatggaaccttcaagtaaaaataaaactttgtttccctctttcgcaggagttactgaagtaggaagggacagcccagtaagatttcaggatacgacttgggccggtccgcaggcagtagagtgaagcgcgcagctgccaggacttgcgcggtgacgtgcgccgctgccaggaccttgcaggtggagagcatagttgccaaaatcaaggcggaggagcgcaccgccgctaggatccaggcggagaagcccaccgcggccaggacctaaggatgcagtacactgctgccaggatcttgtctgtggagcgcagcgcggccaggacctccggctgcagcacaccgctgccaggatcttatcggcagagcgctccgcggtccggaccccgccccgtgcgcgtccccgaccccgccccgtgcgcgtccccggcgttggcgtcttcgtcctgttgctggtctccgtccggtcgccggccgtctaggtctccggccctccccagccgctcctgcgcccttgccggccccgccgcccgcagccctggcgctccctgcgggccccgccgaggccgcctgcgccctgtgccagcgcgcgccccgggaaccggtgcgcgccgactgcggccaccgcttctgtcgggcgtgcgtggtgcgcttctgggccgaggaggacgggcccttcccgtgccccgagtgcgccgacgactgctggcagcgcgccgtggagcccggcaggcccccgctcagccgccgccttctggcgctcgaggaggcggccgcggcgcccgcgcgcgacggcccggccagcgaggccgcgctgcagctgctgtgccgcgccgacgccggcccgctctgcgccgcctgccgtatggctgcgggccccgagccgcccgagtgggaaccgcgctggaggaaggcgctgcgcggcaaggagaacaaggggtctgtggaaatcatgagaaaggacttgaatgacgcccgggacctgcatggccaggcagagtcagcagctgcagtgtggaagggacacgtgatggaccgtaggaagaaggcactgaccgactacaagaagctgcgggccttctttgtggaggaggaggagcatttcctgcaggaggctgagaaggaggaggggctccctgaggacgagctggctgaccccactgagcggttcaggtcactgctgcaggcggtctcggagctggagaagaagcatcgcaacctgggcctcagcatgctgctgcagtgatggcgccaacccgtggcagtcccagagctggaggcaggaggatggatcctcatctccatgggaagtgtcagcgtgtggctgccagggaagcgtggcaggcgcctggccttgggtccatctacatagttgcgtgtttcaacaatgtccatttatccttcaccccgaggcgtgttttgggggctgcaaacacctcccggtagaggctggacctgaggacccttcccacctgtgcccgtcccttcctgaagtcctagccacagcccatcctccatgagtcccggcagctctgggtcatgcccttccctggtcacccatctgcccctcacctcgtcatccagggacccagaccctgcaccttccatgtgggcccacagatccttggcaggtacctgaggtgcaccattgagtgtcggatttggggttagcatccagaaagaagaatgcgcatgacgctctgtgaaggctggaactcaggtcttcagggagagaaaggaagactggattgcaccttgatgcctcctgaggaggcggcccccctcttgaggtgggcgtgggcccggcccagccttatccaagtcgctctgtccacctcccccttcctggcccccaccccagcatccaatccacacccagcagacccttcggcatgccgccctctaccaggaagccagaggcctaggagctcgccatccatatttatttgaaaaggtcaaaaggagcatctatgagacaagggaggggtgcaggctgaagcagcgcctcaacagccagggacatgtaggcaacacgagcaggcacagcgcggccaccactgtccacacgctcacacaagccaggcccgcagggccttcggagagctagcaggttacattca

SEQ ID NO: 95774 - DNA, 2565 bp, Homo sapiens
tcacgcctgtaatcccagcactttgggaggccgaggcgggtggattacgagtcaggattcgagccacctgccaacatggtgaaaccccgtctgtactaaaataccaaaattagccggcgtcgtggcaggcgcctgcaataccggctactcggggggctgaggcaggagaatcgcttgaacccgggacgcggaggttgcagtgagccgagatcgcgccactgcactcaagcctgcctggcaacagagcgaggctgtctcaaaaaagaaagaaaagcaaagcaaagctaacaaatgctcttctgtcatgcatcatcacagaatcaatgagagctccccccagccaggagacagcggacaaccagggtagcttcccagggggccagagggaggctgcgcgagaagaggctcagcgggatgggtccacgcagggagatcccacgcagggtgggcgtatacgagtgtccacgtccggagggccgttcaagggcgggtccctgaaggaagggtgcacgcagggcacgtccacgcgggcaggcccgtgcacgcagggcgtgcccatgcagggcgggtccgtgcaggatgagagcagcggaggaggcccacgcaggccatttcccgccccgtccccagcccacgcgggcgagctaccgcgggggtacgcgcagctcagatcctagcagcttacaaaaacaaccttttaaaaatggaaccttcaagtaaaaataaaactttgtttccctctttcgcaggagttactgaagtaggaagggacagcccagtaagatttcaggatacgacttgggccggtccgcaggcagtagagtgaagcgcgcagctgccaggacttgcgcggtgacgtgcgccgctgccaggaccttgcaggtggagagcatagttgccaaaatcaaggcggaggagcgcaccgccgctaggatccaggcggagaagcccaccgcggccaggacctaaggatgcagtacactgctgccaggatcttgtctgtggagcgcagcgcggccaggacctccggctgcagcacaccgctgccaggatcttatcggcagagcgctccgcggtccggaccccgccccgtgcgcgtccccgaccccgccccgtgcgcgtccccggcgttggcgtcttcgtcctgttgctggtctccgtccggtcgccggccgtctaggtctccggccctccccagccgctcctgcgcccttgccggccccgccgcccgcagccctggcgctccctgcgggccccgccgaggccgcctgcgccctgtgccagcgcgcgccccgggaaccggtgcgcgccgactgcggccaccgcttctgtcgggcgtgcgtggtgcgcttctgggccgaggaggacgggcccttcccgtgccccgagtgcgccgacgactgctggcagcgcgccgtggagcccggcaggcccccgctcagccgccgccttctggcgctcgaggaggcggccgcggcgcccgcgcgcgacggcccggccagcgaggccgcgctgcagctgctgtgccgcgccgacgccggcccgctctgcgccgcctgccgtatggctgcgggccccgagccgcccgagtgggaaccgcgctggaggaaggcgctgcgcggcaaggagaacaaggggtctgtggaaatcatgagaaaggacttgaatgacgcccgggacctgcatggccaggcagagtcagcagctgcagtgtggaagggacacgtgatggaccgtaggaagaaggcactgaccgactacaagaagctgcgggccttctttgtggaggaggaggagcatttcctgcaggaggctgagaaggaggaggggctccctgaggacgagctggctgaccccactgagcggttcaggtcactgctgcaggcggtctcggagctggagaagaagcatcgcaacctgggcctcagcatgctgctgcagtgatggcgccaacccgtggcagtcccagagctggaggcaggaggatggatcctcatctccatgggaagtgtcagcgtgtggctgccagggaagcgtggcaggcgcctggccttgggtccatctacatagttgcgtgtttcaacaatgtccatttatccttcaccccgaggcgtgttttgggggctgcaaacacctcccggtagaggctggacctgaggacccttcccacctgtgcccgtcccttcctgaagtcctagccacagcccatcctccatgagtcccggcagctctgggtcatgcccttccctggtcacccatctgcccctcacctcgtcatccagggacccagaccctgcaccttccatgtgggcccacagatccttggcaggtacctgaggtgcaccattgagtgtcggatttggggttagcatccagaaagaagaatgcgcatgacgctctgtgaaggctggaactcaggtcttcagggagagaaaggaagactggattgcaccttgatgcctcctgaggaggcggcccccctcttgaggtgggcgtgtgtaccccgccaccgtttcaatctcgcgtcgttttacaatccgcaaccgtatcactcccgctcgtaca

SEQ ID NO: 95775 - DNA, 562 bp, Homo sapiens
  misc_feature (2)..(2): n is a, c, g, or t
  misc_feature (11)..(11): n is a, c, g, or t
  misc_feature (17)..(17): n is a, c, g, or t
  misc_feature (19)..(19): n is a, c, g, or t
gngagagaganagagananagagagagagagggcccggcccagccttatccaagtcgctctgtccacctcccccttcctggcccccaccccactcctgtgcctcccaggagccctccctgtgctccacctgcctccgcagaaggaagcctctttctctgtttccctgggtgagggggctggcaggtggctaaccccatttagcatctccaggccctgccatggtgtctcatcttgctgttatctctagctctttccctcctcccatttcctttagtagttgaattttgcaaagcttgtagcagtagctcagttgcctgcagcatccttgtgtgtagataaattagtcgacagaaactcagcactggggacaggattgcaaagtcggggacatagatgcagacagttgttgagatttggggatagccgggcttgtgagcggtgcccatttccagatgaagcctttcagcccttctgagtccccggcccttggtgcgatgtctgtgagtttgacctgcccagcgtgtgggctggctcaatgctgaataaagtgggtttgtgtca

SEQ ID NO: 95776 - DNA, 373 bp, Homo sapiens
atccccacctgtgtgctcctgtgtgctctcccccctgtgcatcttgctgttatctctagctctttccctcctcccatttcctttagtagttgaattttgcaaagcttgtagcagtagctcagttgcctgcagcatccttgtgtgtagataaattagtcgacagaaactcagcactggggacaggattgcaaagtcggggacatagatgcagacagttgttgagatttggggatagccgggcttgtgagcggtgcccatttccagatgaagcctttcagcccttctgagtccccggcccttggtgcgatgtctgtgagtttgacctgcccagcgtgtgggctggctcaatgctgaataaagtgggtttgtgtca

SEQ ID NO: 95777 - DNA, 1445 bp, Homo sapiens
tcacgcctgtaatcccagcactttgggaggccgaggcgggtggattacgagtcaggattcgagccacctgccaacatggtgaaaccccgtctgtactaaaataccaaaattagccggcgtcgtggcaggcgcctgcaataccggctactcggggggctgaggcaggagaatcgcttgaacccgggacgcggaggttgcagtgagccgagatcgcgccactgcactcaagcctgcctggcaacagagcgaggctgtctcaaaaaagaaagaaaagcaaagcaaagctaacaaatgctcttctgtcatgcatcatcacagaatcaatgagagctccccccagccaggagacagcggacaaccagggtagcttcccagggggccagagggaggctgcgcgagaagaggctcagcgggatgggtccacgcagggagatcccacgcagggtgggcgtatacgagtgtccacgtccggagggccgttcaagggcgggtccctgaaggaagggtgcacgcagggcacgtccacgcgggcaggcccgtgcacgcagggcgtgcccatgcagggcgggtccgtgcaggatgagagcagcggaggaggcccacgcaggccatttcccgccccgtccccagcccacgcgggcgagctaccgcgggggtacgcgcagctcagatcctagcagcttacaaaaacaaccttttaaaaatggaaccttcaagtaaaaataaaactttgtttccctctttcgcaggagttactgaagtaggaagggacagcccagtaagatttcaggatacgacttgggccggtccgcaggcagtagagtgaagcgcgcagctgccaggacttgcgcggtgacgtgcgccgctgccaggaccttgcaggtggagagcatagttgccaaaatcaaggcggaggagcgcaccgccgctaggatccaggcggagaagcccaccgcggccaggacctaaggatgcagtacactgctgccaggatcttgtctgtggagcgcagcgcggccaggacctccggctgcagcacaccgctgccaggatcttatcggcagagcgctccgcggtccggaccccgccccgtgcgcgtccccgaccccgccccgtgcgcgtccccggcgttggcgtcttcgtcctgttgctggtctccgtccggtcgccggccgtctaggtctccggccctccccagccgctcctgcgcccttgccggccccgccgcccgcagccctggcgctccctgcgggccccgccgaggccgcctgcgccctgtgccagcgcgcgccccgggaaccggtgcgcgccgactcccctcccccgctatgtgaggatgtgccctgtgcgcttcagccctgaggagatggtgcctgtcctgtgcccatatagcatgaactgtggctgagtgtgcaatgtgtatgccggttatgaggccaagtgac

SEQ ID NO: 95778 - DNA, 4318 bp, Homo sapiens
tcacgcctgtaatcccagcactttgggaggccgaggcgggtggattacgagtcaggattcgagccacctgccaacatggtgaaaccccgtctgtactaaaataccaaaattagccggcgtcgtggcaggcgcctgcaataccggctactcggggggctgaggcaggagaatcgcttgaacccgggacgcggaggttgcagtgagccgagatcgcgccactgcactcaagcctgcctggcaacagagcgaggctgtctcaaaaaagaaagaaaagcaaagcaaagctaacaaatgctcttctgtcatgcatcatcacagaatcaatgagagctccccccagccaggagacagcggacaaccagggtagcttcccagggggccagagggaggctgcgcgagaagaggctcagcgggatgggtccacgcagggagatcccacgcagggtgggcgtatacgagtgtccacgtccggagggccgttcaagggcgggtccctgaaggaagggtgcacgcagggcacgtccacgcgggcaggcccgtgcacgcagggcgtgcccatgcagggcgggtccgtgcaggatgagagcagcggaggaggcccacgcaggccatttcccgccccgtccccagcccacgcgggcgagctaccgcgggggtacgcgcagctcagatcctagcagcttacaaaaacaaccttttaaaaatggaaccttcaagtaaaaataaaactttgtttccctctttcgcaggagttactgaagtaggaagggacagcccagtaagatttcaggatacgacttgggccggtccgcaggcagtagagtgaagcgcgcagctgccaggacttgcgcggtgacgtgcgccgctgccaggaccttgcaggtggagagcatagttgccaaaatcaaggcggaggagcgcaccgccgctaggatccaggcggagaagcccaccgcggccaggacctaaggatgcagtacactgctgccaggatcttgtctgtggagcgcagcgcggccaggacctccggctgcagcacaccgctgccaggatcttatcggcagagcgctccgcggtccggaccccgccccgtgcgcgtccccgaccccgccccgtgcgcgtccccggcgttggcgtcttcgtcctgttgctggtctccgtccggtcgccggccgtctaggtctccggccctccccagccgctcctgcgcccttgccggccccgccgcccgcagccctggcgctccctgcgggccccgccgaggccgcctgcgccctgtgccagcgcgcgccccgggaaccggtgcgcgccgactgcggccaccgcttctgtcgggcgtgcgtggtgcgcttctgggccgaggaggacgggcccttcccgtgccccgagtgcgccgacgactgctggcagcgcgccgtggagcccggcaggcccccgctcagccgccgccttctggcgctcgaggaggcggccgcggcgcccgcgcgcgacggcccggccagcgaggccgcgctgcagctgctgtgccgcgccgacgccggcccgctctgcgccgcctgccgtatggctgcgggccccgagccgcccgagtgggaaccgcgctggaggaaggcgctgcgcggcaaggagaacaaggggtctgtggaaatcatgagaaaggacttgaatgacgcccgggacctgcatggccaggcagagtcagcagctgcagtgtggaagggacacgtgatggaccgtaggaagaaggcactgaccgactacaagaagctgcgggccttctttgtggaggaggaggagcatttcctgcaggaggctgagaaggaggaggggctccctgaggacgagctggctgaccccactgagcggttcaggtcactgctgcaggcggtctcggagctggagaagaagcatcgcaacctgggcctcagcatgctgctgcagtgatggcgccaacccgtggcagtcccagagctggaggcaggaggatggatcctcatctccatgggaagtgtcagcgtgtggctgccagggaagcgtggcaggcgcctggccttgggtccatctacatagttgcgtgtttcaacaatgtccatttatccttcaccccgaggcgtgttttgggggctgcaaacacctcccggtagaggctggacctgaggacccttcccacctgtgcccgtcccttcctgaagtcctagccacagcccatcctccatgagtcccggcagctctgggtcatgcccttccctggtcacccatctgcccctcacctcgtcatccagggacccagaccctgcaccttccatgtgggcccacagatccttggcaggtacctgaggtgcaccattgagtgtcggatttggggttagcatccagaaagaagaatgcgcatgacgctctgtgaaggctggaactcaggtcttcagggagagaaaggaagactggattgcaccttgatgcctcctgaggaggcggcccccctcttgaggtgggcgtgggcccggcccagccttatccaagtcgctctgtccacctcccccttcctggcccccaccccactcctgtgcctcccaggagccctccctgtgctccacctgcctccgcagaaggaagcctctttctctgtttccctgggtgagggggctggcaggtggctaaccccatttagcatctccaggccctgccatggtgtctcatcttgctgttatctctagctctttccctcctcccatttcctttagtagttgaattttgcaaagcttgtagcagtagctcagttgcctgcagcatccttgtgtgtagataaattagtcgacagaaactcagcactggggacaggattgcaaagtcggggacatagatgcagacagttgttgagatttggggatagccgggcttgtgagcggtgcccatttccagatgaagcctttcagcccttctgagtccccggcccttggtgcgatgtctgtgagtttgacctgcccagcgtgtgggctggctcaatgctgaataaagtgggtttgtgtcagctcgtttgcttcgtctccgtgtgtccacctggcctcttccccctgccctggccaccctccagtgtcaaaggaaacttcctcgtgacacgtgctaaagcatggtgaggaggactttgattgggaccattgagatgggtgtgggaccctttccttggggcctggggggagatggggctccaccccgacgtagcagggcaggggttggaggagcgaggagcagtatagggtccatgggtgggaatgactgtgaggagacatcagggctgagggggctctggctaaacccacctcacagagtccttgctgcaggcaggcagggcgatcagacattggctgcaaacggtcagagaggaacccagtcaggtaccattgagggtggtcagatattatggttaaccaaattagggttcttgctaaaactggatttcataagaaagggcaaagagggccctaggagaagattccagagcctggccagagtttggccaagtagagaatctttgtcagcacgccaacaacatcccgaccctgagacctccagtttgtctttctcactgtctccgcctgctgcagtctgctgtcatccctgagcatccctgcccctgccctgcacacctgtgatgcttgcccggacaggtcctgatggcagagtctcccacaacatcagtgtctccacatcaccaggtccgacagtggcttcaccatcctcacctaacctagctgaccagcaacatcccaccctgtcaatcacaacctctttctatttaagaaaattatatatttatggggcacagtgtgatgttttgatatctatgtacattgtggagtgacagattaatgtatccatctcatgttttttttggtggtgagaatatttgaaatctacactcagcaatttcaaatacagtcatccctctgtgcctaagggggattggttccaggaccccctcatggataccaaaatctgcagatactcaagtaccctgcagtcagccctccctctgcacatatgtgggacagtcagatacagagggccaactgcgtacagtacacggttatcagctgaagtcaccatgctgtgcaatagaccttgagtttattcttgtatagcagggactctgtaccctctgactagaatttccccaaatcctcttgtctcagcccctgctaaccaccgttctactctctaattctataaatcaacattttgattccacatataagtgagatcatgtgatatttgtcctgttcctggcttatttcacttaatataaatgtcctgtaaattc

SEQ ID NO: 95779 - DNA, 1352 bp, Homo sapiens
  misc_feature (37)..(37): n is a, c, g, or t
  misc_feature (43)..(43): n is a, c, g, or t
ccacacccccacaccaatacgcgctagtacgaggccngggtgnggacacgtgatggaccgtaggaagaaggcactgaccgactacaagaagctgcgggccttctttgtggaggaggaggagcatttcctgcaggaggctgagaaggaggaggggctccctgaggacgagctggctgaccccactgagcggttcaggtcactgctgcaggcggtctcggagctggagaagaagcatcgcaacctgggcctcagcatgctgctgcagtgatggcgccaacccgtggcagtcccagagctggaggcaggaggatggatcctcatctccatgggaagtgtcagcgtgtggctgccagggaagcgtggcaggcgcctggccttgggtccatctacatagttgcgtgtttcaacaatgtccatttatccttcaccccgaggcgtgttttgggggctgcaaacacctcccggtagaggctggacctgaggacccttcccacctgtgcccgtcccttcctgaagtcctagccacagcccatcctccatgagtcccggcagctctgggtcatgcccttccctggtcacccatctgcccctcacctcgtcatccagggacccagaccctgcaccttccatgtgggcccacagatccttggcaggtacctgaggtgcaccattgagtgtcggatttggggttagcatccagaaagaagaatgcgcatgacgctctgtgaaggctggaactcaggtcttcagggagagaaaggaagactggattgcaccttgatgcctcctgaggaggcggcccccctcttgaggtgggcgtgggcccggcccagccttatccaagtcgctctgtccacctcccccttcctggcccccaccccactcctgtgcctcccaggagccctccctgtgctccacctgcctccgcagaaggaagcctctttctctgtttccctgggtgagggggctggcaggtggctaaccccatttagcatctccaggccctgccatggtgtctcatcttgctgttatctctagctctttccctcctcccatttcctttagtagttgaattttgcaaagcttgtagcagtagctcagttgcctgcagcatccttgtgtgtagataaattagtcgacagaaactcagcactggggacaggattgcaaagtcggggacatagatgcagacagttgttgagatttggggatagccgggcttgtgagcggtgcccatttccagatgaagcctttcagcccttctgagtccccggcccttggtgcgatgtctgtgagtttgacctgcccagcgtgtgggctggctcaatgctgaataaagtgggtttgtgtca

SEQ ID NO: 95780 - DNA, 1533 bp, Homo sapiens
caggctggtcttgaactcctgacctcatgatccgcccgccttggcctcctggagtgctgggattacaagcgtgagccactgtgcctggcctaatagtcgatgtgcctgagcagcatgttttggagtggcatgttcttaactccttcaagagcaaacaggttccccttcccctggggagggtgggtgaggacacaggtcttttcctgccacccgtttgcagggacggacacgtgatggaccgtaggaagaaggcactgaccgactacaagaagctgcgggccttctttgtggaggaggaggagcatttcctgcaggaggctgagaaggaggaggggctccctgaggacgagctggctgaccccactgagcggttcaggtcactgctgcaggcggtctcggagctggagaagaagcatcgcaacctgggcctcagcatgctgctgcagtgatggcgccaacccgtggcagtcccagagctggaggcaggaggatggatcctcatctccatgggaagtgtcagcgtgtggctgccagggaagcgtggcaggcgcctggccttgggtccatctacatagttgcgtgtttcaacaatgtccatttatccttcaccccgaggcgtgttttgggggctgcaaacacctcccggtagaggctggacctgaggacccttcccacctgtgcccgtcccttcctgaagtcctagccacagcccatcctccatgagtcccggcagctctgggtcatgcccttccctggtcacccatctgcccctcacctcgtcatccagggacccagaccctgcaccttccatgtgggcccacagatccttggcaggtacctgaggtgcaccattgagtgtcggatttggggttagcatccagaaagaagaatgcgcatgacgctctgtgaaggctggaactcaggtcttcagggagagaaaggaagactggattgcaccttgatgcctcctgaggaggcggcccccctcttgaggtgggcgtgggcccggcccagccttatccaagtcgctctgtccacctcccccttcctggcccccaccccactcctgtgcctcccaggagccctccctgtgctccacctgcctccgcagaaggaagcctctttctctgtttccctgggtgagggggctggcaggtggctaaccccatttagcatctccaggccctgccatggtgtctcatcttgctgttatctctagctctttccctcctcccatttcctttagtagttgaattttgcaaagcttgtagcagtagctcagttgcctgcagcatccttgtgtgtagataaattagtcgacagaaactcagcactggggacaggattgcaaagtcggggacatagatgcagacagttgttgagatttggggatagccgggcttgtgagcggtgcccatttccagatgaagcctttcagcccttctgagtccccggcccttggtgcgatgtctgtgagtttgacctgcccagcgtgtgggctggctcaatgctgaataaagtgggtttgtgtca

SEQ ID NO: 95781 - DNA, 2778 bp, Homo sapiens
tcacgcctgtaatcccagcactttgggaggccgaggcgggtggattacgagtcaggattcgagccacctgccaacatggtgaaaccccgtctgtactaaaataccaaaattagccggcgtcgtggcaggcgcctgcaataccggctactcggggggctgaggcaggagaatcgcttgaacccgggacgcggaggttgcagtgagccgagatcgcgccactgcactcaagcctgcctggcaacagagcgaggctgtctcaaaaaagaaagaaaagcaaagcaaagctaacaaatgctcttctgtcatgcatcatcacagaatcaatgagagctccccccagccaggagacagcggacaaccagggtagcttcccagggggccagagggaggctgcgcgagaagaggctcagcgggatgggtccacgcagggagatcccacgcagggtgggcgtatacgagtgtccacgtccggagggccgttcaagggcgggtccctgaaggaagggtgcacgcagggcacgtccacgcgggcaggcccgtgcacgcagggcgtgcccatgcagggcgggtccgtgcaggatgagagcagcggaggaggcccacgcaggccatttcccgccccgtccccagcccacgcgggcgagctaccgcgggggtacgcgcagctcagatcctagcagcttacaaaaacaaccttttaaaaatggaaccttcaagtaaaaataaaactttgtttccctctttcgcaggagttactgaagtaggaagggacagcccagtaagatttcaggatacgacttgggccggtccgcaggcagtagagtgaagcgcgcagctgccaggacttgcgcggtgacgtgcgccgctgccaggaccttgcaggtggagagcatagttgccaaaatcaaggcggaggagcgcaccgccgctaggatccaggcggagaagcccaccgcggccaggacctaaggatgcagtacactgctgccaggatcttgtctgtggagcgcagcgcggccaggacctccggctgcagcacaccgctgccaggatcttatcggcagagcgctccgcggtccggaccccgccccgtgcgcgtccccgaccccgccccgtgcgcgtccccggcgttggcgtcttcgtcctgttgctggtctccgtccggtcgccggccgtctaggtctccggccctccccagccgctcctgcgcccttgccggccccgccgcccgcagccctggcgctccctgcgggccccgccgaggccgcctgcgccctgtgccagcgcgcgccccgggaaccggtgcgcgccgactgcggccaccgcttctgtcgggcgtgcgtggtgcgcttctgggccgaggaggacgggcccttcccgtgccccgagtgcgccgacgactgctggcagcgcgccgtggagcccggcaggcccccgctcagccgccgccttctggcgctcgaggaggcggccgcggcgcccgcgcgcgacggcccggccagcgaggccgcgctgcagctgctgtgccgcgccgacgccggcccgctctgcgccgcctgccgtatggctgcgggccccgagccgcccgagtgggaaccgcgctggaggaaggcgctgcgcggcaaggagaacaaggggtctgtggaaatcatgagaaaggacttgaatgacgcccgggacctgcatggccaggcagagtcagcagctgcagtgtggaagggacacgtgatggaccgtaggaagaaggcactgaccgactacaagaagctgcgggccttctttgtggaggaggaggagcatttcctgcaggaggctgagaaggaggaggggctccctgaggacgagctggctgaccccactgagcggttcaggtcactgctgcaggcggtctcggagctggagaagaagcatcgcaacctgggcctcagcatgctgctgcagtgatggcgccaacccgtggcagtcccagagctggaggcaggaggatggatcctcatctccatgggaagtgtcagcgtgtggctgccagggaagcgtggcaggcgcctggccttgggtccatctacatagttgcgtgtttcaacaatgtccatttatccttcaccccgaggcgtgttttgggggctgcaaacacctcccggtagaggctggacctgaggacccttcccacctgtgcccgtcccttcctgaagtcctagccacagcccatcctcctgaggaggcggcccccctcttgaggtgggcgtgggcccggcccagccttatccaagtcgctctgtccacctcccccttcctggcccccaccccactcctgtgcctcccaggagccctccctgtgctccacctgcctccgcagaaggaagcctctttctctgtttccctgggtgagggggctggcaggtggctaaccccatttagcatctccaggccctgccatggtgtctcatcttgctgttatctctagctctttccctcctcccatttcctttagtagttgaattttgcaaagcttgtagcagtagctcagttgcctgcagcatccttgtgtgtagataaattagtcgacagaaactcagcactggggacaggattgcaaagtcggggacatagatgcagacagttgttgagatttggggatagccgggcttgtgagcggtgcccatttccagatgaagcctttcagcccttctgagtccccggcccttggtgcgatgtctgtgagtttgacctgcccagcgtgtgggctggctcaatgctgaataaagtgggtttgtgtca

SEQ ID NO: 95782 - DNA, 3112 bp, Homo sapiens
tcacgcctgtaatcccagcactttgggaggccgaggcgggtggattacgagtcaggattcgagccacctgccaacatggtgaaaccccgtctgtactaaaataccaaaattagccggcgtcgtggcaggcgcctgcaataccggctactcggggggctgaggcaggagaatcgcttgaacccgggacgcggaggttgcagtgagccgagatcgcgccactgcactcaagcctgcctggcaacagagcgaggctgtctcaaaaaagaaagaaaagcaaagcaaagctaacaaatgctcttctgtcatgcatcatcacagaatcaatgagagctccccccagccaggagacagcggacaaccagggtagcttcccagggggccagagggaggctgcgcgagaagaggctcagcgggatgggtccacgcagggagatcccacgcagggtgggcgtatacgagtgtccacgtccggagggccgttcaagggcgggtccctgaaggaagggtgcacgcagggcacgtccacgcgggcaggcccgtgcacgcagggcgtgcccatgcagggcgggtccgtgcaggatgagagcagcggaggaggcccacgcaggccatttcccgccccgtccccagcccacgcgggcgagctaccgcgggggtacgcgcagctcagatcctagcagcttacaaaaacaaccttttaaaaatggaaccttcaagtaaaaataaaactttgtttccctctttcgcaggagttactgaagtaggaagggacagcccagtaagatttcaggatacgacttgggccggtccgcaggcagtagagtgaagcgcgcagctgccaggacttgcgcggtgacgtgcgccgctgccaggaccttgcaggtggagagcatagttgccaaaatcaaggcggaggagcgcaccgccgctaggatccaggcggagaagcccaccgcggccaggacctaaggatgcagtacactgctgccaggatcttgtctgtggagcgcagcgcggccaggacctccggctgcagcacaccgctgccaggatcttatcggcagagcgctccgcggtccggaccccgccccgtgcgcgtccccgaccccgccccgtgcgcgtccccggcgttggcgtcttcgtcctgttgctggtctccgtccggtcgccggccgtctaggtctccggccctccccagccgctcctgcgcccttgccggccccgccgcccgcagccctggcgctccctgcgggccccgccgaggccgcctgcgccctgtgccagcgcgcgccccgggaaccggtgcgcgccgactgcggccaccgcttctgtcgggcgtgcgtggtgcgcttctgggccgaggaggacgggcccttcccgtgccccgagtgcgccgacgactgctggcagcgcgccgtggagcccggcaggcccccgctcagccgccgccttctggcgctcgaggaggcggccgcggcgcccgcgcgcgacggcccggccagcgaggccgcgctgcagctgctgtgccgcgccgacgccggcccgctctgcgccgcctgccgtatggctgcgggccccgagccgcccgagtgggaaccgcgctggaggaaggcgctgcgcggcaaggagaacaaggggtctgtggaaatcatgagaaaggacttgaatgacgcccgggacctgcatggccaggcagagtcagcagctgcagtgtggaagggacacgtgatggaccgtaggaagaaggcactgaccgactacaagaagctgcgggccttctttgtggaggaggaggagcatttcctgcaggaggctgagaaggaggaggggctccctgaggacgagctggctgaccccactgagcggttcaggtcactgctgcaggcggtctcggagctggagaagaagcatcgcaacctgggcctcagcatgctgctgcagtgatggcgccaacccgtggcagtcccagagctggaggcaggaggatggatcctcatctccatgggaagtgtcagcgtgtggctgccagggaagcgtggcaggcgcctggccttgggtccatctacatagttgcgtgtttcaacaatgtccatttatccttcaccccgaggcgtgttttgggggctgcaaacacctcccggtagaggctggacctgaggacccttcccacctgtgcccgtcccttcctgaagtcctagccacagcccatcctccatgagtcccggcagctctgggtcatgcccttccctggtcacccatctgcccctcacctcgtcatccagggacccagaccctgcaccttccatgtgggcccacagatccttggcaggtacctgaggtgcaccattgagtgtcggatttggggttagcatccagaaagaagaatgcgcatgacgctctgtgaaggctggaactcaggtcttcagggagagaaaggaagactggattgcaccttgatgcctcctgaggaggcggcccccctcttgaggtgggcgtgggcccggcccagccttatccaagtcgctctgtccacctcccccttcctggcccccaccccactcctgtgcctcccaggagccctccctgtgctccacctgcctccgcagaaggaagcctctttctctgtttccctgggtgagggggctggcaggtggctaaccccatttagcatctccaggccctgccatggtgtctcatcttgctgttatctctagctctttccctcctcccatttcctttagtagttgaattttgcaaagcttgtagcagtagctcagttgcctgcagcatccttgtgtgtagaaatacaccaaaatgccagtatgcaaaggacacttggggcagcctctcaacattttctgcctgactgatatgcagctgatttgtgggatctgtgctactcgtggggagcacaccaaacatgtcttctgttctattgaagatgcctatgctcaggaaagggatgcctttgagtccctcttccagagctttgagacctggcgtcggggagatgctctttctcgcttggataccttggaaactagtaagaggaaatccctacagttactgataaagacttcagatagtgtagcggatgaccaggttactctag

SEQ ID NO: 95783 - DNA, 1127 bp, Homo sapiens
gttcgcatcctgagctctaaaggaggccctgctggtgccgtgatggcgccaacccgtggcagtcccagagctggaggcaggaggatggatcctcatctccatgggaagtgtcagcgtgtggctgccagggaagcgtggcaggcgcctggccttgggtccatctacatagttgcgtgtttcaacaatgtccatttatccttcaccccgaggcgtgttttgggggctgcaaacacctcccggtagaggctggacctgaggacccttcccacctgtgcccgtcccttcctgaagtcctagccacagcccatcctccatgagtcccggcagctctgggtcatgcccttccctggtcacccatctgcccctcacctcgtcatccagggacccagaccctgcaccttccatgtgggcccacagatccttggcaggtacctgaggtgcaccattgagtgtcggatttggggttagcatccagaaagaagaatgcgcatgacgctctgtgaaggctggaactcaggtcttcagggagagaaaggaagactggattgcaccttgatgcctcctgaggaggcggcccccctcttgaggtgggcgtgggcccggcccagccttatccaagtcgctctgtccacctcccccttcctggcccccaccccactcctgtgcctcccaggagccctccctgtgctccacctgcctccgcagaaggaagcctctttctctgtttccctgggtgagggggctggcaggtggctaaccccatttagcatctccaggccctgccatggtgtctcatcttgctgttatctctagctctttccctcctcccatttcctttagtagttgaattttgcaaagcttgtagcagtagctcagttgcctgcagcatccttgtgtgtagataaattagtcgacagaaactcagcactggggacaggattgcaaagtcggggacatagatgcagacagttgttgagatttggggatagccgggcttgtgagcggtgcccatttccagatgaagcctttcagcccttctgagtccccggcccttggtgcgatgtctgtgagtttgacctgcccagcgtgtgggctggctcaatgctgaataaagtgggtttgtgtca

SEQ ID NO: 95784 - DNA, 701 bp, Homo sapiens
gggatacttagtgatgccagtagtttttccaagcttgaatttatactgtgactatcaggcaatatttagatgggggtaatggaaacttttttaaagtataggaattttctccttatgctgacataagtaacatctgatgctgtagaagcttagtatcaaatattaattggactgaaatagttcagaatattttcccaaaatgatttcctcccactcagtttttacttttgcagagcttctacttaccatttgtagtaacctgaatgacaataaaatggtgaaaaaaagatttgaaatggtgaaaccgccttcttccagatatcattcaggtgactaaaatgcaaaaccaagtacaatagacaaataatagcaacactagaaaacaagaaatactaccgtcaatagagcagcaatttctaggtatttttggaagacaggagggacatagggattgacaggtgtttgttggtgtcagtgtgagcaaaccacgtaagctgagtgaagcagaaatggagaggtctcaccaattctgagtagtgagggctagtaacaaagattaaccctaaggtgggtggacatgggtgtgtggtggctggttcctgtagtcgcagctactcaggaggctgagatgggaggatcacttgacctaggagttcaagtcaagcctgggcaacatggcaggaccctatctttaaaaaaaa

SEQ ID NO: 95785 - DNA, 429 bp, Homo sapiens
aggggttgcagtcagccgagatcgcaccactgcacttcagccacctgggtgacagagcgagactctgtttcaaaaataaataaataaataaaatagaattctgaattttatttttaataattattttgtaaaaagaatgtcttgttttttggagttgttgaatttattgaattgacaaaaattatgtacaagagggtacaacatgatgtgattgaagtatgtatacgttacaaaatggctaaatcaagctaaataacatcacctcccagacttatttttttatggtgagaacacttaaaaaatctgctctcttagtgatttccaagtgtatgttatgttattaactataggtaccatgttgtcccatggatatcctgaacttattcttcctctctaaaaatgacattctgtgtcctttggcatctgccc

SEQ ID NO: 95786 - DNA, 782 bp, Homo sapiens
attttgggtaatgagatgggttattattttttactcttaaacttttcggtgttacttaaattctttataatgacagactccaagcaggtcactttttttggcagaagttttacataacacattctcatttcagaaattcattccaggccaggcgcgtgagccaccgcgcccggccaacagttatctctttatacatacacacaatattgtcatcttattcttcttggttcataccctccaccctcctgaacacctcacaatatagcttagagatctatctatgttggtaaaaacagttcttcttcctattttttattttttaattattattatttttaatttttttgagacagggtcttacttactctgttgcccaggctggagtgcagtggtgggatcatggctcactgcagcttccacctcccagacttaagcgatcctcccaccccagcttctcaagtagcaagaccctgtctcttaaaataattattaacaaaggattggaggccgggcgcggtggctcaggcctgtaatcccagcacttgggaggtcaaggtgagtggatcacctgaggtcaggagttcgcgaccagcttggccaacatggagaaaccccatctttactaaaaatacaaaattagccgggcatggtggcgcatgcctgtaatcccagctactcaggaggctgaggcaggagaatcgcttgaacccgggtggcggaggttgcagtgagccgagattgtgccactacactgcagcctggggcacagagagagactgcat

SEQ ID NO: 95787 - DNA, 432 bp, Homo sapiens
ggatgtatattttcactcctttcgaattccaagccactgatttgctgatgacaactatagctatattcatgagaaaaacagctgtaagtgaacaattttggaaacaaattggattttcttatcagcttatcacttcaacctgtttttattttatttctaattactttatgactggaaagggccctttgaggtcaggtctccatttcctgagtttctaactgaaatattctctaaacaaatacttaaatgactgaagaagttgatggcccatgaaaaattcattctttaagagaataaaagatgatttgttttttctttttttttgacacaggagaatcacttgaatctgggaggcagaggttgtgttgagccaagatcgtgccactgcactgcagcctggttaatagagcaagcttctatctcaaaaaaaaa

SEQ ID NO: 95788 - DNA, 508 bp, Homo sapiens
agtctgatataataatctggtacttagctttaaaagaaatttctcgagaatcttcacaagatgataggatggacaatgtcttcagcagcatcccgacaacacaggcagtaacagacgcgtttgtaagggagtggctcagtggtatcgcttgatgaaactggacaccatagctccagaactcaattgcagaagaggggcaaagggggaaaaggcagcacgatttattatcttgtacatgccagggcaggcctttaattttgtcttcatgttctacacacaggatggatttacctaaaatacaagtggcactgtataaacaaaattcactttggaaggctcagagtcatctctacaaaccaaaagaataaaaagtgaaactgaggcagaggcctgtggttgccagtgggaaaagccattccacgggtaggaagacctcatagacatcgaagacaaatgaaaatctgataaacaattccaggggaaaacgttataaaggtagacactcaac

SEQ ID NO: 95789 - DNA, 710 bp, Homo sapiens
gttttaccacgttggccaggctggtatcgaactcctgacctcaagtgatctccccaacttggcctcccaaagtgctgggattataagcatgagccaccacgccaggcctaattttgtatttttagtagagacggggtttcaccacgttggccaggctagtcttgaactcctgacctcaagtgatccacccccacctcggcctcccaaagtgctgggattacaggcgtgagccaccatgcccagctgttctgttggttcttttttgtttgagacagagtctcactctgtcaccaggctggagtgcagtggcacaatcttggctcactgcaacctccgactccctggttcaagtgattctcctgcctcagcctccgaagtagctcggattacgggcatgcgccaccacacccagctaatttttatatttttagtagagaacggggtttcaccatattggccaggatggtcttgatctcctgaccttgtgatccgcctgcctcggcctcccaaagtgctgggattacaggcgtgagccaccacgcctggcctctgttggttcttaaacaaagggcttattagccctggtaacactgggacaccccattgctataaaaggaaaaagaattagccaggtgtgggggcgcatatctgtgatcccagctacttcttgggagactgaggtgggaggatcccttcagcccaggaggtca

SEQ ID NO: 95790 - DNA, 751 bp, Homo sapiens
agcggaactgtgatacaaatgtatgccatcccctcagtggaggtggtggaaaaaaaatgaggcgttgacctaagtaattttggaaataacttgaaatcataagactaaggaaaatattaattgtatataagtactgcactctaattggtaatattgtttctaataggcacaggggttaacaattccaaaactgctgcccatcaatcctggcactgaacaaataagtagatggatgaagaatggtgagaaccaggtttctcactgttggagtgggagattatagataggctaggggagaaagatacaatgaaacacactattatcagagtatatatctacatctatgtatctgtgaatctatttatctgtctgtctgtgtatacactggctaaggtacttacatatgttacctatgtctgttcactgagggtgtggaagcaattataccactgtaaggggtaagtaaaagcacattcagcacctgaaccgtggtttataataccattctttaaaacaaggaatccactttgggaggccgaggtgggcagatcacgaggtcaagagatggagaacatcctggccaacatggtgaaaccctgtctctactgaaaatacaaaaattagctgggcgtggtggcacgtacctgtagtcccagctactcaggaggctgaggcaggagaatcgcttgaacccaggaggtggaggttgcagtgagccaagatctcgccactgcactccagcctagcgaca

SEQ ID NO: 95791 - DNA, 135 bp, Homo sapiens
tgcaggtgtggttcttctgactctgcctcattcttccccctgtcccctttgtctccactgtcagcatgtgtgcccatttctgtggcttcctccgccaccacggcctttacccgtcactatcttttcttctttgtt

SEQ ID NO: 95792 - DNA, 284 bp, Homo sapiens
aacactgtaagtggatgcagccgtgcattctctacagaaagatgggagtggggagagagaactaggccaaaaggccatggcagctccaaggctgccctggtcactgaccagcacttgttcttgaccctgatacgacacagtgggcagtggcaggcagccggccctccctgttggaacctgtcttccatctctccctccccagccactccagccccctttgtctcttttcctgcttcctccacctagttggctttctgcatcctgtcatccctgtcaccatctcc

SEQ ID NO: 95793 - DNA, 376 bp, Homo sapiens
ggtttagagctgcctcattcttaccagtgactgtgtaccgtggatggactgtcacttatttcagtagtcccctgctggttgacttttaggttgtttccaatctttagttattgtaaataatgctgatatgaggtggctttcaaaccttttcaaaaatctggttctgctgtaagaaaaactcattttacaccaccacccagccctcacaatataacaaaagtttcatgaagtcttacctacccttactgtatgtaacgcactctgatagtttgtatttcattctgttctatttcattttttaaaaattctggttgtaatccactaaatttatttcatagactgactagtggcccatggcctggtttgaaaatgcgtt

SEQ ID NO: 95794 - DNA, 467 bp, Homo sapiens
aatattctccccattgacttgatgtgctatccataagtatagtcatgaaccacataaccacattttggtcaacaacagatcgtatataacagtggtcccataaaattataatatcacatttttactgtaccttttctatgtttacatgcacaaatactcatggctgtgttacagctgcctactgtatccagcacagtgccatgctgtacacgtatgtagcctaggagctgcaggctacaccatatagcctaggtgtgtcggaggctggaccatctaggcttgtgtaagtgccctctgtgatgttctcataacaatgaaatcatctaacaacgcatttcttcgactgtgtccctgttgttaagtgaaacatgactattgctttttgtttaaagtcagtaaagaggcacagtttacactttacttacccatatatatgtatgggtgtatatatgtatgtattttttgcg

SEQ ID NO: 95795 - DNA, 378 bp, Homo sapiens
agcagttgaaacatacatgccaaggctgctggcacttagtgctgctgaaaagcctgggtgactttctctcactaatgctgtggagccctgggagtcagtgttgtggattgcctagccctctttccatgcacgcctgggagactgcgttatctttttgcagtggtgaaatgtggggctcatgccttcaagctgtatcttgcctcgtgacttgtccttcacaagggagttctgggttagtttaaaatgttctgttcttgtcttaccttccctttctcctgctaccacctcctctctctctccccttccttccccctcgattttcctgtgtcagactgcctcctccttatgctccccccagcccacctgtgcgctctcccc

SEQ ID NO: 95796 - DNA, 681 bp, Homo sapiens
tacaattttgttatccataaatttattaagtgttcatcttaattttcaataaaaatgctaaactcaggctcaggaatgacaccagcagaagcaccactgtttatgttatctctgcctcactcatcacaaggagactgatgttgtgccttccaaaggtcatttgattatgttattgttatgttaaaaacgaaaacacaaaaaagcaaaagaaaatatgtttattcattgccttatggttaataccttgatcccactccttatacctacctctgcctgtcaaaacttcacccattcttcatgattcctctcaagtgtaaaccttttcataaaatccatcctgacttccccttcccataggggcactctctctcttctgaatgccaaagcatgtgtctgttgcatagacttcagcaaatagtttatccctatgtatcccggattaaaccgcaagcttccccagagaaagacatcccactctcttctcttctaggcacttagaactgaactcaacaactattaggaattaatacactgtgataggatatcagccaatatgcaaaccatcactgacacagagagtagggcaacctgcttattttagtggtcacatggattcaatatctctgtctaaacggtaatagtaatagctatctttatcaggagactgtcctgcctggtcct

SEQ ID NO: 95797 - DNA, 2234 bp, Homo sapiens
cccgtgcggcccgggcatgcccagtgcgggcgcagcggccccggccctggaagcgccccggcggactggcccgcggtgggcatggggcagggccggagccgcggcggcggagctgtggatccttcatgatgtgatgatttggggacacttctctctcctgtgtgtagttgatagtttgggtggtgaagagatggctgacagtgtcaaaacctttctccaggaccttgccagaggaatcaaagactccatctggggtatttgtaccatctcaaagctagatgctcgaatccagcaaaagagagaggagcagcgtcgaagaagggcaagtagtgtcttggcacagagaagagcccagagtatagagcggaagcaagagagtgagccacgtattgttagtagaattttccagtgttgtgcttggaatggtggagtgttctggttcagtctcctcttgttttatcgagtatttattcctgtgcttcagtcggtaacagcccgaattatcggtgacccatcactacatggagatgtttggtcgtggctggaattcttcctcacgtcaattttcagtgctctttgggtgctccccttgtttgtgcttagcaaagtggtgaatgccatttggtttcaggatatagctgacctggcatttgaggtatcagggaggaagcctcacccattccctagtgtcagcaaaataattgctgacatgctcttcaaccttttgctgcaggctcttttcctcattcagggaatgtttgtgagtctctttcccatccatcttgtcggtcagctggttagtctcctgcatatgtcccttctctactcactgtactgctttgaatatcgttggttcaataaaggaattgaaatgcaccagcggttgtctaacatagaaaggaattggccttactactttgggtttggtttgcccttggcttttctcacagcaatgcagtcctcatatattatcagtggctgccttttctctatcctctttcctttattcattatcagcgccaatgaagcaaagacccctggcaaagcatatctcttccagttgcgcctcttctccttggtggtcttcttaagcaacagactcttccacaagacagtctacctgcagtcggccctgagcagctctacttctgcagagaagttcccttcaccgcatccgtcgcctgccaaactgaaggctactgcaggtcactgagttgcctgccatccaaaggggatgggcgggattggaagaagctgtggcagctcttttccctgttcacctcccgcctgccagggaaggcaggacccgctctgccaagggccctctgcgtattcccttctctctgaggaattgaaatttttgtctctggtgcacgtaaggcagaatgttccctgacaccagtgtgtggatttttaacatcaccgtgagtctgaaaggaccacaggtttttctgcagctattttctagcatttgccagtccctgtgcctggactgattggaacactttgtttttctccctgtgccatttacccttccacctttccatcctgccttctaccacccttggatgaatggattttgtaattctagctgttgtattttgtgaatttgttaattttgttgtttttctgtgaaacacatacattggatatgggaggtaaaggagtgtcccagttgctcctggtcactccctttatagccattactgtcttgtttcttgtaactcaggttaggttttggtctctcttgctccactgcaaaaaaaaaaaaaaaaaaaaaaaaaagcctgaagagatgagataggaggaaagacctcacagcccagatctgctgggttttgaggagtgattttctttcttccccttgaaggggaaaaagctattttcattggtacatttaaagtcccccaactatggggaggtaccaattctggacaagtgccactacaacaacactaaacctgaactttttcaactccgttggtggtgggaggccagcgggcagaaatttactgttggccactgccaggtctatttccatatttcaaaggaatattgggtgctgcatataggaactgaaggggtcaatgtattaaacctgtgattaggttgttttcctgtcatttttgagagactaaaattgtgggggggcagatgttcaaaatacctggtacaagtttttaaaaaatggtcacaattaaacatgagctggtttcccaaataaaaaaaaaaaa

SEQ ID NO: 95798 - DNA, 341 bp, Homo sapiens
ccagtagacctaacaataccaagtgttggccagagcatagagcggaagcaagagagtgagccacgtattgttagtagaattttccagtgttgtgcttggaatggtggagtgttctggttcagtctcctcttgttttatcgagtatttattcctgtgcttcagtcggtaacagcccgaattatcggtgacccatcactacatggagatgttaggtctacctggccccatactagttattatcgaaaccatcagcctactcattcaaccaatagccctggccgtacgcctaaccgctaacattactgcaggccacctactcatgcacctaattggaagcgcca

SEQ ID NO: 95799 - DNA, 2122 bp, Homo sapiens
cccgtgcggcccgggcatgcccagtgcgggcgcagcggccccggccctggaagcgccccggcggactggcccgcggtgggcatggggcagggccggagccgcggcggcggagctgtggatccttcatgatgtgatgatttggggacacttctctctcctgtgtgtagttgatagtttgggtggtgaagagatggctgacagtgtcaaaacctttctccaggaccttgccagaggaatcaaagactccatctggggtatttgtaccatctcaaagctagatgctcgaatccagcaaaagagagaggagcagcgtcgaagaagggcaagtagtgtcttggcacagagaagagcccagagtatagagcggaagcaagagagtgagccacgtattgttagtagaattttccagtgttgtgcttggaatggtggagtgttctggttcagtctcctcttgttttatcgagtatttattcctgtgcttcagtcggtaacagcccgaattatcggtgacccatcactacatggagatgtttggtcgtggctggaattcttcctcacgtcaattttcagtgctctttgggtgctccccttgtttgtgcttagcaaagtggtgaatgccatttggtttcaggatatagctgacctggcatttgaggtatcagggaggaagcctcacccattccctagtgtcagcaaaataattgctgacatgctcttcaaccttttgctgcaggctcttttcctcattcagggaatgtttgtgagtctctttcccatccatcttgtcggtcagctggttagtctcctgcatatgtcccttctctactcactgtactgctttgaatatcgttggttcaataaagtggctgccttttctctatcctctttcctttattcattatcagcgccaatgaagcaaagacccctggcaaagcatatctcttccagttgcgcctcttctccttggtggtcttcttaagcaacagactcttccacaagacagtctacctgcagtcggccctgagcagctctacttctgcagagaagttcccttcaccgcatccgtcgcctgccaaactgaaggctactgcaggtcactgagttgcctgccatccaaaggggatgggcgggattggaagaagctgtggcagctcttttccctgttcacctcccgcctgccagggaaggcaggacccgctctgccaagggccctctgcgtattcccttctctctgaggaattgaaatttttgtctctggtgcacgtaaggcagaatgttccctgacaccagtgtgtggatttttaacatcaccgtgagtctgaaaggaccacaggtttttctgcagctattttctagcatttgccagtccctgtgcctggactgattggaacactttgtttttctccctgtgccatttacccttccacctttccatcctgccttctaccacccttggatgaatggattttgtaattctagctgttgtattttgtgaatttgttaattttgttgtttttctgtgaaacacatacattggatatgggaggtaaaggagtgtcccagttgctcctggtcactccctttatagccattactgtcttgtttcttgtaactcaggttaggttttggtctctcttgctccactgcaaaaaaaaaaaaaaaaaaaaaaaaaagcctgaagagatgagataggaggaaagacctcacagcccagatctgctgggttttgaggagtgattttctttcttccccttgaaggggaaaaagctattttcattggtacatttaaagtcccccaactatggggaggtaccaattctggacaagtgccactacaacaacactaaacctgaactttttcaactccgttggtggtgggaggccagcgggcagaaatttactgttggccactgccaggtctatttccatatttcaaaggaatattgggtgctgcatataggaactgaaggggtcaatgtattaaacctgtgattaggttgttttcctgtcatttttgagagactaaaattgtgggggggcagatgttcaaaatacctggtacaagtttttaaaaaatggtcacaattaaacatgagctggtttcccaaataaaaaaaaaaaa

SEQ ID NO: 95800 - DNA, 1017 bp, Homo sapiens
  misc_feature (1009)..(1009): n is a, c, g, or t
cccgtgcggcccgggcatgcccagtgcgggcgcagcggccccggccctggaagcgccccggcggactggcccgcggtgggcatggggcagggccggagccgcggcggcggagctgtggatccttcatgatgtgatgatttggggacacttctctctcctgtgtgtagttgatagtttgggtggtgaagagatggctgacagtgtcaaaacctttctccaggaccttgccagaggaatcaaagactccatctggggtatttgtaccatctcaaagctagatgctcgaatccagcaaaagagagaggagcagcgtcgaagaagggcaagtagtgtcttggcacagagaagagcccagagtatagagcggaagcaagagagtgagccacgtattgttagtagaattttccagtgttgtgcttggaatggtggagtgttctggttcagtctcctcttgttttatcgagtatttattcctgtgcttcagtcggtaacagcccgaattatcggtgacccatcactacatggagatgtttggtcgtggctggaattcttcctcacgtcaattttcagtgctctttgggtgctccccttgtttgtgcttagcaaagtggtgaatgccatttggtttcaggatatagctgacctggcatttgaggtatcagggaggaagcctcacccattccctagtgtcagcaaaataattgctgacatgctcttcaaccttttgctgcaggctcttttcctcattcagggaatgtttgtgagtctctttcccatccatcttgtcggtcagctggttagtctcctgcatatgtcccttctctactcactgtactgctttgaatatcgttggttcaataaagagaaagcaagtatttgatgataaaaatgtcgtgtagtgcatgctctgtgtggaattcagaggaaaacccagattcagtgattaacaatgccaaaaaatgcaagtaactagccattgttcaaatgacagtggtgctatttctctttngtggcatc

SEQ ID NO: 95801 - DNA, 1400 bp, Homo sapiens
ttccgagagggcggggcggcgtcccaaaacggaaggtggttgtcgtccgttcccaagctggtttgaaactaggggtcgggctcggccgtcgtcgttgtttgtcgccgcatccccgcttccgggttaggccgttcctgcccgccccctcctctcctcccttcggacccatagatctcaggctcggctccccgcccgccgcagcccactgttgacccggcccgtactgcggccccgtggccaccatgtccctgcacggcaaacggaaggagatctacaagtatgaagcgccctggacagtctacgcgatgaactggagtgtgcggcccgataagcgctttcgcttggcgctgggcagcttcgtggaggagtacaacaacaaggttcagcttgttggtttagatgaggagagttcagagtttatttgcagaaacacctttgaccacccataccccaccacaaagctcatgtggatccctgacacaaaaggcgtctatccagacctactggcaacaagcggtgactatctccgtgtgtggagggttggtgaaacagagaccaggctggagtgtttgctaaacaataataagaactctgatttctgtgctcccctgacctcctttgactggaatgaggtggatccttatcttttaggtacctcaagcattgatacgacatgcaccatctgggggctggagacagggcaggtgttagggcgagtgaatctcgtgtctggccacgtgaagacccagctgatcgcccatgacaaagaggtctatgatattgcatttagccgggccgggggtggcagggacatgtttgcctctgtgggtgctgatggctcggtgcggatgtttgacctccgccatctagaacacagcaccatcatttacgaagacccacagcatcacccactgcttcgcctctgctggaacaagcaggaccctaactacctggccaccatggccatggatggaatggaggtggtgattctagatgtccgggttccctgcacacctgtcgccaggttaaacaaccatcgagcatgtgtcaatggcattgcttgggccccacattcatcctgccacatctgcactgcagcggatgaccaccaggctctcatctgggacatccagcaaatgccccgagccattgaggaccctatcctggcctacacagctgaaggagagatcaacaatgtgcagtgggcatcaactcagcccgactggatcgccatctgctacaacaactgcctggagatactcagagtgtagtgttggtggcgctgtgcccacgaggcaggggcttttgtatttcctgcctctgccccacccccaaacctcctgtataagaagtaccgtattttctgcccatcatactttgtaataaaacttgaacatgta

SEQ ID NO: 95802 - DNA, 2400 bp, Homo sapiens
  misc_feature (1131)..(1131): n is a, c, g, or t
  misc_feature (1134)..(1134): n is a, c, g, or t
  misc_feature (1194)..(1194): n is a, c, g, or t
caaacatgcacacattgtcaaaaaacttctgaaaaggtggactaatgatggatattaaaacataatgcaaagatataataaataagatcgtttgatactctaagaactgatgtataaacagagtctagaaatgaactcagaatacaaaaagaaatgtagtctgtgctaaaggtgataggaaatgaagaaaaaatatttttaaggccaggcacagtggcttacgcctgtaattccagcactttgggaggcgggggcaggcagatcacgaggtcaggagttcgagaccagcctggccaacatagtgaaagcccgtctcaaaaaaaaaaaaagaaaaatatgctggttgtcaatgcacttttattgtagaaataatgccaatctgttatttaaattgaaaacagtacagaagcatatttaagagcaaggcgaaagtcatcttttctccttcctatatcatttctgcctccatccccctctgcatagatgacctctatcaacaggtaatgtgtctccttccagacccttttggtatactttcagggatgtacatctatgcctggccaggaaagaattttttaacagcacatatcagcactactttatcagtcttctatataacacctcactgaagcataaatgtccatcaaacagggaagaaacgctctcattatattgaatgatcagagaatgatctttgtaaccactcaagtattttaagtggctgcaaatgacatgtttggtatccccttgtccactcctgatacctgacccagatgagaaggactcattagtgcagtggatagggcctggggacatctgggagatggagtcagggcctagatttgagttctggctctgccactcacttggctgaatagctgtgtgatttggaacaagtgccttaacatttctgaatctcgatttcctcatcgatgaaatgggggcttaaaatagaaccgccatcacgggggtgctttgtaaactgtgacttgctcctgaaatgcagggatcatcatccgcattgcctcacttgtgaccttgcttgctggctttctttgtccctagcggatgaccaccaggctctcatctgggacatccagcaaatgccccgagccattgaggaccctatcntgncctgcactccagcctggtgacagggcatgctctgtctcaaaaaaaaagaaaaacaaatgncagctctctctagtctgttacttgattaaagaggtgaattgtgggtggggagaatgcattggttgtccttggtttggtggcgctagcacctcagattctgctttggctgggctctcattccattcatctgagatgcatagaattcttaccacatgcacctgctgggacccaggattacccagactcctgttgtctgtttctgcatctcccctatcagtctaaaggcccagtgttgctcaagatagagactatcaactacccgtgtcctttgtcttcttttccctcaatcctatggaaatcctgtctctagttctttaaatccacaaatgaaaaattatgcctaaaaagatttttgcatgtggatagtattttttgtttttttctatgaaactctgatgatcccaggccttttacttgttatttccgcaggtggtgattctagatgtccgggttccctgcacacctgtcgccaggttaaacaaccatcgagcatgtgtcaatggcattgcttgggccccacattcatcctgccacatctgcactgcaggtaatcatggtggggagaaagaaatctgggaaggatggaggaaatctgttctcttggctccttagaattgtagttgttactgttttctaagcacagtcttgagagatttatacaaaatgactagttggagcctctccacacttgtgaaattcaatcagtacaaatttttagacgatcttgtaccctcatggacatcagaacatcttccatatatgatttacatcatgtgtcagttatagggctgtgccttgtactgtgcccctgaaatctggatggcacagaggactcaattccaggaatatggggaaagggaggcatccctcatggatataacagaatctttgggactgtgaagatcaacatctccatgggacctttcaggtttcactataacaaacccacagtgtgctctggatgcatcggagggccccacagaactttgcctggttgtggtttgtgacttgtggttttcatttcactgtttcccagaccaaagctagcaccccttacgggctgggtgcagtggcacgcacctgtagtccaagctacttaggaggctgaggcaggagaagcacttcaacccaggaggtggaggttgcattgaccagagattatgccactgccctccagccagggcaacagagcaagactctgtctcc

SEQ ID NO: 95803 - DNA, 763 bp, Homo sapiens
gccatacatcctagaacaaggctcagtgggaagtaggctaggcgtggaatgtggttatttattaattcctttgtgtgggtgagctttccgtgtgtatagatcttgtctctccagttagaatctaaggtcctacggtgaggactgaagacttgactgcctcggtggctctgccggtagcccccaccttgttttctgtagtctttatggtatgctgctccctgggctgagcagatgagtaaacacaagagggaagcttgcatgagaaccttggtcccgtcagccctgacttgcactggttgtttgcaggtacctcaagcattgatacgacatgcaccatctgggggctggagacagggcaggtgttagggcgagtgaatctcgtgtctggccacgtgaagacccagctgatcgcccatgacaaagaggtctatgatattgcatttagccgggccgggggtggcagggacatgtttgcctctgtgggtgctgatggctcggtgcggatgtttgacctccgccatctagaacacagcaccatcatttacgaagacccacagcatcacccactgcttcgcctctgctggaacaagcaggaccctaactacctggccaccatggccatggatggaatggaggtggtgattctagatgtccgggttccctgcacattgttgatctctccttcagctgtgtaggccaggatagggtcctcaatggctcggggcatttgctggatgtcccagatgagagcctggtggtcatc

SEQ ID NO: 95804 - DNA, 496 bp, Homo sapiens
gccatacatcctagaacaaggctcagtgggaagtaggctaggcgtggaatgtggttatttattaattcctttgtgtgggtgagctttccgtgtgtatagatcttgtctctccagttagaatctaaggtcctacggtgaggactgaagacttgactgcctcggtggctctgccggtagcccccaccttgttttctgtagtctttatggtatgctgctccctgggctgagcagatgagtaaacacaagagggaagcttgcatgagaaccttggtcccgtcagccctgacttgcactggttgtttgcaggtacctcaagcattgatacgacatgcaccatctgggggctggagacagggcaggtgttagggcgagtgaatctcgtgtctggccacgtgaagaccccggatgttggatataccatagccgcctagttttaagagtactgcggccagtactattgaccccggccgctggactgaccccggatgttggactg

SEQ ID NO: 95805 - DNA, 6239 bp, Homo sapiens
ttccgagagggcggggcggcgtcccaaaacggaaggtggttgtcgtccgttcccaagctggtttgaaactaggggtcgggctcggccgtcgtcgttgtttgtcgccgcatccccgcttccgggttaggccgttcctgcccgccccctcctctcctcccttcggacccatagatctcaggctcggctccccgcccgccgcagcccactgttgacccggcccgtactgcggccccgtggccaccatgtccctgcacggcaaacggaaggagatctacaagtatgaagcgccctggacagtctacgcgatgaactggagtgtgcggcccgataagcgctttcgcttggcgctgggcagcttcgtggaggagtacaacaacaaggttcagcttgttggtttagatgaggagagttcagagtttatttgcagaaacacctttgaccacccataccccaccacaaagctcatgtggatccctgacacaaaaggcgtctatccagacctactggcaacaagcggtgactatctccgtgtgtggagggttggtgaaacagagaccaggctggagtgtttgctaaacaataataagaactctgatttctgtgctcccctgacctcctttgactggaatgaggtggatccttatcttttaggtacctcaagcattgatacgacatgcaccatctgggggctggagacagggcaggtgttagggcgagtgaatctcgtgtctggccacgtgaagacccagctgatcgcccatgacaaagaggtctatgatattgcatttagccgggccgggggtggcagggacatgtttgcctctgtgggtgctgatggctcggtgcggatgtttgacctccgccatctagaacacagcaccatcatttacgaagacccacagcatcacccactgcttcgcctctgctggaacaagcaggaccctaactacctggccaccatggccatggatggaatggaggtggtgattctagatgtccgggttccctgcacacctgtcgccaggttaaacaaccatcgagcatgtgtcaatggcattgcttgggccccacattcatcctgccacatctgcactgcagcggatgaccaccaggctctcatctgggacatccagcaaatgccccgagccattgaggaccctatcctggcctacacagctgaaggagagatcaacaatgtgcagtgggcatcaactcagcccgactggatcgccatctgctacaacaactgcctggagatactcagagtgtagtgttggtggcgctgtgcccacgaggcaggggcttttgtatttcctgcctctgccccacccccaaagtaagaagaaacatgtttccagtggccagtatgtctttcattgctttgcacccactgttaccagaagctgctctaggagttcctggccagtcaccccatcgccctctgtggcagactcagtgctgtgtggcgcctcctcagcccagggctgagttttaagattttctctcctttcctcttctcctttggttcctcaattaaaaaatgtgtgtatatttgtttgtcaggcgttgtgttgaggagcagttcacgcactggctgtgtctattcctctgcccaggtgtctctgtttgctgcccaaggcagcagttcatgtctcgtccatgtccatgttcgtgttagcacttacgtgggaacaaataccaatttgtcttttctcctagtatcagtgtgtttaacaaattttaactttgtatatttgttatctatcaggctaatttttttatgaaaagaattttactctcctgcttcatttctttgtcttatagtcctccctctttgcaccttcttctcttccctcagtgcctggagctggtactgggcccctggccccatgagcagtttgccttcttgagtcactgcctgtgtagtacatacctgaccgggagtccaaaccaccttggtgctctgaagtccactgactcatcacacctttcttagcctggctcctctcaagggcattctgggcttgtaaacagacataggaagcctctgtttaccctgaagcaccactgtccagcccattggttcccactggcagcatggtagagctgagagaaacaggctctcagggtacctgacttgaggggaatcgtttcatgaagctgaacttcaagcatatttccagtacattctttcagagtctgtttttccatccaaatataagccccaggccattccacttagtgtcttttcaatgataggcaagaatgatatctgagttgaacttcggtgcttctgttgtttgagtttactgtgcctggtggtatattgggcattctttggattgagtgttctgaggtgagagagtcttcccgaggcatcctgtctgtgcttccaaccctgaacaagaccttacatgagagatggactgatggactgcggcaatcctgggctgtcaagtggatagatagttaaaaagcattatactgtgggtaatgaaaagggaggaaaaaaaaagaaggaaaaggaattatagacccccagggtcagccagttaagagctctacccacacctgtcaacccctctctcccccagtttaggttctgagcagtattggacttgtagcctgcagttgtcttttgacttgcaggccgcaggtgtctttctgttatgtgaatgagttccatggaggggcatatgtgtgattccaccgttagatgagcccttggggcaggcagtttgggatgtgctcttgggggaaagttggctgtttccttgcgctctgctcctacccgaaggtttttaagtccctctgaattgctcatctgagattagtagagtagcaggcctgaaggatgatggttttgtcctctttggttctcacctgcttgagaagtaaaacagtaactttgttcttctgggcccttaagcttttttggttaagtcttccttttcagaagtagatgtcattatatgccaaaagtctagctctttgctttaccatacagggacctgtcccaaagaaaaaggctctttttttagccagcatatttccccttctacccttttactttgttgttctgattttaggactctggctggccatgtgcttgtggttgcctctcctgcatttgccactggatttgcactgcatcgtttggagatacaaagcgagcagttcttggtcagaaccctcctctgcttttcattgtgtttgataatggttactgggtccttctctcaagggtagcaaggccaagctgatggctgcttgtttaggaggccatcagttccttcctgtggagaagggtctgaaatggaagtcagtggtagaaggggctggtctgctgggcagggcttacatccactgagttctaagattcctttcctgatctgcacctacgcctggtctgtatggtggaatttgtcagctggaactcagaaacaacaacttgaaaaaaaaataataattagaacatatttgcataagatagctatttactctggaaaccaacaacttttgagatttcccttgccctgtggacgcccagctcctgtcatccttccttaggtcctgcagtacagtcttcccctgaatgccaccggggacccagggggactccacccccctaagcaagcacacacatactcacagttgatgagttgctggtctttgagtcccagctctcttaccctccctttactccaccagcccgacgacccatgactgaggaggggatttctacagtctcaggatttagaaagtctgtaagccatccatgctccagaaagcaccgatctgttgtagttgcaaaaacaactctgtaatttgttgaggttctcaaactgacagccagcgagactgggtgggaggccctggatctgttctccctgactgcgggaggagcagccactaggactttagcaggaagcccacatggaggctccgccaggctgtggcccagctggtgatggcccttttgctcctggcagcctgaggcacagctgcctgtattgtcctcatctgttctgactgaaggatggaggtgctgaataaattaggcctcaggcctctaccaccagagagctggagaatgggtccacgtcattcaaggacctgaattttttatgctcaggagcattggaatcctcttcttccagggaggaattagcctgcaaggttaggacttgaagagggaaggtatttaataactgggcgaggatgggtgtggtggctcacacctgtaatcccagcattttgggaggctgaggtggccagatcccaaggtcagaagatcgagaccatcctggctaacatggtgaaaccccatctctactaaaaatacaaaaaaaaattagccgggggtggtggcgggtacctgtagtcctagctacttgggaggctgaggcaggagaatggcgtgaacctgggaggtggagcttgcagtgagccaagatcgtgccactgcactccagcctgggcgacagagcaagactccgtctcaaaaaataaaaaaaaaaaaaaaataggtgaaaattccttataaatccaggattggctctgagagaactggctaagattcaggaagaaacaaaaaattcagaatcctacaaggttttgatgacaattagggccaaaattttaggaggagatgtaggatgcaggagaaaattaaagtgttttctttatatcagaggaggaaatagtagaggtcagtgaaggtctggggtagggaaacattcagactgtccattgcatggctgtggagtgagactgcccttagcctgggtcagccttcctgggccataaattgggcatccgtgatgctaggtaactgtgggaacaaaatgacagcttagagcagccatgggtgatgtttggtggtaaaaaacctacaggcgtttggggtcccatgattgttccagaccatgactcttcctggttgtgggtttgttacagagcaggagaagcagaggttatgacagttatgcagactttccccctcctttttctcttttctcttccccactttgagaatatggcagcccctttcattcctggcttggggtaggggagaccattgaagtagaagcctcaaagcagacttttccctttactgtgtgtactccaggacgaagaaggaagatcatgcttgatacttagattggttttcccagggaagagggcggagcagagcaaagtcactgtgaaccctgggccaggccctggctgggccagctcctgagagcgtctcgtgttgcagacccttgcccacttcacccacctgcaccttctccccctctcacagtgtcactgctgctaatggtcaaagtcaaatgtgtggccacatgggatgggccaggtcctctcaggctactttctggatgtcatttttaaaatatggaaacatgcaggtgccttcccaaagaggcttggactggtatatccaacgagaaacaaataagctaaagaaagtttaaactcaagaagaaagatgttgacagtctatgtaacagctggaaagtttataggcacccacctttgggacaacccagtgattatgaacatgtgatatctactatttaaaagaaatgttctcaccttgggttgattgtggtataccatgtgttatgaaaattgttgagctgaagctttgaatcgatttagttgagtctgactcacttgctttggttcctgtgtattttactacccctcttgtcagtgaccttccttccccaccccacccagagtgaatttgtagcatgattgtataaacctctatgtagaaaatggagatttcttgctctgaaatgttaagctctaactgatccatttctgtgtcctttagcctagtatgtctgaacttccattcttgttatatatttaaactttccctctatattataggttttgtggcatccacggtcaggtgtagaggaagctgccccttgcagaactgtactgtaatatttttcttttataaatattttcacaggactgattgtacacagggcttgtaataaaattttaacactgtgctgtgaaacaactatggggaatctccattgaaggctacttcatgggcacctgaaagtggagtgttatagctatgactttctatttcttgtttcctaagtaaattaaacctaattttcaccctttcattctgtttcagcctcctgtataagaagtaccgtattttctgcccatcatactttgtaataaaacttgaacatgta

SEQ ID NO: 95806 - DNA, 6306 bp, Homo sapiens
ttccgagagggcggggcggcgtcccaaaacggaaggtggttgtcgtccgttcccaagctggtttgaaactaggggtcgggctcggccgtcgtcgttgtttgtcgccgcatccccgcttccgggttaggccgttcctgcccgccccctcctctcctcccttcggacccatagatctcaggctcggctccccgcccgccgcagcccactgttgacccggcccgtactgcggccccgtggccaccatgtccctgcacggcaaacggaaggagatctacaagtatgaagcgccctggacagtctacgcgatgaactggagtgtgcggcccgataagcgctttcgcttggcgctgggcagcttcgtggaggagtacaacaacaaggttcagcttgttggtttagatgaggagagttcagagtttatttgcagaaacacctttgaccacccataccccaccacaaagctcatgtggatccctgacacaaaaggcgtctatccagacctactggcaacaagcggtgactatctccgtgtgtggagggttggtgaaacagagaccaggctggagtgtttgctaaacaataataagaactctgatttctgtgctcccctgacctcctttgactggaatgaggtggatccttatcttttaggtacctcaagcattgatacgacatgcaccatctgggggctggagacagggcaggtgttagggcgagtgaatctcgtgtctggccacgtgaagacccagctgatcgcccatgacaaagaggtctatgatattgcatttagccgggccgggggtggcagggacatgtttgcctctgtgggtgctgatggctcggtgcggatgtttgacctccgccatctagaacacagcaccatcatttacgaagacccacagcatcacccactgcttcgcctctgctggaacaagcaggaccctaactacctggccaccatggccatggatggaatggaggtggtgattctagatgtccgggttccctgcacacctgtcgccaggttaaacaaccatcgagcatgtgtcaatggcattgcttgggccccacattcatcctgccacatctgcactgcagcggatgaccaccaggctctcatctgggacatccagcaaatgccccgagccattgaggaccctatcctggcctacacagctgaaggagagatcaacaatgtgcagtgggcatcaactcagcccgactggatcgccatctgctacaacaactgcctggagatactcagagtgtagtgttggtggcgctgtgcccacgaggcaggggcttttgtatttcctgcctctgccccacccccaaagtaagaagaaacatgtttccagtggccagtatgtctttcattgctttgcacccactgttaccagaagctgctctaggagttcctggccagtcaccccatcgccctctgtggcagactcagtgctgtgtggcgcctcctcagcccagggctgagttttaagattttctctcctttcctcttctcctttggttcctcaattaaaaaatgtgtgtatatttgtttgtcaggcgttgtgttgaggagcagttcacgcactggctgtgtctattcctctgcccaggtgtctctgtttgctgcccaaggcagcagttcatgtctcgtccatgtccatgttcgtgttagcacttacgtgggaacaaataccaatttgtcttttctcctagtatcagtgtgtttaacaaattttaactttgtatatttgttatctatcaggctaatttttttatgaaaagaattttactctcctgcttcatttctttgtcttatagtcctccctctttgcaccttcttctcttccctcagtgcctggagctggtactgggcccctggccccatgagcagtttgccttcttgagtcactgcctgtgtagtacatacctgaccgggagtccaaaccaccttggtgctctgaagtccactgactcatcacacctttcttagcctggctcctctcaagggcattctgggcttgtaaacagacataggaagcctctgtttaccctgaagcaccactgtccagcccattggttcccactggcagcatggtagagctgagagaaacaggctctcagggtacctgacttgaggggaatcgtttcatgaagctgaacttcaagcatatttccagtacattctttcagagtctgtttttccatccaaatataagccccaggccattccacttagtgtcttttcaatgataggcaagaatgatatctgagttgaacttcggtgcttctgttgtttgagtttactgtgcctggtggtatattgggcattctttggattgagtgttctgaggtgagagagtcttcccgaggcatcctgtctgtgcttccaaccctgaacaagaccttacatgagagatggactgatggactgcggcaatcctgggctgtcaagtggatagatagttaaaaagcattatactgtgggtaatgaaaagggaggaaaaaaaaagaaggaaaaggaattatagacccccagggtcagccagttaagagctctacccacacctgtcaacccctctctcccccagtttaggttctgagcagtattggacttgtagcctgcagttgtcttttgacttgcaggccgcaggtgtctttctgttatgtgaatgagttccatggaggggcatatgtgtgattccaccgttagatgagcccttggggcaggcagtttgggatgtgctcttgggggaaagttggctgtttccttgcgctctgctcctacccgaaggtttttaagtccctctgaattgctcatctgagattagtagagtagcaggcctgaaggatgatggttttgtcctctttggttctcacctgcttgagaagtaaaacagtaactttgttcttctgggcccttaagcttttttggttaagtcttccttttcagaagtagatgtcattatatgccaaaagtctagctctttgctttaccatacagggacctgtcccaaagaattttaggactctggctggccatgtgcttgtggttgcctctcctgcatttgccactggatttgcactgcatcgtttggagatacaaagcgagcagttcttggtcagaaccctcctctgcttttcattgtgtttgataatggttactgggtccttctctcaagggtagcaaggccaagctgatggctgcttgtttaggaggccatcagttccttcctgtggagaagggtctgaaatggaagtcagtggtagaaggggctggtctgctgggcagggcttacatccactgagttctaagattcctttcctgatctgcacctacgcctggtctgtatggtggaatttgtcagctggaactcagaaacaacaacttgaaaaaaaaataataattagaacatatttgcataagatagctatttactctggaaaccaacaacttttgagatttcccttgccctgtggacgcccagctcctgtcatccttccttaggtcctgcagtacagtcttcccctgaatgccaccggggacccagggggactccacccccctaagcaagcacacacatactcacagttgatgagttgctggtctttgagtcccagctctcttaccctccctttactccaccagcccgacgacccatgactgaggaggggatttctacagtctcaggatttagaaagtctgtaagccatccatgctccagaaagcaccgatctgttgtagttgcaaaaacaactctgtaatttgttgaggttctcaaactgacagccagcgagactgggtgggaggccctggatctgttctccctgactgcgggaggagcagccactaggactttagcaggaagcccacatggaggctccgccaggctgtggcccagctggtgatggcccttttgctcctggcagcctgaggcacagctgcctgtattgtcctcatctgttctgactgaaggatggaggtgctgaataaattaggcctcaggcctctaccaccagagagctggagaatgggtccacgtcattcaaggacctgaattttttatgctcaggagcattggaatcctcttcttccagggaggaattagcctgcaaggttaggacttgaagagggaaggtatttaataactgggcgaggatgggtgtggtggctcacacctgtaatcccagcattttgggaggctgaggtggccagatcccaaggtcagaagatcgagaccatcctggctaacatggtgaaaccccatctctactaaaaatacaaaaaaaaattagccgggggtggtggcgggtacctgtagtcctagctacttgggaggctgaggcaggagaatggcgtgaacctgggaggtggagcttgcagtgagccaagatcgtgccactgcactccagcctgggcgacagagcaagactccgtctcaaaaaataaaaaaaaaaaaaaaataggtgaaaattccttataaatccaggattggctctgagagaactggctaagattcaggaagaaacaaaaaattcagaatcctacaaggttttgatgacaattagggccaaaattttaggaggagatgtaggatgcaggagaaaattaaagtgttttctttatatcagaggaggaaatagtagaggtcagtgaaggtctggggtagggaaacattcagactgtccattgcatggctgtggagtgagactgcccttagcctgggtcagccttcctgggccataaattgggcatccgtgatgctaggtaactgtgggaacaaaatgacagcttagagcagccatgggtgatgtttggtggtaaaaaacctacaggcgtttggggtcccatgattgttccagaccatgactcttcctggttgtgggtttgttacagagcaggagaagcagaggttatgacagttatgcagactttccccctcctttttctcttttctcttccccttgcttttccactgtttcttcctgctgccacctgggccttgaattcctgggctgtgaagacatgtagcagctgcagggtttaccacacgtgggagggcagcccagtactgtccctctgccttccccactttgagaatatggcagcccctttcattcctggcttggggtaggggagaccattgaagtagaagcctcaaagcagacttttccctttactgtgtgtactccaggacgaagaaggaagatcatgcttgatacttagattggttttcccagggaagagggcggagcagagcaaagtcactgtgaaccctgggccaggccctggctgggccagctcctgagagcgtctcgtgttgcagacccttgcccacttcacccacctgcaccttctccccctctcacagtgtcactgctgctaatggtcaaagtcaaatgtgtggccacatgggatgggccaggtcctctcaggctactttctggatgtcatttttaaaatatggaaacatgcaggtgccttcccaaagaggcttggactggtatatccaacgagaaacaaataagctaaagaaagtttaaactcaagaagaaagatgttgacagtctatgtaacagctggaaagtttataggcacccacctttgggacaacccagtgattatgaacatgtgatatctactatttaaaagaaatgttctcaccttgggttgattgtggtataccatgtgttatgaaaattgttgagctgaagctttgaatcgatttagttgagtctgactcacttgctttggttcctgtgtattttactacccctcttgtcagtgaccttccttccccaccccacccagagtgaatttgtagcatgattgtataaacctctatgtagaaaatggagatttcttgctctgaaatgttaagctctaactgatccatttctgtgtcctttagcctagtatgtctgaacttccattcttgttatatatttaaactttccctctatattataggttttgtggcatccacggtcaggtgtagaggaagctgccccttgcagaactgtactgtaatatttttcttttataaatattttcacaggactgattgtacacagggcttgtaataaaattttaacactgtgctgtgaaacaactatggggaatctccattgaaggctacttcatgggcacctgaaagtggagtgttatagctatgactttctatttcttgtttcctaagtaaattaaacctaattttcaccctttcattctgtttcagcctcctgtataagaagtaccgtattttctgcccatcatactttgtaataaaacttgaacatgta

SEQ ID NO: 95807 - DNA, 6342 bp, Homo sapiens
ttccgagagggcggggcggcgtcccaaaacggaaggtggttgtcgtccgttcccaagctggtttgaaactaggggtcgggctcggccgtcgtcgttgtttgtcgccgcatccccgcttccgggttaggccgttcctgcccgccccctcctctcctcccttcggacccatagatctcaggctcggctccccgcccgccgcagcccactgttgacccggcccgtactgcggccccgtggccaccatgtccctgcacggcaaacggaaggagatctacaagtatgaagcgccctggacagtctacgcgatgaactggagtgtgcggcccgataagcgctttcgcttggcgctgggcagcttcgtggaggagtacaacaacaaggttcagcttgttggtttagatgaggagagttcagagtttatttgcagaaacacctttgaccacccataccccaccacaaagctcatgtggatccctgacacaaaaggcgtctatccagacctactggcaacaagcggtgactatctccgtgtgtggagggttggtgaaacagagaccaggctggagtgtttgctaaacaataataagaactctgatttctgtgctcccctgacctcctttgactggaatgaggtggatccttatcttttaggtacctcaagcattgatacgacatgcaccatctgggggctggagacagggcaggtgttagggcgagtgaatctcgtgtctggccacgtgaagacccagctgatcgcccatgacaaagaggtctatgatattgcatttagccgggccgggggtggcagggacatgtttgcctctgtgggtgctgatggctcggtgcggatgtttgacctccgccatctagaacacagcaccatcatttacgaagacccacagcatcacccactgcttcgcctctgctggaacaagcaggaccctaactacctggccaccatggccatggatggaatggaggtggtgattctagatgtccgggttccctgcacacctgtcgccaggttaaacaaccatcgagcatgtgtcaatggcattgcttgggccccacattcatcctgccacatctgcactgcagcggatgaccaccaggctctcatctgggacatccagcaaatgccccgagccattgaggaccctatcctggcctacacagctgaaggagagatcaacaatgtgcagtgggcatcaactcagcccgactggatcgccatctgctacaacaactgcctggagatactcagagtgtagtgttggtggcgctgtgcccacgaggcaggggcttttgtatttcctgcctctgccccacccccaaagtaagaagaaacatgtttccagtggccagtatgtctttcattgctttgcacccactgttaccagaagctgctctaggagttcctggccagtcaccccatcgccctctgtggcagactcagtgctgtgtggcgcctcctcagcccagggctgagttttaagattttctctcctttcctcttctcctttggttcctcaattaaaaaatgtgtgtatatttgtttgtcaggcgttgtgttgaggagcagttcacgcactggctgtgtctattcctctgcccaggtgtctctgtttgctgcccaaggcagcagttcatgtctcgtccatgtccatgttcgtgttagcacttacgtgggaacaaataccaatttgtcttttctcctagtatcagtgtgtttaacaaattttaactttgtatatttgttatctatcaggctaatttttttatgaaaagaattttactctcctgcttcatttctttgtcttatagtcctccctctttgcaccttcttctcttccctcagtgcctggagctggtactgggcccctggccccatgagcagtttgccttcttgagtcactgcctgtgtagtacatacctgaccgggagtccaaaccaccttggtgctctgaagtccactgactcatcacacctttcttagcctggctcctctcaagggcattctgggcttgtaaacagacataggaagcctctgtttaccctgaagcaccactgtccagcccattggttcccactggcagcatggtagagctgagagaaacaggctctcagggtacctgacttgaggggaatcgtttcatgaagctgaacttcaagcatatttccagtacattctttcagagtctgtttttccatccaaatataagccccaggccattccacttagtgtcttttcaatgataggcaagaatgatatctgagttgaacttcggtgcttctgttgtttgagtttactgtgcctggtggtatattgggcattctttggattgagtgttctgaggtgagagagtcttcccgaggcatcctgtctgtgcttccaaccctgaacaagaccttacatgagagatggactgatggactgcggcaatcctgggctgtcaagtggatagatagttaaaaagcattatactgtgggtaatgaaaagggaggaaaaaaaaagaaggaaaaggaattatagacccccagggtcagccagttaagagctctacccacacctgtcaacccctctctcccccagtttaggttctgagcagtattggacttgtagcctgcagttgtcttttgacttgcaggccgcaggtgtctttctgttatgtgaatgagttccatggaggggcatatgtgtgattccaccgttagatgagcccttggggcaggcagtttgggatgtgctcttgggggaaagttggctgtttccttgcgctctgctcctacccgaaggtttttaagtccctctgaattgctcatctgagattagtagagtagcaggcctgaaggatgatggttttgtcctctttggttctcacctgcttgagaagtaaaacagtaactttgttcttctgggcccttaagcttttttggttaagtcttccttttcagaagtagatgtcattatatgccaaaagtctagctctttgctttaccatacagggacctgtcccaaagaaaaaggctctttttttagccagcatatttccccttctacccttttactttgttgttctgattttaggactctggctggccatgtgcttgtggttgcctctcctgcatttgccactggatttgcactgcatcgtttggagatacaaagcgagcagttcttggtcagaaccctcctctgcttttcattccttctctcaagggtagcaaggccaagctgatggctgcttgtttaggaggccatcagttccttcctgtggagaagggtctgaaatggaagtcagtggtagaaggggctggtctgctgggcagggcttacatccactgagttctaagattcctttcctgatctgcacctacgcctggtctgtatggtggaatttgtcagctggaactcagaaacaacaacttgaaaaaaaaataataattagaacatatttgcataagatagctatttactctggaaaccaacaacttttgagatttcccttgccctgtggacgcccagctcctgtcatccttccttaggtcctgcagtacagtcttcccctgaatgccaccggggacccagggggactccacccccctaagcaagcacacacatactcacagttgatgagttgctggtctttgagtcccagctctcttaccctccctttactccaccagcccgacgacccatgactgaggaggggatttctacagtctcaggatttagaaagtctgtaagccatccatgctccagaaagcaccgatctgttgtagttgcaaaaacaactctgtaatttgttgaggttctcaaactgacagccagcgagactgggtgggaggccctggatctgttctccctgactgcgggaggagcagccactaggactttagcaggaagcccacatggaggctccgccaggctgtggcccagctggtgatggcccttttgctcctggcagcctgaggcacagctgcctgtattgtcctcatctgttctgactgaaggatggaggtgctgaataaattaggcctcaggcctctaccaccagagagctggagaatgggtccacgtcattcaaggacctgaattttttatgctcaggagcattggaatcctcttcttccagggaggaattagcctgcaaggttaggacttgaagagggaaggtatttaataactgggcgaggatgggtgtggtggctcacacctgtaatcccagcattttgggaggctgaggtggccagatcccaaggtcagaagatcgagaccatcctggctaacatggtgaaaccccatctctactaaaaatacaaaaaaaaattagccgggggtggtggcgggtacctgtagtcctagctacttgggaggctgaggcaggagaatggcgtgaacctgggaggtggagcttgcagtgagccaagatcgtgccactgcactccagcctgggcgacagagcaagactccgtctcaaaaaataaaaaaaaaaaaaaaataggtgaaaattccttataaatccaggattggctctgagagaactggctaagattcaggaagaaacaaaaaattcagaatcctacaaggttttgatgacaattagggccaaaattttaggaggagatgtaggatgcaggagaaaattaaagtgttttctttatatcagaggaggaaatagtagaggtcagtgaaggtctggggtagggaaacattcagactgtccattgcatggctgtggagtgagactgcccttagcctgggtcagccttcctgggccataaattgggcatccgtgatgctaggtaactgtgggaacaaaatgacagcttagagcagccatgggtgatgtttggtggtaaaaaacctacaggcgtttggggtcccatgattgttccagaccatgactcttcctggttgtgggtttgttacagagcaggagaagcagaggttatgacagttatgcagactttccccctcctttttctcttttctcttccccttgcttttccactgtttcttcctgctgccacctgggccttgaattcctgggctgtgaagacatgtagcagctgcagggtttaccacacgtgggagggcagcccagtactgtccctctgccttccccactttgagaatatggcagcccctttcattcctggcttggggtaggggagaccattgaagtagaagcctcaaagcagacttttccctttactgtgtgtactccaggacgaagaaggaagatcatgcttgatacttagattggttttcccagggaagagggcggagcagagcaaagtcactgtgaaccctgggccaggccctggctgggccagctcctgagagcgtctcgtgttgcagacccttgcccacttcacccacctgcaccttctccccctctcacagtgtcactgctgctaatggtcaaagtcaaatgtgtggccacatgggatgggccaggtcctctcaggctactttctggatgtcatttttaaaatatggaaacatgcaggtgccttcccaaagaggcttggactggtatatccaacgagaaacaaataagctaaagaaagtttaaactcaagaagaaagatgttgacagtctatgtaacagctggaaagtttataggcacccacctttgggacaacccagtgattatgaacatgtgatatctactatttaaaagaaatgttctcaccttgggttgattgtggtataccatgtgttatgaaaattgttgagctgaagctttgaatcgatttagttgagtctgactcacttgctttggttcctgtgtattttactacccctcttgtcagtgaccttccttccccaccccacccagagtgaatttgtagcatgattgtataaacctctatgtagaaaatggagatttcttgctctgaaatgttaagctctaactgatccatttctgtgtcctttagcctagtatgtctgaacttccattcttgttatatatttaaactttccctctatattataggttttgtggcatccacggtcaggtgtagaggaagctgccccttgcagaactgtactgtaatatttttcttttataaatattttcacaggactgattgtacacagggcttgtaataaaattttaacactgtgctgtgaaacaactatggggaatctccattgaaggctacttcatgggcacctgaaagtggagtgttatagctatgactttctatttcttgtttcctaagtaaattaaacctaattttcaccctttcattctgtttcagcctcctgtataagaagtaccgtattttctgcccatcatactttgtaataaaacttgaacatgta

SEQ ID NO: 95808 - DNA, 5336 bp, Homo sapiens
  misc_feature (17)..(17): n is a, c, g, or t
  misc_feature (34)..(34): n is a, c, g, or t
agagcgacatgctgaantggcatccgggattttnttgagccagacaaagaacaattgcagttgtttgagcggatgaccaccaggctctcatctgggacatccagcaaatgccccgagccattgaggaccctatcctggcctacacagctgaaggagagatcaacaatgtgcagtgggcatcaactcagcccgactggatcgccatctgctacaacaactgcctggagatactcagagtgtagtgttggtggcgctgtgcccacgaggcaggggcttttgtatttcctgcctctgccccacccccaaagtaagaagaaacatgtttccagtggccagtatgtctttcattgctttgcacccactgttaccagaagctgctctaggagttcctggccagtcaccccatcgccctctgtggcagactcagtgctgtgtggcgcctcctcagcccagggctgagttttaagattttctctcctttcctcttctcctttggttcctcaattaaaaaatgtgtgtatatttgtttgtcaggcgttgtgttgaggagcagttcacgcactggctgtgtctattcctctgcccaggtgtctctgtttgctgcccaaggcagcagttcatgtctcgtccatgtccatgttcgtgttagcacttacgtgggaacaaataccaatttgtcttttctcctagtatcagtgtgtttaacaaattttaactttgtatatttgttatctatcaggctaatttttttatgaaaagaattttactctcctgcttcatttctttgtcttatagtcctccctctttgcaccttcttctcttccctcagtgcctggagctggtactgggcccctggccccatgagcagtttgccttcttgagtcactgcctgtgtagtacatacctgaccgggagtccaaaccaccttggtgctctgaagtccactgactcatcacacctttcttagcctggctcctctcaagggcattctgggcttgtaaacagacataggaagcctctgtttaccctgaagcaccactgtccagcccattggttcccactggcagcatggtagagctgagagaaacaggctctcagggtacctgacttgaggggaatcgtttcatgaagctgaacttcaagcatatttccagtacattctttcagagtctgtttttccatccaaatataagccccaggccattccacttagtgtcttttcaatgataggcaagaatgatatctgagttgaacttcggtgcttctgttgtttgagtttactgtgcctggtggtatattgggcattctttggattgagtgttctgaggtgagagagtcttcccgaggcatcctgtctgtgcttccaaccctgaacaagaccttacatgagagatggactgatggactgcggcaatcctgggctgtcaagtggatagatagttaaaaagcattatactgtgggtaatgaaaagggaggaaaaaaaaagaaggaaaaggaattatagacccccagggtcagccagttaagagctctacccacacctgtcaacccctctctcccccagtttaggttctgagcagtattggacttgtagcctgcagttgtcttttgacttgcaggccgcaggtgtctttctgttatgtgaatgagttccatggaggggcatatgtgtgattccaccgttagatgagcccttggggcaggcagtttgggatgtgctcttgggggaaagttggctgtttccttgcgctctgctcctacccgaaggtttttaagtccctctgaattgctcatctgagattagtagagtagcaggcctgaaggatgatggttttgtcctctttggttctcacctgcttgagaagtaaaacagtaactttgttcttctgggcccttaagcttttttggttaagtcttccttttcagaagtagatgtcattatatgccaaaagtctagctctttgctttaccatacagggacctgtcccaaagaaaaaggctctttttttagccagcatatttccccttctacccttttactttgttgttctgattttaggactctggctggccatgtgcttgtggttgcctctcctgcatttgccactggatttgcactgcatcgtttggagatacaaagcgagcagttcttggtcagaaccctcctctgcttttcattgtgtttgataatggttactgggtccttctctcaagggtagcaaggccaagctgatggctgcttgtttaggaggccatcagttccttcctgtggagaagggtctgaaatggaagtcagtggtagaaggggctggtctgctgggcagggcttacatccactgagttctaagattcctttcctgatctgcacctacgcctggtctgtatggtggaatttgtcagctggaactcagaaacaacaacttgaaaaaaaaataataattagaacatatttgcataagatagctatttactctggaaaccaacaacttttgagatttcccttgccctgtggacgcccagctcctgtcatccttccttaggtcctgcagtacagtcttcccctgaatgccaccggggacccagggggactccacccccctaagcaagcacacacatactcacagttgatgagttgctggtctttgagtcccagctctcttaccctccctttactccaccagcccgacgacccatgactgaggaggggatttctacagtctcaggatttagaaagtctgtaagccatccatgctccagaaagcaccgatctgttgtagttgcaaaaacaactctgtaatttgttgaggttctcaaactgacagccagcgagactgggtgggaggccctggatctgttctccctgactgcgggaggagcagccactaggactttagcaggaagcccacatggaggctccgccaggctgtggcccagctggtgatggcccttttgctcctggcagcctgaggcacagctgcctgtattgtcctcatctgttctgactgaaggatggaggtgctgaataaattaggcctcaggcctctaccaccagagagctggagaatgggtccacgtcattcaaggacctgaattttttatgctcaggagcattggaatcctcttcttccagggaggaattagcctgcaaggttaggacttgaagagggaaggtatttaataactgggcgaggatgggtgtggtggctcacacctgtaatcccagcattttgggaggctgaggtggccagatcccaaggtcagaagatcgagaccatcctggctaacatggtgaaaccccatctctactaaaaatacaaaaaaaaattagccgggggtggtggcgggtacctgtagtcctagctacttgggaggctgaggcaggagaatggcgtgaacctgggaggtggagcttgcagtgagccaagatcgtgccactgcactccagcctgggcgacagagcaagactccgtctcaaaaaataaaaaaaaaaaaaaaataggtgaaaattccttataaatccaggattggctctgagagaactggctaagattcaggaagaaacaaaaaattcagaatcctacaaggttttgatgacaattagggccaaaattttaggaggagatgtaggatgcaggagaaaattaaagtgttttctttatatcagaggaggaaatagtagaggtcagtgaaggtctggggtagggaaacattcagactgtccattgcatggctgtggagtgagactgcccttagcctgggtcagccttcctgggccataaattgggcatccgtgatgctaggtaactgtgggaacaaaatgacagcttagagcagccatgggtgatgtttggtggtaaaaaacctacaggcgtttggggtcccatgattgttccagaccatgactcttcctggttgtgggtttgttacagagcaggagaagcagaggttatgacagttatgcagactttccccctcctttttctcttttctcttccccttgcttttccactgtttcttcctgctgccacctgggccttgaattcctgggctgtgaagacatgtagcagctgcagggtttaccacacgtgggagggcagcccagtactgtccctctgccttccccactttgagaatatggcagcccctttcattcctggcttggggtaggggagaccattgaagtagaagcctcaaagcagacttttccctttactgtgtgtactccaggacgaagaaggaagatcatgcttgatacttagattggttttcccagggaagagggcggagcagagcaaagtcactgtgaaccctgggccaggccctggctgggccagctcctgagagcgtctcgtgttgcagacccttgcccacttcacccacctgcaccttctccccctctcacagtgtcactgctgctaatggtcaaagtcaaatgtgtggccacatgggatgggccaggtcctctcaggctactttctggatgtcatttttaaaatatggaaacatgcaggtgccttcccaaagaggcttggactggtatatccaacgagaaacaaataagctaaagaaagtttaaactcaagaagaaagatgttgacagtctatgtaacagctggaaagtttataggcacccacctttgggacaacccagtgattatgaacatgtgatatctactatttaaaagaaatgttctcaccttgggttgattgtggtataccatgtgttatgaaaattgttgagctgaagctttgaatcgatttagttgagtctgactcacttgctttggttcctgtgtattttactacccctcttgtcagtgaccttccttccccaccccacccagagtgaatttgtagcatgattgtataaacctctatgtagaaaatggagatttcttgctctgaaatgttaagctctaactgatccatttctgtgtcctttagcctagtatgtctgaacttccattcttgttatatatttaaactttccctctatattataggttttgtggcatccacggtcaggtgtagaggaagctgccccttgcagaactgtactgtaatatttttcttttataaatattttcacaggactgattgtacacagggcttgtaataaaattttaacactgtgctgtgaaacaactatggggaatctccattgaaggctacttcatgggcacctgaaagtggagtgttatagctatgactttctatttcttgtttcctaagtaaattaaacctaattttcaccctttcattctgtttcagcctcctgtataagaagtaccgtattttctgcccatcatactttgtaataaaacttgaacatgta

SEQ ID NO: 95809 - DNA, 5885 bp, Homo sapiens
ttccgagagggcggggcggcgtcccaaaacggaaggtggttgtcgtccgttcccaagctggtttgaaactaggggtcgggctcggccgtcgtcgttgtttgtcgccgcatccccgcttccgggttaggccgttcctgcccgccccctcctctcctcccttcggacccatagatctcaggctcggctccccgcccgccgcagcccactgttgacccggcccgtactgcggccccgtggccaccatgtccctgcacggcaaacggaaggagatctacaagtatgaagcgccctggacagtctacgcgatgaactggagtgtgcggcccgataagcgctttcgcttggcgctgggcagcttcgtggaggagtacaacaacaaggttcagcttgttggtttagatgaggagagttcagagtttatttgcagaaacacctttgaccacccataccccaccacaaagctcatgtggatccctgacacaaaaggcgtctatccagacctactggcaacaagcggtgactatctccgtgtgtggagggttggtgaaacagagaccaggctggagtgtttgctaaacaataataagaactctgatttctgtgctcccctgacctcctttgactggaatgaggtggatccttatcttttaggtacctcaagcattgatacgacatgcaccatctgggggctggagacagggcaggtgttagggcgagtgaatctcgtgtctggccacgtgaagacccagctgatcgcccatgacaaagaggtctatgatattgcatttagccgggccgggggtggcagggacatgtttgcctctgtgggtgctgatggctcggtgcggatgtttgacctccgccatctagaacacagcaccatcatttacgaagacccacagcatcacccactgcttcgcctctgctggaacaagcaggaccctaactacctggccaccatggccatggatggaatggaggtggtgattctagatgtccgggttccctgcacacctgtcgccaggttaaacaaccatcgagcatgtgtcaatggcattgcttgggccccacattcatcctgccacatctgcactgcagcggatgaccaccaggctctcatctgggacatccagcaaatgccccgagccattgaggaccctatcctggcctacacagctgaaggagagatcaacaatgtgcagtgggcatcaactcagcccgactggatcgccatctgctacaacaactgcctggagatactcagagtgtagtgttggtggcgctgtgcccacgaggcaggggcttttgtatttcctgcctctgccccacccccaaagtaagaagaaacatgtttccagtggccagtatgtctttcattgctttgcacccactgttaccagaagctgctctaggagttcctggccagtcaccccatcgccctctgtggcagactcagtgctgtgtggcgcctcctcagcccagggctgagttttaagattttctctcctttcctcttctcctttggttcctcaattaaaaaatgtgtgtatatttgtttgtcaggcgttgtgttgaggagcagttcacgcactggctgtgtctattcctctgcccaggtgtctctgtttgctgcccaaggcagcagttcatgtctcgtccatgtccatgttcgtgttagcacttacgtgggaacaaataccaatttgtcttttctcctagtatcagtgtgtttaacaaattttaactttgtatatttgttatctatcaggctaatttttttatgaaaagaattttactctcctgcttcatttctttgtcttatagtcctccctctttgcaccttcttctcttccctcagtgcctggagctggtactgggcccctggccccatgagcagtttgccttcttgagtcactgcctgtgtagtacatacctgaccgggagtccaaaccaccttggtgctctgaagtccactgactcatcacacctttcttagcctggctcctctcaagggcattctgggcttgtaaacagacataggaagcctctgtttaccctgaagcaccactgtccagcccattggttcccactggcagcatggtagagctgagagaaacaggctctcagggtacctgacttgaggggaatcgtttcatgaagctgaacttcaagcatatttccagtacattctttcagagtctgtttttccatccaaatataagccccaggccattccacttagtgtcttttcaatgataggcaagaatgatatctgagttgaacttcggtgcttctgttgtttgagtttactgtgcctggtggtatattgggcattctttggattgagtgttctgaggtgagagagtcttcccgaggcatcctgtctgtgcttccaaccctgaacaagaccttacatgagagatggactgatggactgcggcaatcctgggctgtcaagtggatagatagttaaaaagcattatactgtgggtaatgaaaagggaggaaaaaaaaagaaggaaaaggaattatagacccccagggtcagccagttaagagctctacccacacctgtcaacccctctctcccccagtttaggttctgagcagtattggacttgtagcctgcagttgtcttttgacttgcaggccgcaggtgtctttctgttatgtgaatgagttccatggaggggcatatgtgtgattccaccgttagatgagcccttggggcaggcagtttgggatgtgctcttgggggaaagttggctgtttccttgcgctctgctcctacccgaaggtttttaagtccctctgaattgctcatctgagattagtagagtagcaggcctgaaggatgatggttttgtcctctttggttctcacctgcttgagaagtaaaacagtaactttgttcttctgggcccttaagcttttttggttaagtcttccttttcagaagtagatgtcattatatgccaaaagtctagctctttgctttaccatacagggacctgtcccaaagaaaaaggctctttttttagccagcatatttccccttctacccttttactttgttgttctgattttaggactctggctggccatgtgcttgtggttgcctctcctgcatttgccactggatttgcactgcatcgtttggagatacaaagcgagcagttcttggtcagaaccctcctctgcttttcattgtgtttgataatggttactgggtccttctctcaagggtagcaaggccaagctgatggctgcttgtttaggaggccatcagttccttcctgtggagaagggtctgaaatggaagtcagtggtagaaggggctggtctgctgggcagggcttacatccactgagttctaagattcctttcctgatctgcacctacgcctggtctgtatggtggaatttgtcagctggaactcagaaacaacaacttgaaaaaaaaataataattagaacatatttgcataagatagctatttactctggaaaccaacaacttttgagatttcccttgccctgtggacgcccagctcctgtcatccttccttaggtcctgcagtacagtcttcccctgaatgccaccggggacccagggggactccacccccctaagcaagcacacacatactcacagttgatgagttgctggtctttgagtcccagctctcttaccctccctttactccaccagcccgacgacccatgactgaggaggggatttctacagtctcaggatttagaaagtctgtaagccatccatgctccagaaagcaccgatctgttgtagttgcaaaaacaactctgtaatttgttgaggttctcaaactgacagccagcgagactgggtgggaggccctggatctgttctccctgactgcgggaggagcagccactaggactttagcaggaagcccacatggaggctccgccaggctgtggcccagctggtgatggcccttttgctcctggcagcctgaggcacagctgcctgtattgtcctcatctgttctgactgaaggatggaggtgctgaataaattaggcctcaggcctctaccaccagagagctggagaatgggtccacgtcattcaaggacctgaattttttatgctcaggagcattggaatcctcttcttccagggaggaattagcctgcaaggttaggacttgaagagggaaggtatttaataactgggcgaggatgggtgtggtggctcacacctgtaatcccagcattttgggaggctgaggtggccagatcccaaggtcagaagatcgagaccatcctggctaacatggtgaaaccccatctctactaaaaatacaaaaaaaaattagccgggggtggtggcgggtacctgtagtcctagctacttgggaggctgaggcaggagaatggcgtgaacctgggaggtggagcttgcagtgagccaagatcgtgccactgcactccagcctgggcgacagagcaagactccgtctcaaaaaataaaaaaaaaaaaaaaataggtgaaaattccttataaatccaggattggctctgagagaactggctaagattcaggaagaaacaaaaaattcagaatcctacaaggttttgatgacaattagggccaaaattttaggaggagatgtaggatgcaggagaaaattaaagtgttttctttatatcagaggaggaaatagtagaggtcagtgaaggtctggggtagggaaacattcagactgtccattgcatggctgtggagtgagactgcccttagcctgggtcagccttcctgggccataaattgggcatccgtgatgctaggtaactgtgggaacaaaatgacagcttagagcagccatgggtgatgtttggtggtaaaaaacctacaggcgtttggggtcccatgattgttccagaccatgactcttcctggttgtgggtttgttacagagcaggagaagcagaggttatgacagttatgcagactttccccctcctttttctcttttctcttccccttgcttttccactgtttcttcctgctgccacctgggccttgaattcctgggctgtgaagacatgtagcagctgcagggtttaccacacgtgggagggcagcccagtactgtccctctgccttccccactttgagaatatggcagcccctttcattcctggcttggggtaggggagaccattgaagtagaagcctcaaagcagacttttccctttactgtgtgtactccaggacgaagaaggaagatcatgcttgatacttagattggttttcccagggaagagggcggagcagagcaaagtcactgtgaaccctgggccaggccctggctgggccagctcctgagagcgtctcgtgttgcagacccttgcccacttcacccacctgcaccttctccccctctcacagtgtcactgctgctaatggtcaaagtcaaatgtgtggccacatgggatgggccaggtcctctcaggctactttctggatgtcatttttaaaatatggaaacatgcaggtgccttcccaaagaggcttggactggtatatccaacgagaaacaaataagctaaagaaagtttaaactcaagaagaaagatgttgacagtctatgtaacagctggaaagtttataggcacccacctttgggacaacccagtgattatgaacatgtgatatctactatttaaaagaaatgttctcaccttgggttgattgtggtataccatgtgttatgaaaattgttgagctgaagctttgaatcgatttagttgagtctgactcacttgctttggttcctgtgtattttactacccctcttgtcagtgaccttccttctttctcttatttcgggccggctact

SEQ ID NO: 95810 - DNA, 3057 bp, Homo sapiens
cggacgcgtgggtcgacccacgcggtcgggctggtctgctgggcagggcttacatccactgagttctaagattcctttcctgatctgcacctacgcctggtctgtatggtggaatttgtcagctggaactcagaaacaacaacttgaaaaaaaaataataattagaacatatttgcataagatagctatttactctggaaaccaacaacttttgagatttcccttgccctgtggacgcccagctcctgtcatccttccttaggtcctgcagtacagtcttcccctgaatgccaccggggacccagggggactccacccccctaagcaagcacacacatactcacagttgatgagttgctggtctttgagtcccagctctcttaccctccctttactccaccagcccgacgacccatgactgaggaggggatttctacagtctcaggatttagaaagtctgtaagccatccatgctccagaaagcaccgatctgttgtagttgcaaaaacaactctgtaatttgttgaggttctcaaactgacagccagcgagactgggtgggaggccctggatctgttctccctgactgcgggaggagcagccactaggactttagcaggaagcccacatggaggctccgccaggctgtggcccagctggtgatggcccttttgctcctggcagcctgaggcacagctgcctgtattgtcctcatctgttctgactgaaggatggaggtgctgaataaattaggcctcaggcctctaccaccagagagctggagaatgggtccacgtcattcaaggacctgaattttttatgctcaggagcattggaatcctcttcttccagggaggaattagcctgcaaggttaggacttgaagagggaaggtatttaataactgggcgaggatgggtgtggtggctcacacctgtaatcccagcattttgggaggctgaggtggccagatcccaaggtcagaagatcgagaccatcctggctaacatggtgaaaccccatctctactaaaaatacaaaaaaaaattagccgggggtggtggcgggtacctgtagtcctagctacttgggaggctgaggcaggagaatggcgtgaacctgggaggtggagcttgcagtgagccaagatcgtgccactgcactccagcctgggcgacagagcaagactccgtctcaaaaaataaaaaaaaaaaaaaaataggtgaaaattccttataaatccaggattggctctgagagaactggctaagattcaggaagaaacaaaaaattcagaatcctacaaggttttgatgacaattagggccaaaattttaggaggagatgtaggatgcaggagaaaattaaagtgttttctttatatcagaggaggaaatagtagaggtcagtgaaggtctggggtagggaaacattcagactgtccattgcatggctgtggagtgagactgcccttagcctgggtcagccttcctgggccataaattgggcatccgtgatgctaggtaactgtgggaacaaaatgacagcttagagcagccatgggtgatgtttggtggtaaaaaacctacaggcgtttggggtcccatgattgttccagaccatgactcttcctggttgtgggtttgttacagagcaggagaagcagaggttatgacagttatgcagactttccccctcctttttctcttttctcttccccttgcttttccactgtttcttcctgctgccacctgggccttgaattcctgggctgtgaagacatgtagcagctgcagggtttaccacacgtgggagggcagcccagtactgtccctctgccttccccactttgagaatatggcagcccctttcattcctggcttggggtaggggagaccattgaagtagaagcctcaaagcagacttttccctttactgtgtgtactccaggacgaagaaggaagatcatgcttgatacttagattggttttcccagggaagagggcggagcagagcaaagtcactgtgaaccctgggccaggccctggctgggccagctcctgagagcgtctcgtgttgcagacccttgcccacttcacccacctgcaccttctccccctctcacagtgtcactgctgctaatggtcaaagtcaaatgtgtggccacatgggatgggccaggtcctctcaggctactttctggatgtcatttttaaaatatggaaacatgcaggtgccttcccaaagaggcttggactggtatatccaacgagaaacaaataagctaaagaaagtttaaactcaagaagaaagatgttgacagtctatgtaacagctggaaagtttataggcacccacctttgggacaacccagtgattatgaacatgtgatatctactatttaaaagaaatgttctcaccttgggttgattgtggtataccatgtgttatgaaaattgttgagctgaagctttgaatcgatttagttgagtctgactcacttgctttggttcctgtgtattttactacccctcttgtcagtgaccttccttccccaccccacccagagtgaatttgtagcatgattgtataaacctctatgtagaaaatggagatttcttgctctgaaatgttaagctctaactgatccatttctgtgtcctttagcctagtatgtctgaacttccattcttgttatatatttaaactttccctctatattataggttttgtggcatccacggtcaggtgtagaggaagctgccccttgcagaactgtactgtaatatttttcttttataaatattttcacaggactgattgtacacagggcttgtaataaaattttaacactgtgctgtgaaacaactatggggaatctccattgaaggctacttcatgggcacctgaaagtggagtgttatagctatgactttctatttcttgtttcctaagtaaattaaacctaattttcaccctttcattctgtttcagcctcctgtataagaagtaccgtattttctgcccatcatactttgtaataaaacttgaacatgta

SEQ ID NO: 95811 - DNA, 3351 bp, Homo sapiens
ttccgagagggcggggcggcgtcccaaaacggaaggtggttgtcgtccgttcccaagctggtttgaaactaggggtcgggctcggccgtcgtcgttgtttgtcgccgcatccccgcttccgggttaggccgttcctgcccgccccctcctctcctcccttcggacccatagatctcaggctcggctccccgcccgccgcagcccactgttgacccggcccgtactgcggccccgtggccaccatgtccctgcacggcaaacggaaggagatctacaagtatgaagcgccctggacagtctacgcgatgaactggagtgtgcggcccgataagcgctttcgcttggcgctgggcagcttcgtggaggagtacaacaacaaggttcagcttgttggtttagatgaggagagttcagagtttatttgcagaaacaacaacttgaaaaaaaaataataattagaacatatttgcataagatagctatttactctggaaaccaacaacttttgagatttcccttgccctgtggacgcccagctcctgtcatccttccttaggtcctgcagtacagtcttcccctgaatgccaccggggacccagggggactccacccccctaagcaagcacacacatactcacagttgatgagttgctggtctttgagtcccagctctcttaccctccctttactccaccagcccgacgacccatgactgaggaggggatttctacagtctcaggatttagaaagtctgtaagccatccatgctccagaaagcaccgatctgttgtagttgcaaaaacaactctgtaatttgttgaggttctcaaactgacagccagcgagactgggtgggaggccctggatctgttctccctgactgcgggaggagcagccactaggactttagcaggaagcccacatggaggctccgccaggctgtggcccagctggtgatggcccttttgctcctggcagcctgaggcacagctgcctgtattgtcctcatctgttctgactgaaggatggaggtgctgaataaattaggcctcaggcctctaccaccagagagctggagaatgggtccacgtcattcaaggacctgaattttttatgctcaggagcattggaatcctcttcttccagggaggaattagcctgcaaggttaggacttgaagagggaaggtatttaataactgggcgaggatgggtgtggtggctcacacctgtaatcccagcattttgggaggctgaggtggccagatcccaaggtcagaagatcgagaccatcctggctaacatggtgaaaccccatctctactaaaaatacaaaaaaaaattagccgggggtggtggcgggtacctgtagtcctagctacttgggaggctgaggcaggagaatggcgtgaacctgggaggtggagcttgcagtgagccaagatcgtgccactgcactccagcctgggcgacagagcaagactccgtctcaaaaaataaaaaaaaaaaaaaaataggtgaaaattccttataaatccaggattggctctgagagaactggctaagattcaggaagaaacaaaaaattcagaatcctacaaggttttgatgacaattagggccaaaattttaggaggagatgtaggatgcaggagaaaattaaagtgttttctttatatcagaggaggaaatagtagaggtcagtgaaggtctggggtagggaaacattcagactgtccattgcatggctgtggagtgagactgcccttagcctgggtcagccttcctgggccataaattgggcatccgtgatgctaggtaactgtgggaacaaaatgacagcttagagcagccatgggtgatgtttggtggtaaaaaacctacaggcgtttggggtcccatgattgttccagaccatgactcttcctggttgtgggtttgttacagagcaggagaagcagaggttatgacagttatgcagactttccccctcctttttctcttttctcttccccttgcttttccactgtttcttcctgctgccacctgggccttgaattcctgggctgtgaagacatgtagcagctgcagggtttaccacacgtgggagggcagcccagtactgtccctctgccttccccactttgagaatatggcagcccctttcattcctggcttggggtaggggagaccattgaagtagaagcctcaaagcagacttttccctttactgtgtgtactccaggacgaagaaggaagatcatgcttgatacttagattggttttcccagggaagagggcggagcagagcaaagtcactgtgaaccctgggccaggccctggctgggccagctcctgagagcgtctcgtgttgcagacccttgcccacttcacccacctgcaccttctccccctctcacagtgtcactgctgctaatggtcaaagtcaaatgtgtggccacatgggatgggccaggtcctctcaggctactttctggatgtcatttttaaaatatggaaacatgcaggtgccttcccaaagaggcttggactggtatatccaacgagaaacaaataagctaaagaaagtttaaactcaagaagaaagatgttgacagtctatgtaacagctggaaagtttataggcacccacctttgggacaacccagtgattatgaacatgtgatatctactatttaaaagaaatgttctcaccttgggttgattgtggtataccatgtgttatgaaaattgttgagctgaagctttgaatcgatttagttgagtctgactcacttgctttggttcctgtgtattttactacccctcttgtcagtgaccttccttccccaccccacccagagtgaatttgtagcatgattgtataaacctctatgtagaaaatggagatttcttgctctgaaatgttaagctctaactgatccatttctgtgtcctttagcctagtatgtctgaacttccattcttgttatatatttaaactttccctctatattataggttttgtggcatccacggtcaggtgtagaggaagctgccccttgcagaactgtactgtaatatttttcttttataaatattttcacaggactgattgtacacagggcttgtaataaaattttaacactgtgctgtgaaacaactatggggaatctccattgaaggctacttcatgggcacctgaaagtggagtgttatagctatgactttctatttcttgtttcctaagtaaattaaacctaattttcaccctttcattctgtttcagcctcctgtataagaagtaccgtattttctgcccatcatactttgtaataaaacttgaacatgta

SEQ ID NO: 95812 - DNA, 1930 bp, Homo sapiens
aagatttgactaaggactcaagtggatcaaaccccaggcgttatttaatacgaacgggcagtactatacggtctaggtagcgaggctgggtggcgtgaaaattccttataaatccaggattggctctgagagaactggctaagattcaggaagaaacaaaaaattcagaatcctacaaggttttgatgacaattagggccaaaattttaggaggagatgtaggatgcaggagaaaattaaagtgttttctttatatcagaggaggaaatagtagaggtcagtgaaggtctggggtagggaaacattcagactgtccattgcatggctgtggagtgagactgcccttagcctgggtcagccttcctgggccataaattgggcatccgtgatgctaggtaactgtgggaacaaaatgacagcttagagcagccatgggtgatgtttggtggtaaaaaacctacaggcgtttggggtcccatgattgttccagaccatgactcttcctggttgtgggtttgttacagagcaggagaagcagaggttatgacagttatgcagactttccccctcctttttctcttttctcttccccttgcttttccactgtttcttcctgctgccacctgggccttgaattcctgggctgtgaagacatgtagcagctgcagggtttaccacacgtgggagggcagcccagtactgtccctctgccttccccactttgagaatatggcagcccctttcattcctggcttggggtaggggagaccattgaagtagaagcctcaaagcagacttttccctttactgtgtgtactccaggacgaagaaggaagatcatgcttgatacttagattggttttcccagggaagagggcggagcagagcaaagtcactgtgaaccctgggccaggccctggctgggccagctcctgagagcgtctcgtgttgcagacccttgcccacttcacccacctgcaccttctccccctctcacagtgtcactgctgctaatggtcaaagtcaaatgtgtggccacatgggatgggccaggtcctctcaggctactttctggatgtcatttttaaaatatggaaacatgcaggtgccttcccaaagaggcttggactggtatatccaacgagaaacaaataagctaaagaaagtttaaactcaagaagaaagatgttgacagtctatgtaacagctggaaagtttataggcacccacctttgggacaacccagtgattatgaacatgtgatatctactatttaaaagaaatgttctcaccttgggttgattgtggtataccatgtgttatgaaaattgttgagctgaagctttgaatcgatttagttgagtctgactcacttgctttggttcctgtgtattttactacccctcttgtcagtgaccttccttccccaccccacccagagtgaatttgtagcatgattgtataaacctctatgtagaaaatggagatttcttgctctgaaatgttaagctctaactgatccatttctgtgtcctttagcctagtatgtctgaacttccattcttgttatatatttaaactttccctctatattataggttttgtggcatccacggtcaggtgtagaggaagctgccccttgcagaactgtactgtaatatttttcttttataaatattttcacaggactgattgtacacagggcttgtaataaaattttaacactgtgctgtgaaacaactatggggaatctccattgaaggctacttcatgggcacctgaaagtggagtgttatagctatgactttctatttcttgtttcctaagtaaattaaacctaattttcaccctttcattctgtttcagcctcctgtataagaagtaccgtattttctgcccatcatactttgtaataaaacttgaacatgta

SEQ ID NO: 95813 - DNA, 1501 bp, Homo sapiens
ttccgagagggcggggcggcgtcccaaaacggaaggtggttgtcgtccgttcccaagctggtttgaaactaggggtcgggctcggccgtcgtcgttgtttgtcgccgcatccccgcttccgggttaggccgttcctgcccgccccctcctctcctcccttcggacccatagatctcaggctcggctccccgcccgccgcagcccactgttgacccggcccgtactgcggccccgtggccaccatgtccctgcacggcaaacggaaggagatctacaagtatgaagcgccctggacagtctacgcgatgaactggagtgtgcggcccgataagcgctttcgcttggcgctgggcagcttcgtggaggagtacaacaacaaggttcagcttgttggtttagatgaggagagttcagagtttatttgcagaaacacctttgaccacccataccccaccacaaagctcatgtggatccctgacacaaaaggcgtctatccagacctactggcaacaagcggtgactatctccgtgtgtggagggttggtgaaacagagaccaggctggagtgtttgctaaacaataataagaactctgatttctgtgctcccctgacctcctttgactggaatgaggtggatccttatcttttaggtacctcaagcattgatacgacatgcaccatctgggggctggagacagggcaggtgttagggcgagtgaatctcgtgtctggccacgtgaagacccagctgatcgcccatgacaaagaggtctatgatattgcatttagccgggccgggggtggcagggacatgtttgcctctgtgggtgctgatggctcggtgcggatgtttgacctccgccatctagaacacagcaccatcatttacgaagacccacagcatcacccactgcttcgcctctgctggaacaagcaggaccctaactacctggccaccatggccatggatggaatggaggtggtgattctagatgtccgggttccctgcacacctgtcgccaggttaaacaaccatcgagcatgtgtcaatggcattgcttgggccccacattcatcctgccacatctgcactgcagcggatgaccaccaggctctcatctgggacatccagcaaatgccccgagccattgaggaccctatcctggcctacacagctgaaggagagatcaacaatgtgcagtgggcatcaactcagcccgactggatcgccatctgctacaacaactgcctggagatactcagagtgtagtgttggtggcgctgtgcccacgaggcaggggcttttgtatttcctgcctctgccccacccccaaaattttaggactctggctggccatgtgcttgtggttgcctctcctgcatttgccactggatttgcactgcatcgtttggagatacaaagcgagcagttcttgcctcctgtataagaagtaccgtattttctgcccatcatactttgtaataaaacttgaacatgta

SEQ ID NO: 95814 - DNA, 909 bp, Homo sapiens
ttccgagagggcggggcggcgtcccaaaacggaaggtggttgtcgtccgttcccaagctggtttgaaactaggggtcgggctcggccgtcgtcgttgtttgtcgccgcatccccgcttccgggttaggccgttcctgcccgccccctcctctcctcccttcggacccatagatctcaggctcggctccccgcccgccgcagcccactgttgacccggcccgtactgcggccccgtggccaccatgtccctgcacggcaaacggaaggagatctacaagtatgaagcgccctggacagtctacgcgatgaactggagtgtgcggcccgataagcgctttcgcttggcgctgggcagcttcgtggaggagtacaacaacaaggttcagcttgttggtttagatgaggagagttcagagtttatttgcagaaacacctttgaccacccataccccaccacaaagctcatgtggatccctgacacaaaaggcgtctatccagacctactggcaacaagcggtgactatctccgtgtgtggagggttggtgaaacagagaccaggctggagtgtttgctaaacaataataagaactctgatttctgtgctcccctgacctcctttgactggaatgaggtggatccttatcttttaggtacctcaagcattgatacgacatgcaccatctgggggctggagacagggcaggtgttagggcgagtgaatctcgtgtctggccacgtgaagacccagctgatcgcccatgacaaagaggtctatgatattgcatttagccgggccgggggtggcagggaacccggacatctagaatcaccacctccattccatccatggccatggtggccaggtagttagggtcctgcttgttccagcagaggcgaagcagtgggtg

SEQ ID NO: 95815 - DNA, 6365 bp, Homo sapiens
ttccgagagggcggggcggcgtcccaaaacggaaggtggttgtcgtccgttcccaagctggtttgaaactaggggtcgggctcggccgtcgtcgttgtttgtcgccgcatccccgcttccgggttaggccgttcctgcccgccccctcctctcctcccttcggacccatagatctcaggctcggctccccgcccgccgcagcccactgttgacccggcccgtactgcggccccgtggccaccatgtccctgcacggcaaacggaaggagatctacaagtatgaagcgccctggacagtctacgcgatgaactggagtgtgcggcccgataagcgctttcgcttggcgctgggcagcttcgtggaggagtacaacaacaaggttcagcttgttggtttagatgaggagagttcagagtttatttgcagaaacacctttgaccacccataccccaccacaaagctcatgtggatccctgacacaaaaggcgtctatccagacctactggcaacaagcggtgactatctccgtgtgtggagggttggtgaaacagagaccaggctggagtgtttgctaaacaataataagaactctgatttctgtgctcccctgacctcctttgactggaatgaggtggatccttatcttttaggtacctcaagcattgatacgacatgcaccatctgggggctggagacagggcaggtgttagggcgagtgaatctcgtgtctggccacgtgaagacccagctgatcgcccatgacaaagaggtctatgatattgcatttagccgggccgggggtggcagggacatgtttgcctctgtgggtgctgatggctcggtgcggatgtttgacctccgccatctagaacacagcaccatcatttacgaagacccacagcatcacccactgcttcgcctctgctggaacaagcaggaccctaactacctggccaccatggccatggatggaatggaggtggtgattctagatgtccgggttccctgcacacctgtcgccaggttaaacaaccatcgagcatgtgtcaatggcattgcttgggccccacattcatcctgccacatctgcactgcagcggatgaccaccaggctctcatctgggacatccagcaaatgccccgagccattgaggaccctatcctggcctacacagctgaaggagagatcaacaatgtgcagtgggcatcaactcagcccgactggatcgccatctgctacaacaactgcctggagatactcagagtgtagtgttggtggcgctgtgcccacgaggcaggggcttttgtatttcctgcctctgccccacccccaaagtaagaagaaacatgtttccagtggccagtatgtctttcattgctttgcacccactgttaccagaagctgctctaggagttcctggccagtcaccccatcgccctctgtggcagactcagtgctgtgtggcgcctcctcagcccagggctgagttttaagattttctctcctttcctcttctcctttggttcctcaattaaaaaatgtgtgtatatttgtttgtcaggcgttgtgttgaggagcagttcacgcactggctgtgtctattcctctgcccaggtgtctctgtttgctgcccaaggcagcagttcatgtctcgtccatgtccatgttcgtgttagcacttacgtgggaacaaataccaatttgtcttttctcctagtatcagtgtgtttaacaaattttaactttgtatatttgttatctatcaggctaatttttttatgaaaagaattttactctcctgcttcatttctttgtcttatagtcctccctctttgcaccttcttctcttccctcagtgcctggagctggtactgggcccctggccccatgagcagtttgccttcttgagtcactgcctgtgtagtacatacctgaccgggagtccaaaccaccttggtgctctgaagtccactgactcatcacacctttcttagcctggctcctctcaagggcattctgggcttgtaaacagacataggaagcctctgtttaccctgaagcaccactgtccagcccattggttcccactggcagcatggtagagctgagagaaacaggctctcagggtacctgacttgaggggaatcgtttcatgaagctgaacttcaagcatatttccagtacattctttcagagtctgtttttccatccaaatataagccccaggccattccacttagtgtcttttcaatgataggcaagaatgatatctgagttgaacttcggtgcttctgttgtttgagtttactgtgcctggtggtatattgggcattctttggattgagtgttctgaggtgagagagtcttcccgaggcatcctgtctgtgcttccaaccctgaacaagaccttacatgagagatggactgatggactgcggcaatcctgggctgtcaagtggatagatagttaaaaagcattatactgtgggtaatgaaaagggaggaaaaaaaaagaaggaaaaggaattatagacccccagggtcagccagttaagagctctacccacacctgtcaacccctctctcccccagtttaggttctgagcagtattggacttgtagcctgcagttgtcttttgacttgcaggccgcaggtgtctttctgttatgtgaatgagttccatggaggggcatatgtgtgattccaccgttagatgagcccttggggcaggcagtttgggatgtgctcttgggggaaagttggctgtttccttgcgctctgctcctacccgaaggtttttaagtccctctgaattgctcatctgagattagtagagtagcaggcctgaaggatgatggttttgtcctctttggttctcacctgcttgagaagtaaaacagtaactttgttcttctgggcccttaagcttttttggttaagtcttccttttcagaagtagatgtcattatatgccaaaagtctagctctttgctttaccatacagggacctgtcccaaagaaaaaggctctttttttagccagcatatttccccttctacccttttactttgttgttctgattttaggactctggctggccatgtgcttgtggttgcctctcctgcatttgccactggatttgcactgcatcgtttggagatacaaagcgagcagttcttggtcagaaccctcctctgcttttcattgtgtttgataatggttactgggtccttctctcaagggtagcaaggccaagctgatggctgcttgtttaggaggccatcagttccttcctgtggagaagggtctgaaatggaagtcagtggtagaaggggctggtctgctgggcagggcttacatccactgagttctaagattcctttcctgatctgcacctacgcctggtctgtatggtggaatttgtcagctggaactcagaaacaacaacttgaaaaaaaaataataattagaacatatttgcataagatagctatttactctggaaaccaacaacttttgagatttcccttgccctgtggacgcccagctcctgtcatccttccttaggtcctgcagtacagtcttcccctgaatgccaccggggacccagggggactccacccccctaagcaagcacacacatactcacagttgatgagttgctggtctttgagtcccagctctcttaccctccctttactccaccagcccgacgacccatgactgaggaggggatttctacagtctcaggatttagaaagtctgtaagccatccatgctccagaaagcaccgatctgttgtagttgcaaaaacaactctgtaatttgttgaggttctcaaactgacagccagcgagactgggtgggaggccctggatctgttctccctgactgcgggaggagcagccactaggactttagcaggaagcccacatggaggctccgccaggctgtggcccagctggtgatggcccttttgctcctggcagcctgaggcacagctgcctgtattgtcctcatctgttctgactgaaggatggaggtgctgaataaattaggcctcaggcctctaccaccagagagctggagaatgggtccacgtcattcaaggacctgaattttttatgctcaggagcattggaatcctcttcttccagggaggaattagcctgcaaggttaggacttgaagagggaaggtatttaataactgggcgaggatgggtgtggtggctcacacctgtaatcccagcattttgggaggctgaggtggccagatcccaaggtcagaagatcgagaccatcctggctaacatggtgaaaccccatctctactaaaaatacaaaaaaaaattagccgggggtggtggcgggtacctgtagtcctagctacttgggaggctgaggcaggagaatggcgtgaacctgggaggtggagcttgcagtgagccaagatcgtgccactgcactccagcctgggcgacagagcaagactccgtctcaaaaaataaaaaaaaaaaaaaaataggtgaaaattccttataaatccaggattggctctgagagaactggctaagattcaggaagaaacaaaaaattcagaatcctacaaggttttgatgacaattagggccaaaattttaggaggagatgtaggatgcaggagaaaattaaagtgttttctttatatcagaggaggaaatagtagaggtcagtgaaggtctggggtagggaaacattcagactgtccattgcatggctgtggagtgagactgcccttagcctgggtcagccttcctgggccataaattgggcatccgtgatgctaggtaactgtgggaacaaaatgacagcttagagcagccatgggtgatgtttggtggtaaaaaacctacaggcgtttggggtcccatgattgttccagaccatgactcttcctggttgtgggtttgttacagagcaggagaagcagaggttatgacagttatgcagactttccccctcctttttctcttttctcttccccttgcttttccactgtttcttcctgctgccacctgggccttgaattcctgggctgtgaagacatgtagcagctgcagggtttaccacacgtgggagggcagcccagtactgtccctctgccttccccactttgagaatatggcagcccctttcattcctggcttggggtaggggagaccattgaagtagaagcctcaaagcagacttttccctttactgtgtgtactccaggacgaagaaggaagatcatgcttgatacttagattggttttcccagggaagagggcggagcagagcaaagtcactgtgaaccctgggccaggccctggctgggccagctcctgagagcgtctcgtgttgcagacccttgcccacttcacccacctgcaccttctccccctctcacagtgtcactgctgctaatggtcaaagtcaaatgtgtggccacatgggatgggccaggtcctctcaggctactttctggatgtcatttttaaaatatggaaacatgcaggtgccttcccaaagaggcttggactggtatatccaacgagaaacaaataagctaaagaaagtttaaactcaagaagaaagatgttgacagtctatgtaacagctggaaagtttataggcacccacctttgggacaacccagtgattatgaacatgtgatatctactatttaaaagaaatgttctcaccttgggttgattgtggtataccatgtgttatgaaaattgttgagctgaagctttgaatcgatttagttgagtctgactcacttgctttggttcctgtgtattttactacccctcttgtcagtgaccttccttccccaccccacccagagtgaatttgtagcatgattgtataaacctctatgtagaaaatggagatttcttgctctgaaatgttaagctctaactgatccatttctgtgtcctttagcctagtatgtctgaacttccattcttgttatatatttaaactttccctctatattataggttttgtggcatccacggtcaggtgtagaggaagctgccccttgcagaactgtactgtaatatttttcttttataaatattttcacaggactgattgtacacagggcttgtaataaaattttaacactgtgctgtgaaacaactatggggaatctccattgaaggctacttcatgggcacctgaaagtggagtgttatagctatgactttctatttcttgtttcctaagtaaattaaacctaattttcaccctttcattctgtttcagcctcctgtataagaagtaccgtattttctgcccatcatactttgtaataaaacttgaacatgta

SEQ ID NO: 95816 - DNA, 5613 bp, Homo sapiens
  misc_feature (5592)..(5592): n is a, c, g, or t
ttccgagagggcggggcggcgtcccaaaacggaaggtggttgtcgtccgttcccaagctggtttgaaactaggggtcgggctcggccgtcgtcgttgtttgtcgccgcatccccgcttccgggttaggccgttcctgcccgccccctcctctcctcccttcggacccatagatctcaggctcggctccccgcccgccgcagcccactgttgacccggcccgtactgcggccccgtggccaccatgtccctgcacggcaaacggaaggagatctacaagtatgaagcgccctggacagtctacgcgatgaactggagtgtgcggcccgataagcgctttcgcttggcgctgggcagcttcgtggaggagtacaacaacaaggttcagcttgttggtttagatgaggagagttcagagtttatttgcagaaacacctttgaccacccataccccaccacaaagctcatgtggatccctgacacaaaaggcgtctatccagacctactggcaacaagcggtgactatctccgtgtgtggagggttggtgaaacagagaccaggctggagtgtttgctaaacaataataagaactctgatttctgtgctcccctgacctcctttgactggaatgaggtggatccttatcttttaggtacctcaagcattgatacgacatgcaccatctgggggctggagacagggcaggtgttagggcgagtgaatctcgtgtctggccacgtgaagacccagctgatcgcccatgacaaagaggtctatgatattgcatttagccgggccgggggtggcagggacatgtttgcctctgtgggtgctgatggctcggtgcggatgtttgacctccgccatctagaacacagcaccatcatttacgaagacccacagcatcacccactgcttcgcctctgctggaacaagcaggaccctaactacctggccaccatggccatggatggaatggaggtggtgattctagatgtccgggttccctgcacacctgtcgccaggttaaacaaccatcgagcatgtgtcaatggcattgcttgggccccacattcatcctgccacatctgcactgcagcggatgaccaccaggctctcatctgggacatccagcaaatgccccgagccattgaggaccctatcctggcctacacagctgaaggagagatcaacaatgtgcagtgggcatcaactcagcccgactggatcgccatctgctacaacaactgcctggagatactcagagtgtagtgttggtggcgctgtgcccacgaggcaggggcttttgtatttcctgcctctgccccacccccaaagtaagaagaaacatgtttccagtggccagtatgtctttcattgctttgcacccactgttaccagaagctgctctaggagttcctggccagtcaccccatcgccctctgtggcagactcagtgctgtgtggcgcctcctcagcccagggctgagttttaagattttctctcctttcctcttctcctttggttcctcaattaaaaaatgtgtgtatatttgtttgtcaggcgttgtgttgaggagcagttcacgcactggctgtgtctattcctctgcccaggtgtctctgtttgctgcccaaggcagcagttcatgtctcgtccatgtccatgttcgtgttagcacttacgtgggaacaaataccaatttgtcttttctcctagtatcagtgtgtttaacaaattttaactttgtatatttgttatctatcaggctaatttttttatgaaaagaattttactctcctgcttcatttctttgtcttatagtcctccctctttgcaccttcttctcttccctcagtgcctggagctggtactgggcccctggccccatgagcagtttgccttcttgagtcactgcctgtgtagtacatacctgaccgggagtccaaaccaccttggtgctctgaagtccactgactcatcacacctttcttagcctggctcctctcaagggcattctgggcttgtaaacagacataggaagcctctgtttaccctgaagcaccactgtccagcccattggttcccactggcagcatggtagagctgagagaaacaggctctcagggtacctgacttgaggggaatcgtttcatgaagctgaacttcaagcatatttccagtacattctttcagagtctgtttttccatccaaatataagccccaggccattccacttagtgtcttttcaatgataggcaagaatgatatctgagttgaacttcggtgcttctgttgtttgagtttactgtgcctggtggtatattgggcattctttggattgagtgttctgaggtgagagagtcttcccgaggcatcctgtctgtgcttccaaccctgaacaagaccttacatgagagatggactgatggactgcggcaatcctgggctgtcaagtggatagatagttaaaaagcattatactgtgggtaatgaaaagggaggaaaaaaaaagaaggaaaaggaattatagacccccagggtcagccagttaagagctctacccacacctgtcaacccctctctcccccagtttaggttctgagcagtattggacttgtagcctgcagttgtcttttgacttgcaggccgcaggtgtctttctgttatgtgaatgagttccatggaggggcatatgtgtgattccaccgttagatgagcccttggggcaggcagtttgggatgtgctcttgggggaaagttggctgtttccttgcgctctgctcctacccgaaggtttttaagtccctctgaattgctcatctgagattagtagagtagcaggcctgaaggatgatggttttgtcctctttggttctcacctgcttgagaagtaaaacagtaactttgttcttctgggcccttaagcttttttggttaagtcttccttttcagaagtagatgtcattatatgccaaaagtctagctctttgctttaccatacagggacctgtcccaaagaaaaaggctctttttttagccagcatatttccccttctacccttttactttgttgttctgattttaggactctggctggccatgtgcttgtggttgcctctcctgcatttgccactggatttgcactgcatcgtttggagatacaaagcgagcagttcttggtcagaaccctcctctgcttttcattgtgtttgataatggttactgggtccttctctcaagggtagcaaggccaagctgatggctgcttgtttaggaggccatcagttccttcctgtggagaagggtctgaaatggaagtcagtggtagaaggggctggtctgctgggcagggcttacatccactgagttctaagattcctttcctgatctgcacctacgcctggtctgtatggtggaatttgtcagctggaactcagaaacaacaacttgaaaaaaaaataataattagaacatatttgcataagatagctatttactctggaaaccaacaacttttgagatttcccttgccctgtggacgcccagctcctgtcatccttccttaggtcctgcagtacagtcttcccctgaatgccaccggggacccagggggactccacccccctaagcaagcacacacatactcacagttgatgagttgctggtctttgagtcccagctctcttaccctccctttactccaccagcccgacgacccatgactgaggaggggatttctacagtctcaggatttagaaagtctgtaagccatccatgctccagaaagcaccgatctgttgtagttgcaaaaacaactctgtaatttgttgaggttctcaaactgacagccagcgagactgggtgggaggccctggatctgttctccctgactgcgggaggagcagccactaggactttagcaggaagcccacatggaggctccgccaggctgtggcccagctggtgatggcccttttgctcctggcagcctgaggcacagctgcctgtattgtcctcatctgttctgactgaaggatggaggtgctgaataaattaggcctcaggcctctaccaccagagagctggagaatgggtccacgtcattcaaggacctgaattttttatgctcaggagcattggaatcctcttcttccagggaggaattagcctgcaaggttaggacttgaagagggaaggtatttaataactgggcgaggatgggtgtggtggctcacacctgtaatcccagcattttgggaggctgaggtggccagatcccaaggtcagaagatcgagaccatcctggctaacatggtgaaaccccatctctactaaaaatacaaaaaaaaattagccgggggtggtggcgggtacctgtagtcctagctacttgggaggctgaggcaggagaatggcgtgaacctgggaggtggagcttgcagtgagccaagatcgtgccactgcactccagcctgggcgacagagcaagactccgtctcaaaaaataaaaaaaaaaaaaaaataggtgaaaattccttataaatccaggattggctctgagagaactggctaagattcaggaagaaacaaaaaattcagaatcctacaaggttttgatgacaattagggccaaaattttaggaggagatgtaggatgcaggagaaaattaaagtgttttctttatatcagaggaggaaatagtagaggtcagtgaaggtctggggtagggaaacattcagactgtccattgcatggctgtggagtgagactgcccttagcctgggtcagccttcctgggccataaattgggcatccgtgatgctaggtaactgtgggaacaaaatgacagcttagagcagccatgggtgatgtttggtggtaaaaaacctacaggcgtttggggtcccatgattgttccagaccatgactcttcctggttgtgggtttgttacagagcaggagaagcagaggttatgacagttatgcagactttccccctcctttttctcttttctcttccccttgcttttccactgtttcttcctgctgccacctgggccttgaattcctgggctgtgaagacatgtagcagctgcagggtttaccacacgtgggagggcagcccagtactgtccctctgccttccccactttgagaatatggcagcccctttcattcctggcttggggtaggggagaccattgaagtagaagcctcaaagcagacttttccctttactgtgtgtactccaggacgaagaaggaagatcatgcttgatacttagattggttttcccagggaagagggcggagcagagcaaagtcactgtgaaccctgggccaggccctggctgggccagctcctgagagcgtctcgtgttgcagacctgccatttacactgactttccccttaaagtgtatgtgtaatgtcaagttatgtggggccatgatggagggcctaggtaatggagtatttaattggaaggggtgttccaaagggggtgttcaaggaagtgtaaggtaatcaaaagtggggtgtgaggagttgcctggacggttaagttaaaagcggggagggaaagtatgnaaggtgtttgagggatatgta

SEQ ID NO: 95817 - DNA, 1575 bp, Homo sapiens
ttccgagagggcggggcggcgtcccaaaacggaaggtggttgtcgtccgttcccaagctggtttgaaactaggggtcgggctcggccgtcgtcgttgtttgtcgccgcatccccgcttccgggttaggccgttcctgcccgccccctcctctcctcccttcggacccatagatctcaggctcggctccccgcccgccgcagcccactgttgacccggcccgtactgcggccccgtggccaccatgtccctgcacggcaaacggaaggagatctacaagtatgaagcgccctggacagtctacgcgatgaactggagtgtgcggcccgataagcgctttcgcttggcgctgggcagcttcgtggaggagtacaacaacaaggttcagcttgttggtttagatgaggagagttcagagtttatttgcagaaacacctttgaccacccataccccaccacaaagctcatgtggatccctgacacaaaaggcgtctatccagacctactggcaacaagcggtgactatctccgtgtgtggagggttggtgaaacagagaccaggctggagtgtttgctaaacaataataagaactctgatttctgtgctcccctgacctcctttgactggaatgaggtggatccttatcttttaggtacctcaagcattgatacgacatgcaccatctgggggctggagacagggcaggtgttagggcgagtgaatctcgtgtctggccacgtgaagacccagctgatcgcccatgacaaagaggtctatgatattgcatttagccgggccgggggtggcagggacatgtttgcctctgtgggtgctgatggctcggtgcggatgtttgacctccgccatctagaacacagcaccatcatttacgaagacccacagcatcacccactgcttcgcctctgctggaacaagcaggaccctaactacctggccaccatggccatggatggaatggaggtggtgattctagatgtccgggttccctgcacacctgtcgccaggttaaacaaccatcgagcatgtgtcaatggcattgcttgggccccacattcatcctgccacatctgcactgcagcggatgaccaccaggctctcatctgggacatccagcaaatgccccgagccattgaggaccctatcctggcctacacagctgaaggagagatcaacaatgtgcagtgggcatcaactcagcccgactggatcgccatctgctacaacaactgcctggagatactcagagtgtagtgttggtggcgctgtgcccacgaggcaggggcttttgtatttcctgcctctgccccacccccaaacctcctgtataagaagtaccgtattttctgcccatcatactttgtaataaaacttgaacatgtaaaaacagaaacaaataaagacacacaacaaaaaaaacaaacgggggcgtgccgccaatagaaatacacccagggccccagtgactacacgtccccgttttttttgataaagaggacccaaaaagggagccagaaaaacaacaccggccccgtttcaaacgctaactgggaaaatg

SEQ ID NO: 95818 - DNA, 1757 bp, Homo sapiens
ttccgagagggcggggcggcgtcccaaaacggaaggtggttgtcgtccgttcccaagctggtttgaaactaggggtcgggctcggccgtcgtcgttgtttgtcgccgcatccccgcttccgggttaggccgttcctgcccgccccctcctctcctcccttcggacccatagatctcaggctcggctccccgcccgccgcagcccactgttgacccggcccgtactgcggccccgtggccaccatgtccctgcacggcaaacggaaggagatctacaagtatgaagcgccctggacagtctacgcgatgaactggagtgtgcggcccgataagcgctttcgcttggcgctgggcagcttcgtggaggagtacaacaacaaggttcagcttgttggtttagatgaggagagttcagagtttatttgcagaaacacctttgaccacccataccccaccacaaagctcatgtggatccctgacacaaaaggcgtctatccagacctactggcaacaagcggtgactatctccgtgtgtggagggttggtgaaacagagaccaggctggagtgtttgctaaacaataataagaactctgatttctgtgctcccctgacctcctttgactggaatgaggtggatccttatcttttaggtacctcaagcattgatacgacatgcaccatctgggggctggagacagggcaggtgttagggcgagtgaatctcgtgtctggccacgtgaagacccagctgatcgcccatgacaaagaggtctatgatattgcatttagccgggccgggggtggcagggacatgtttgcctctgtgggtgctgatggctcggtgcggatgtttgacctccgccatctagaacacagcaccatcatttacgaagacccacagcatcacccactgcttcgcctctgctggaacaagcaggaccctaactacctggccaccatggccatggatggaatggaggtggtgattctagatgtccgggttccctgcacacctgtcgccaggttaaacaaccatcgagcatgtgtcaatggcattgcttgggccccacattcatcctgccacatctgcactgcaggtaatcatggtggggagaaagaaatctgggaaggatggaggaaatctgttctcttggctccttagaattgtagttgttactgttttctaagcacagtcttgagagatttatacaaaatgactagttggagcctctccacacttgtgaaattcaatcagtacaaatttttagacgatcttgtaccctcatggacatcagaacatcttccatatatgatttacatcatgtgtcagttatagggctgtgccttgtactgtgcccctgaaatctggatggcacagaggactcaattccaggaatatggggaaagggaggcatccctcatggatataacagaatctttgggactgtgaagatcaacatctccatgggacctttcaggtttcactataacaaacccacagtgtgctctggatgcatcggagggccccacagaactttgcctggttgtggtttgtgacttgtggttttcatttcactgtttcccagaccaaagctagcaccccttacgggctgggtgcagtggcacgcacctgtagtccaagctacttaggaggctgaggcaggagaagcacttcaacccaggaggtggaggttgcattgaccagagattatgccactgccctccagccagggcaacagagcaagactctgtctcc

SEQ ID NO: 95819 - DNA, 3015 bp, Homo sapiens
  misc_feature (2583)..(2583): n is a, c, g, or t
  misc_feature (2585)..(2585): n is a, c, g, or t
gaggggcgggggcggagacagtgggcgggggcgggcgggggcgctgtgaggcccggagggggtgtgtgcggggggccggaggcggcggctgtcagagtcggctcagcctgcgccggggaacatcggccgcctccagctcccggcgcggcccggcccggcccggctcggccgcctcagacgccgcctgccctgcagccatgaggcccccgcagtgtctgctgcacacgccttccctggcttccccactccttctcctcctcctctggctcctgggtggaggagtgggggctgagggccgggaggatgcagagctgctggtgacggtgcgtgggggccggctgcggggcattcgcctgaagacccccgggggccctgtctctgctttcctgggcatcccctttgcggagccacccatgggaccccgtcgctttctgccaccggagcccaagcagccttggtcaggggtggtagacgctacaaccttccagagtgtctgctaccaatatgtggacaccctatacccaggttttgagggcaccgagatgtggaaccccaaccgtgagctgagcgaggactgcctgtacctcaacgtgtggacaccatacccccggcctacatcccccacccctgtcctcgtctggatctatgggggtggcttctacagtggggcctcctccttggacgtgtacgatggccgcttcttggtacaggccgagaggactgtgctggtgtccatgaactaccgggtgggagcctttggcttcctggccctgccggggagccgagaggccccgggcaatgtgggtctcctggatcagaggctggccctgcagtgggtgcaggagaacgtggcagccttcgggggtgacccgacatcagtgacgctgtttggggagagcgcgggagccgcctcggtgggcatgcacctgctgtccccgcccagccggggcctgttccacagggccgtgctgcagagcggtgcccccaatggaccctgggccacggtgggcatgggagaggcccgtcgcagggccacgcagctggcccaccttgtgggctgtcctccaggcggcactggtgggaatgacacagagctggtagcctgccttcggacacgaccagcgcaggtcctggtgaaccacgaatggcacgtgctgcctcaagaaagcgtcttccggttctccttcgtgcctgtggtagatggagacttcctcagtgacaccccagaggccctcatcaacgcgggagacttccacggcctgcaggtgctggtgggtgtggtgaaggatgagggctcgtattttctggtttacggggccccaggcttcagcaaagacaacgagtctctcatcagccgggccgagttcctggccggggtgcgggtcggggttccccaggtaagtgacctggcagccgaggctgtggtcctgcattacacagactggctgcatcccgaggacccggcacgcctgagggaggccctgagcgatgtggtgggcgaccacaatgtcgtgtgccccgtggcccagctggctgggcgactggctgcccagggtgcccgggtctacgcctacgtctttgaacaccgtgcttccacgctctcctggcccctgtggatgggggtgccccacggctacgagatcgagttcatctttgggatccccctggacccctctcgaaactacacggcagaggagaaaatcttcgcccagcgactgatgcgatactgggccaactttgcccgcacaggggatcccaatgagccccgagaccccaaggccccacaatggcccccgtacacggcgggggctcagcagtacgttagtctggacctgcggccgctggaggtgcggcgggggctgcgcgcccaggcctgcgccttctggaaccgcttcctccccaaattgctcagcgccaccgcctcggaggctcccagcacctgcccaggcttcacccatggggaggctgctccgaggcccggcctccccctgcccctcctcctcctccaccagcttctcctcctcttcctctcccacctccggcggctgtgaacacggcctcttcccctacggccacaggggcccctcctctaatgagtggtcggaccgtggggaagggccccactcagggatctcagacctagtgctcccttcctcctcaaaccgagagactcacactggacagggcaggaggagggggccgtgcctcccacccttctcagggacccccacgcctttgttgtttgaatggaaatggaaaagccagtattcttttataaaattatcttttggaacctgagcctgacattggggggaagtgggaggccccggacggggtagcaccccccattggggctataacggtcaaccatttctgtctcttctttttcccccaacctccccctcctgtcccctctgttcccgtcttccggtcattcttttctcctcctctctccttcctgctgtccttctccggccccgcctctgccctcatcctccctctcgtctttcgcacattctcctgatcctcttgccaccgtcccacgtggtcgcctgcatttctccgtgcgtcctccctgcactnanacccccccttcaacccgcccaaatgtccgatccccgaccttcctcgtgccgtcctcccctcccgcctcgctgggcgccctggccgcagacacgctcgacgaggcggagcgccagtggaaggccgagttccaccgctggagctcctacatggtgcactggaagaaccagttcgaccactacagcaagcaggatcgctgctcagacctgtgaccccggcgggacccccatgtcctccgctccgcccggccccctagctgtatatactatttatttcagggctgggctataacacagacgagccccagactctgcccatccccaccccaccccgacgtcccccggggctcccggtcctctgcatgtctcaggctgagctccctcccccgcggtgccttcgcccctctgggctgccaataaactgttacaggcc

SEQ ID NO: 95820 - DNA, 2262 bp, Homo sapiens
gaggggcgggggcggagacagtgggcgggggcgggcgggggcgctgtgaggcccggagggggtgtgtgcggggggccggaggcggcggctgtcagagtcggctcagcctgcgccggggaacatcggccgcctccagctcccggcgcggcccggcccggcccggctcggccgcctcagacgccgcctgccctgcagccatgaggcccccgcagtgtctgctgcacacgccttccctggcttccccactccttctcctcctcctctggctcctgggtggaggagtgggggctgagggccgggaggatgcagagctgctggtgacggtgcgtgggggccggctgcggggcattcgcctgaagacccccgggggccctgtctctgctttcctgggcatcccctttgcggagccacccatgggaccccgtcgctttctgccaccggagcccaagcagccttggtcaggggtggtagacgctacaaccttccagagtgtctgctaccaatatgtggacaccctatacccaggttttgagggcaccgagatgtggaaccccaaccgtgagctgagcgaggactgcctgtacctcaacgtgtggacaccatacccccggcctacatcccccacccctgtcctcgtctggatctatgggggtggcttctacagtggggcctcctccttggacgtgtacgatggccgcttcttggtacaggccgagaggactgtgctggtgtccatgaactaccgggtgggagcctttggcttcctggccctgccggggagccgagaggccccgggcaatgtgggtctcctggatcagaggctggccctgcagtgggtgcaggagaacgtggcagccttcgggggtgacccgacatcagtgacgctgtttggggagagcgcgggagccgcctcggtgggcatgcacctgctgtccccgcccagccggggcctgttccacagggccgtgctgcagagcggtgcccccaatggaccctgggccacggtgggcatgggagaggcccgtcgcagggccacgcagctggcccaccttgtgggctgtcctccaggcggcactggtgggaatgacacagagctggtagcctgccttcggacacgaccagcgcaggtcctggtgaaccacgaatggcacgtgctgcctcaagaaagcgtcttccggttctccttcgtgcctgtggtagatggagacttcctcagtgacaccccagaggccctcatcaacgcgggagacttccacggcctgcaggtgctggtgggtgtggtgaaggatgagggctcgtattttctggtttacggggccccaggcttcagcaaagacaacgagtctctcatcagccgggccgagttcctggccggggtgcgggtcggggttccccaggtaagtgacctggcagccgaggctgtggtcctgcattacacagactggctgcatcccgaggacccggcacgcctgagggaggccctgagcgatgtggtgggcgaccacaatgtcgtgtgccccgtggcccagctggctgggcgactggctgcccagggtgcccgggtctacgcctacgtctttgaacaccgtgcttccacgctctcctggcccctgtggatgggggtgccccacggctacgagatcgagttcatctttgggatccccctggacccctctcgaaactacacggcagaggagaaaatcttcgcccagcgactgatgcgatactgggccaactttgcccgcacaggggatcccaatgagccccgagaccccaaggccccacaatggcccccgtacacggcgggggctcagcagtacgttagtctggacctgcggccgctggaggtgcggcgggggctgcgcgcccaggcctgcgccttctggaaccgcttcctccccaaattgctcagcgccaccgacacgctcgacgaggcggagcgccagtggaaggccgagttccaccgctggagctcctacatggtgcactggaagaaccagttcgaccactacagcaagcaggatcgctgctcagacctgtgaccccggcgggacccccatgtcctccgctccgcccggccccctagctgtatatactatttatttcagggctgggctataacacagacgagccccagactctgcccatccccaccccaccccgacgtcccccggggctcccggtcctctgcatgtctcaggctgagctccctcccccgcggtgccttcgcccctctgggctgccaataaactgttacaggcc

SEQ ID NO: 95821 - DNA, 2221 bp, Homo sapiens
ctctcccctcatctttgccaacctgccccacctcctctgcagctgagcgataacccttgggccgacagtgccctaatctcctccctcctggcttctcgaccgacccttcaccctttccctttctttctcccagcagacgccgcctgccctgcagccatgaggcccccgcagtgtctgctgcacacgccttccctggcttccccactccttctcctcctcctctggctcctgggtggaggagtgggggctgagggccgggaggatgcagagctgctggtgacggtgcgtgggggccggctgcggggcattcgcctgaagacccccgggggccctgtctctgctttcctgggcatcccctttgcggagccacccatgggaccccgtcgctttctgccaccggagcccaagcagccttggtcaggggtggtagacgctacaaccttccagagtgtctgctaccaatatgtggacaccctatacccaggttttgagggcaccgagatgtggaaccccaaccgtgagctgagcgaggactgcctgtacctcaacgtgtggacaccatacccccggcctacatcccccacccctgtcctcgtctggatctatgggggtggcttctacagtggggcctcctccttggacgtgtacgatggccgcttcttggtacaggccgagaggactgtgctggtgtccatgaactaccgggtgggagcctttggcttcctggccctgccggggagccgagaggccccgggcaatgtgggtctcctggatcagaggctggccctgcagtgggtgcaggagaacgtggcagccttcgggggtgacccgacatcagtgacgctgtttggggagagcgcgggagccgcctcggtgggcatgcacctgctgtccccgcccagccggggcctgttccacagggccgtgctgcagagcggtgcccccaatggaccctgggccacggtgggcatgggagaggcccgtcgcagggccacgcagctggcccaccttgtgggctgtcctccaggcggcactggtgggaatgacacagagctggtagcctgccttcggacacgaccagcgcaggtcctggtgaaccacgaatggcacgtgctgcctcaagaaagcgtcttccggttctccttcgtgcctgtggtagatggagacttcctcagtgacaccccagaggccctcatcaacgcgggagacttccacggcctgcaggtgctggtgggtgtggtgaaggatgagggctcgtattttctggtttacggggccccaggcttcagcaaagacaacgagtctctcatcagccgggccgagttcctggccggggtgcgggtcggggttccccaggtaagtgacctggcagccgaggctgtggtcctgcattacacagactggctgcatcccgaggacccggcacgcctgagggaggccctgagcgatgtggtgggcgaccacaatgtcgtgtgccccgtggcccagctggctgggcgactggctgcccagggtgcccgggtctacgcctacgtctttgaacaccgtgcttccacgctctcctggcccctgtggatgggggtgccccacggctacgagatcgagttcatctttgggatccccctggacccctctcgaaactacacggcagaggagaaaatcttcgcccagcgactgatgcgatactgggccaactttgcccgcacaggggatcccaatgagccccgagaccccaaggccccacaatggcccccgtacacggcgggggctcagcagtacgttagtctggacctgcggccgctggaggtgcggcgggggctgcgcgcccaggcctgcgccttctggaaccgcttcctccccaaattgctcagcgccaccgacacgctcgacgaggcggagcgccagtggaaggccgagttccaccgctggagctcctacatggtgcactggaagaaccagttcgaccactacagcaagcaggatcgctgctcagacctgtgaccccggcgggacccccatgtcctccgctccgcccggccccctagctgtatatactatttatttcagggctgggctataacacagacgagccccagactctgcccatccccaccccaccccgacgtcccccggggctcccggtcctctgcatgtctcaggctgagctccctcccccgcggtgccttcgcccctctgggctgccaataaactgttacaggcc

SEQ ID NO: 95822 - DNA, 2608 bp, Homo sapiens
gaggggcgggggcggagacagtgggcgggggcgggcgggggcgctgtgaggcccggagggggtgtgtgcggggggccggaggcggcggctgtcagagtcggctcagcctgcgccggggaacatcggccgcctccagctcccggcgcggcccggcccggcccggctcggccgcctcagacgccgcctgccctgcagccatgaggcccccgcagtgtctgctgcacacgccttccctggcttccccactccttctcctcctcctctggctcctgggtggaggagtgggggctgagggccgggaggatgcagagctgctggtgacggtgcgtgggggccggctgcggggcattcgcctgaagacccccgggggccctgtctctgctttcctgggcatcccctttgcggagccacccatgggaccccgtcgctttctgccaccggagcccaagcagccttggtcaggggtggtagacgctacaaccttccagagtgtctgctaccaatatgtggacaccctatacccaggttttgagggcaccgagatgtggaaccccaaccgtgagctgagcgaggactgcctgtacctcaacgtgtggacaccatacccccggcctacatcccccacccctgtcctcgtctggatctatgggggtggcttctacagtggggcctcctccttggacgtgtacgatggccgcttcttggtacaggccgagaggactgtgctggtgtccatgaactaccgggtgggagcctttggcttcctggccctgccggggagccgagaggccccgggcaatgtgggtctcctggatcagaggctggccctgcagtgggtgcaggagaacgtggcagccttcgggggtgacccgacatcagtgacgctgtttggggagagcgcgggagccgcctcggtgggcatgcacctgctgtccccgcccagccggggcctgttccacagggccgtgctgcagagcggtgcccccaatggaccctgggccacggtgggcatgggagaggcccgtcgcagggccacgcagctggcccaccttgtgggctgtcctccaggcggcactggtgggaatgacacagagctggtagcctgccttcggacacgaccagcgcaggtcctggtgaaccacgaatggcacgtgctgcctcaagaaagcgtcttccggttctccttcgtgcctgtggtagatggagacttcctcagtgacaccccagaggccctcatcaacgcgggagacttccacggcctgcaggtaactagtggctagctggcgtgaagctggctcctctgggtcccaacggtccctcccctccctgcagggacccaggcatgagggcttctccaggcccattcccagaagtcccagaagtcctccctgagggctcagatcccagggtggtcagcagggcagacaggaaagccaccatgggtctattttctctttctctgcatccctcccctgatctcgtcctctctctgtccatggttccgggtctgtaactgttcatctctctggctctttgtctgtccatctgtttctgtctacttgtctgtctgtgcctgtcgctccatcccacccccctctccctcacccccaggtgctggtgggtgtggtgaaggatgagggctcgtattttctggtttacggggccccaggcttcagcaaagacaacgagtctctcatcagccgggccgagttcctggccggggtgcgggtcggggttccccaggtaagtgacctggcagccgaggctgtggtcctgcattacacagactggctgcatcccgaggacccggcacgcctgagggaggccctgagcgatgtggtgggcgaccacaatgtcgtgtgccccgtggcccagctggctgggcgactggctgcccagggtgcccgggtctacgcctacgtctttgaacaccgtgcttccacgctctcctggcccctgtggatgggggtgccccacggctacgagatcgagttcatctttgggatccccctggacccctctcgaaactacacggcagaggagaaaatcttcgcccagcgactgatgcgatactgggccaactttgcccgcacaggggatcccaatgagccccgagaccccaaggccccacaatggcccccgtacacggcgggggctcagcagtacgttagtctggacctgcggccgctggaggtgcggcgggggctgcgcgcccaggcctgcgccttctggaaccgcttcctccccaaattgctcagcgccaccgacacgctcgacgaggcggagcgccagtggaaggccgagttccaccgctggagctcctacatggtgcactggaagaaccagttcgaccactacagcaagcaggatcgctgctcagacctgtgaccccggcgggacccccatgtcctccgctccgcccggccccctagctgtatatactatttatttcagggctgggctataacacagacgagccccagactctgcccatccccaccccaccccgacgtcccccggggctcccggtcctctgcatgtctcaggctgagctccctcccccgcggtgccttcgcccctctgggctgccaataaactgttacaggcc

SEQ ID NO: 95823 - DNA, 3321 bp, Homo sapiens
  misc_feature (2889)..(2889): n is a, c, g, or t
  misc_feature (2891)..(2891): n is a, c, g, or t
gaggggcgggggcggagacagtgggcgggggcgggcgggggcgctgtgaggcccggagggggtgtgtgcggggggccggaggcggcggctgtcagagtcggctcagcctgcgccggggaacatcggccgcctccagctcccggcgcggcccggcccggcccggctcggccgcctcagacgccgcctgccctgcagccatgaggcccccgcagtgtctgctgcacacgccttccctggcttccccactccttctcctcctcctctggctcctgggtggaggagtgggggctgagggccgggaggatgcagagctgctggtgacggtgcgtgggggccggctgcggggcattcgcctgaagacccccgggggccctgtctctgctttcctgggcatcccctttgcggagccacccatgggaccccgtcgctttctgccaccggagcccaagcagccttggtcaggggtggtagacgctacaaccttccagagtgtctgctaccaatatgtggacaccctatacccaggttttgagggcaccgagatgtggaaccccaaccgtgagctgagcgaggactgcctgtacctcaacgtgtggacaccatacccccggcctacatcccccacccctgtcctcgtctggatctatgggggtggcttctacagtggggcctcctccttggacgtgtacgatggccgcttcttggtacaggccgagaggactgtgctggtgtccatgaactaccgggtgggagcctttggcttcctggccctgccggggagccgagaggccccgggcaatgtgggtctcctggatcagaggctggccctgcagtgggtgcaggagaacgtggcagccttcgggggtgacccgacatcagtgacgctgtttggggagagcgcgggagccgcctcggtgggcatgcacctgctgtccccgcccagccggggcctgttccacagggccgtgctgcagagcggtgcccccaatggaccctgggccacggtgggcatgggagaggcccgtcgcagggccacgcagctggcccaccttgtgggctgtcctccaggcggcactggtgggaatgacacagagctggtagcctgccttcggacacgaccagcgcaggtcctggtgaaccacgaatggcacgtgctgcctcaagaaagcgtcttccggttctccttcgtgcctgtggtagatggagacttcctcagtgacaccccagaggccctcatcaacgcgggagacttccacggcctgcaggtaactagtggctagctggcgtgaagctggctcctctgggtcccaacggtccctcccctccctgcagggacccaggcatgagggcttctccaggcccattcccagaagtcccagaagtcctccctgagggctcagatcccagggtggtcagcagggcagacaggaaagccaccatgggtctattttctctttctctgcatccctcccctgatctcgtcctctctctgtccatggttccgggtctgtaactgttcatctctctggctctttgtctgtccatctgtttctgtctacttgtctgtctgtgcctgtcgctccatcccacccccctctccctcacccccaggtgctggtgggtgtggtgaaggatgagggctcgtattttctggtttacggggccccaggcttcagcaaagacaacgagtctctcatcagccgggccgagttcctggccggggtgcgggtcggggttccccaggtaagtgacctggcagccgaggctgtggtcctgcattacacagactggctgcatcccgaggacccggcacgcctgagggaggccctgagcgatgtggtgggcgaccacaatgtcgtgtgccccgtggcccagctggctgggcgactggctgcccagggtgcccgggtctacgcctacgtctttgaacaccgtgcttccacgctctcctggcccctgtggatgggggtgccccacggctacgagatcgagttcatctttgggatccccctggacccctctcgaaactacacggcagaggagaaaatcttcgcccagcgactgatgcgatactgggccaactttgcccgcacaggggatcccaatgagccccgagaccccaaggccccacaatggcccccgtacacggcgggggctcagcagtacgttagtctggacctgcggccgctggaggtgcggcgggggctgcgcgcccaggcctgcgccttctggaaccgcttcctccccaaattgctcagcgccaccgcctcggaggctcccagcacctgcccaggcttcacccatggggaggctgctccgaggcccggcctccccctgcccctcctcctcctccaccagcttctcctcctcttcctctcccacaggggcccctcctctaatgagtggtcggaccgtggggaagggccccactcagggatctcagacctagtgctcccttcctcctcaaaccgagagactcacactggacagggcaggaggagggggccgtgcctcccacccttctcagggacccccacgcctttgttgtttgaatggaaatggaaaagccagtattcttttataaaattatcttttggaacctgagcctgacattggggggaagtgggaggccccggacggggtagcaccccccattggggctataacggtcaaccatttctgtctcttctttttcccccaacctccccctcctgtcccctctgttcccgtcttccggtcattcttttctcctcctctctccttcctgctgtccttctccggccccgcctctgccctcatcctccctctcgtctttcgcacattctcctgatcctcttgccaccgtcccacgtggtcgcctgcatttctccgtgcgtcctccctgcactnanacccccccttcaacccgcccaaatgtccgatccccgaccttcctcgtgccgtcctcccctcccgcctcgctgggcgccctggccgcagacacgctcgacgaggcggagcgccagtggaaggccgagttccaccgctggagctcctacatggtgcactggaagaaccagttcgaccactacagcaagcaggatcgctgctcagacctgtgaccccggcgggacccccatgtcctccgctccgcccggccccctagctgtatatactatttatttcagggctgggctataacacagacgagccccagactctgcccatccccaccccaccccgacgtcccccggggctcccggtcctctgcatgtctcaggctgagctccctcccccgcggtgccttcgcccctctgggctgccaataaactgttacaggcc

SEQ ID NO: 95824 - DNA, 2455 bp, Homo sapiens
ctccaggaagcaggcgccgcgcggtattgccgcatgcacctcggtcgtggggaccccgctgcagcagccctgtccacacgggtgaactcctggagggcggggcggggggcaatctgcgcgggtcaggcccctcggagcaggctgggggcgcccgagccaggccgctcccacctgccagccgcgtggccaatgaatgctaggcctggtgatgtcatgccccgaccggaccctggtgacgaaagtccgaagtcacccgtcagggaaccagcacagacccacccgcgggggttccagaagtttccactgccgccgcggagtgcgcctcgcccagcagccttgcgcgtgctaccacgctgtcctgccttctcagacgccgcctgccctgcagccatgaggcccccgcagtgtctgctgcacacgccttccctggcttccccactccttctcctcctcctctggctcctgggtggaggagtgggggctgagggccgggaggatgcagagctgctggtgacggtgcgtgggggccggctgcggggcattcgcctgaagacccccgggggccctgtctctgctttcctgggcatcccctttgcggagccacccatgggaccccgtcgctttctgccaccggagcccaagcagccttggtcaggggtggtagacgctacaaccttccagagtgtctgctaccaatatgtggacaccctatacccaggttttgagggcaccgagatgtggaaccccaaccgtgagctgagcgaggactgcctgtacctcaacgtgtggacaccatacccccggcctacatcccccacccctgtcctcgtctggatctatgggggtggcttctacagtggggcctcctccttggacgtgtacgatggccgcttcttggtacaggccgagaggactgtgctggtgtccatgaactaccgggtgggagcctttggcttcctggccctgccggggagccgagaggccccgggcaatgtgggtctcctggatcagaggctggccctgcagtgggtgcaggagaacgtggcagccttcgggggtgacccgacatcagtgacgctgtttggggagagcgcgggagccgcctcggtgggcatgcacctgctgtccccgcccagccggggcctgttccacagggccgtgctgcagagcggtgcccccaatggaccctgggccacggtgggcatgggagaggcccgtcgcagggccacgcagctggcccaccttgtgggctgtcctccaggcggcactggtgggaatgacacagagctggtagcctgccttcggacacgaccagcgcaggtcctggtgaaccacgaatggcacgtgctgcctcaagaaagcgtcttccggttctccttcgtgcctgtggtagatggagacttcctcagtgacaccccagaggccctcatcaacgcgggagacttccacggcctgcaggtgctggtgggtgtggtgaaggatgagggctcgtattttctggtttacggggccccaggcttcagcaaagacaacgagtctctcatcagccgggccgagttcctggccggggtgcgggtcggggttccccaggtaagtgacctggcagccgaggctgtggtcctgcattacacagactggctgcatcccgaggacccggcacgcctgagggaggccctgagcgatgtggtgggcgaccacaatgtcgtgtgccccgtggcccagctggctgggcgactggctgcccagggtgcccgggtctacgcctacgtctttgaacaccgtgcttccacgctctcctggcccctgtggatgggggtgccccacggctacgagatcgagttcatctttgggatccccctggacccctctcgaaactacacggcagaggagaaaatcttcgcccagcgactgatgcgatactgggccaactttgcccgcacaggggatcccaatgagccccgagaccccaaggccccacaatggcccccgtacacggcgggggctcagcagtacgttagtctggacctgcggccgctggaggtgcggcgggggctgcgcgcccaggcctgcgccttctggaaccgcttcctccccaaattgctcagcgccaccgacacgctcgacgaggcggagcgccagtggaaggccgagttccaccgctggagctcctacatggtgcactggaagaaccagttcgaccactacagcaagcaggatcgctgctcagacctgtgaccccggcgggacccccatgtcctccgctccgcccggccccctagctgtatatactatttatttcagggctgggctataacacagacgagccccagactctgcccatccccaccccaccccgacgtcccccggggctcccggtcctctgcatgtctcaggctgagctccctcccccgcggtgccttcgcccctctgggctgccaataaactgttacaggcc

SEQ ID NO: 95825 - DNA, 2125 bp, Homo sapiens
tgtcactgcgctctgtcgtcggtcggcgtctggcactggaacgccgcctgccctgcagccatgaggcccccgcagtgtctgctgcacacgccttccctggcttccccactccttctcctcctcctctggctcctgggtggaggagtgggggctgagggccgggaggatgcagagctgctggtgacggtgcgtgggggccggctgcggggcattcgcctgaagacccccgggggccctgtctctgctttcctgggcatcccctttgcggagccacccatgggaccccgtcgctttctgccaccggagcccaagcagccttggtcaggggtggtagacgctacaaccttccagagtgtctgctaccaatatgtggacaccctatacccaggttttgagggcaccgagatgtggaaccccaaccgtgagctgagcgaggactgcctgtacctcaacgtgtggacaccatacccccggcctacatcccccacccctgtcctcgtctggatctatgggggtggcttctacagtggggcctcctccttggacgtgtacgatggccgcttcttggtacaggccgagaggactgtgctggtgtccatgaactaccgggtgggagcctttggcttcctggccctgccggggagccgagaggccccgggcaatgtgggtctcctggatcagaggctggccctgcagtgggtgcaggagaacgtggcagccttcgggggtgacccgacatcagtgacgctgtttggggagagcgcgggagccgcctcggtgggcatgcacctgctgtccccgcccagccggggcctgttccacagggccgtgctgcagagcggtgcccccaatggaccctgggccacggtgggcatgggagaggcccgtcgcagggccacgcagctggcccaccttgtgggctgtcctccaggcggcactggtgggaatgacacagagctggtagcctgccttcggacacgaccagcgcaggtcctggtgaaccacgaatggcacgtgctgcctcaagaaagcgtcttccggttctccttcgtgcctgtggtagatggagacttcctcagtgacaccccagaggccctcatcaacgcgggagacttccacggcctgcaggtgctggtgggtgtggtgaaggatgagggctcgtattttctggtttacggggccccaggcttcagcaaagacaacgagtctctcatcagccgggccgagttcctggccggggtgcgggtcggggttccccaggtaagtgacctggcagccgaggctgtggtcctgcattacacagactggctgcatcccgaggacccggcacgcctgagggaggccctgagcgatgtggtgggcgaccacaatgtcgtgtgccccgtggcccagctggctgggcgactggctgcccagggtgcccgggtctacgcctacgtctttgaacaccgtgcttccacgctctcctggcccctgtggatgggggtgccccacggctacgagatcgagttcatctttgggatccccctggacccctctcgaaactacacggcagaggagaaaatcttcgcccagcgactgatgcgatactgggccaactttgcccgcacaggggatcccaatgagccccgagaccccaaggccccacaatggcccccgtacacggcgggggctcagcagtacgttagtctggacctgcggccgctggaggtgcggcgggggctgcgcgcccaggcctgcgccttctggaaccgcttcctccccaaattgctcagcgccaccgacacgctcgacgaggcggagcgccagtggaaggccgagttccaccgctggagctcctacatggtgcactggaagaaccagttcgaccactacagcaagcaggatcgctgctcagacctgtgaccccggcgggacccccatgtcctccgctccgcccggccccctagctgtatatactatttatttcagggctgggctataacacagacgagccccagactctgcccatccccaccccaccccgacgtcccccggggctcccggtcctctgcatgtctcaggctgagctccctcccccgcggtgccttcgcccctctgggctgccaataaactgttacaggcc

SEQ ID NO: 95826 - DNA, 1059 bp, Homo sapiens
ctaaaattagaacgatacagagaagattagcatggcccctgcgcgacttccacggcctgcaggtgctggtgggtgtggtgaaggatgagggctcgtattttctggtttacggggccccaggcttcagcaaagacaacgagtctctcatcagccgggccgagttcctggccggggtgcgggtcggggttccccaggtaagtgacctggcagccgaggctgtggtcctgcattacacagactggctgcatcccgaggacccggcacgcctgagggaggccctgagcgatgtggtgggcgaccacaatgtcgtgtgccccgtggcccagctggctgggcgactggctgcccagggtgcccgggtctacgcctacgtctttgaacaccgtgcttccacgctctcctggcccctgtggatgggggtgccccacggctacgagatcgagttcatctttgggatccccctggacccctctcgaaactacacggcagaggagaaaatcttcgcccagcgactgatgcgatactgggccaactttgcccgcacaggggatcccaatgagccccgagaccccaaggccccacaatggcccccgtacacggcgggggctcagcagtacgttagtctggacctgcggccgctggaggtgcggcgggggctgcgcgcccaggcctgcgccttctggaaccgcttcctccccaaattgctcagcgccaccgacacgctcgacgaggcggagcgccagtggaaggccgagttccaccgctggagctcctacatggtgcactggaagaaccagttcgaccactacagcaagcaggatcgctgctcagacctgtgaccccggcgggacccccatgtcctccgctccgcccggccccctagctgtatatactatttatttcagggctgggctataacacagacgagccccagactctgcccatccccaccccaccccgacgtcccccggggctcccggtcctctgcatgtctcaggctgagctccctcccccgcggtgccttcgcccctctgggctgccaataaactgttacaggcc

SEQ ID NO: 95827 - DNA, 10999 bp, Homo sapiens
gcgcgggcttgtggcgcgagcttctgaaactaggcggcagaggcggagccgctgtggcactgctgcgcctctgctgcgcctcgggtgtcttttgcggcggtgggtcgccgccgggagaagcgtgaggggacagatttgtgaccggcgcggtttttgtcagcttactccggccaaaaaagaactgcacctctggagcggacttatttaccaagcattggaggaatatcgtaggtaaaaatgcctattggatccaaagagaggccaacattttttgaaatttttaagacacgctgcaacaaagcagatttaggaccaataagtcttaattggtttgaagaactttcttcagaagctccaccctataattctgaacctgcagaagaatctgaacataaaaacaacaattacgaaccaaacctatttaaaactccacaaaggaaaccatcttataatcagctggcttcaactccaataatattcaaagagcaagggctgactctgccgctgtaccaatctcctgtaaaagaattagataaattcaaattagacttaggaaggaatgttcccaatagtagacataaaagtcttcgcacagtgaaaactaaaatggatcaagcagatgatgtttcctgtccacttctaaattcttgtcttagtgaaagtcctgttgttctacaatgtacacatgtaacaccacaaagagataagtcagtggtatgtgggagtttgtttcatacaccaaagtttgtgaagggtcgtcagacaccaaaacatatttctgaaagtctaggagctgaggtggatcctgatatgtcttggtcaagttctttagctacaccacccacccttagttctactgtgctcatagtcagaaatgaagaagcatctgaaactgtatttcctcatgatactactgctaatgtgaaaagctatttttccaatcatgatgaaagtctgaagaaaaatgatagatttatcgcttctgtgacagacagtgaaaacacaaatcaaagagaagctgcaagtcatggatttggaaaaacatcagggaattcatttaaagtaaatagctgcaaagaccacattggaaagtcaatgccaaatgtcctagaagatgaagtatatgaaacagttgtagatacctctgaagaagatagtttttcattatgtttttctaaatgtagaacaaaaaatctacaaaaagtaagaactagcaagactaggaaaaaaattttccatgaagcaaacgctgatgaatgtgaaaaatctaaaaaccaagtgaaagaaaaatactcatttgtatctgaagtggaaccaaatgatactgatccattagattcaaatgtagcacatcagaagccctttgagagtggaagtgacaaaatctccaaggaagttgtaccgtctttggcctgtgaatggtctcaactaaccctttcaggtctaaatggagcccagatggagaaaatacccctattgcatatttcttcatgtgaccaaaatatttcagaaaaagacctattagacacagagaacaaaagaaagaaagattttcttacttcagagaattctttgccacgtatttctagcctaccaaaatcagagaagccattaaatgaggaaacagtggtaaataagagagatgaagagcagcatcttgaatctcatacagactgcattcttgcagtaaagcaggcaatatctggaacttctccagtggcttcttcatttcagggtatcaaaaagtctatattcagaataagagaatcacctaaagagactttcaatgcaagtttttcaggtcatatgactgatccaaactttaaaaaagaaactgaagcctctgaaagtggactggaaatacatactgtttgctcacagaaggaggactccttatgtccaaatttaattgataatggaagctggccagccaccaccacacagaattctgtagctttgaagaatgcaggtttaatatccactttgaaaaagaaaacaaataagtttatttatgctatacatgatgaaacattttataaaggaaaaaaaataccgaaagaccaaaaatcagaactaattaactgttcagcccagtttgaagcaaatgcttttgaagcaccacttacatttgcaaatgctgattcaggtttattgcattcttctgtgaaaagaagctgttcacagaatgattctgaagaaccaactttgtccttaactagctcttttgggacaattctgaggaaatgttctagaaatgaaacatgttctaataatacagtaatctctcaggatcttgattataaagaagcaaaatgtaataaggaaaaactacagttatttattaccccagaagctgattctctgtcatgcctgcaggaaggacagtgtgaaaatgatccaaaaagcaaaaaagtttcagatataaaagaagaggtcttggctgcagcatgtcacccagtacaacattcaaaagtggaatacagtgatactgactttcaatcccagaaaagtcttttatatgatcatgaaaatgccagcactcttattttaactcctacttccaaggatgttctgtcaaacctagtcatgatttctagaggcaaagaatcatacaaaatgtcagacaagctcaaaggtaacaattatgaatctgatgttgaattaaccaaaaatattcccatggaaaagaatcaagatgtatgtgctttaaatgaaaattataaaaacgttgagctgttgccacctgaaaaatacatgagagtagcatcaccttcaagaaaggtacaattcaaccaaaacacaaatctaagagtaatccaaaaaaatcaagaagaaactacttcaatttcaaaaataactgtcaatccagactctgaagaacttttctcagacaatgagaataattttgtcttccaagtagctaatgaaaggaataatcttgctttaggaaatactaaggaacttcatgaaacagacttgacttgtgtaaacgaacccattttcaagaactctaccatggttttatatggagacacaggtgataaacaagcaacccaagtgtcaattaaaaaagatttggtttatgttcttgcagaggagaacaaaaatagtgtaaagcagcatataaaaatgactctaggtcaagatttaaaatcggacatctccttgaatatagataaaataccagaaaaaaataatgattacatgaacaaatgggcaggactcttaggtccaatttcaaatcacagttttggaggtagcttcagaacagcttcaaataaggaaatcaagctctctgaacataacattaagaagagcaaaatgttcttcaaagatattgaagaacaatatcctactagtttagcttgtgttgaaattgtaaataccttggcattagataatcaaaagaaactgagcaagcctcagtcaattaatactgtatctgcacatttacagagtagtgtagttgtttctgattgtaaaaatagtcatataacccctcagatgttattttccaagcaggattttaattcaaaccataatttaacacctagccaaaaggcagaaattacagaactttctactatattagaagaatcaggaagtcagtttgaatttactcagtttagaaaaccaagctacatattgcagaagagtacatttgaagtgcctgaaaaccagatgactatcttaaagaccacttctgaggaatgcagagatgctgatcttcatgtcataatgaatgccccatcgattggtcaggtagacagcagcaagcaatttgaaggtacagttgaaattaaacggaagtttgctggcctgttgaaaaatgactgtaacaaaagtgcttctggttatttaacagatgaaaatgaagtggggtttaggggcttttattctgctcatggcacaaaactgaatgtttctactgaagctctgcaaaaagctgtgaaactgtttagtgatattgagaatattagtgaggaaacttctgcagaggtacatccaataagtttatcttcaagtaaatgtcatgattctgttgtttcaatgtttaagatagaaaatcataatgataaaactgtaagtgaaaaaaataataaatgccaactgatattacaaaataatattgaaatgactactggcacttttgttgaagaaattactgaaaattacaagagaaatactgaaaatgaagataacaaatatactgctgccagtagaaattctcataacttagaatttgatggcagtgattcaagtaaaaatgatactgtttgtattcataaagatgaaacggacttgctatttactgatcagcacaacatatgtcttaaattatctggccagtttatgaaggagggaaacactcagattaaagaagatttgtcagatttaacttttttggaagttgcgaaagctcaagaagcatgtcatggtaatacttcaaataaagaacagttaactgctactaaaacggagcaaaatataaaagattttgagacttctgatacattttttcagactgcaagtgggaaaaatattagtgtcgccaaagagtcatttaataaaattgtaaatttctttgatcagaaaccagaagaattgcataacttttccttaaattctgaattacattctgacataagaaagaacaaaatggacattctaagttatgaggaaacagacatagttaaacacaaaatactgaaagaaagtgtcccagttggtactggaaatcaactagtgaccttccagggacaacccgaacgtgatgaaaagatcaaagaacctactctgttgggttttcatacagctagcgggaaaaaagttaaaattgcaaaggaatctttggacaaagtgaaaaacctttttgatgaaaaagagcaaggtactagtgaaatcaccagttttagccatcaatgggcaaagaccctaaagtacagagaggcctgtaaagaccttgaattagcatgtgagaccattgagatcacagctgccccaaagtgtaaagaaatgcagaattctctcaataatgataaaaaccttgtttctattgagactgtggtgccacctaagctcttaagtgataatttatgtagacaaactgaaaatctcaaaacatcaaaaagtatctttttgaaagttaaagtacatgaaaatgtagaaaaagaaacagcaaaaagtcctgcaacttgttacacaaatcagtccccttattcagtcattgaaaattcagccttagctttttacacaagttgtagtagaaaaacttctgtgagtcagacttcattacttgaagcaaaaaaatggcttagagaaggaatatttgatggtcaaccagaaagaataaatactgcagattatgtaggaaattatttgtatgaaaataattcaaacagtactatagctgaaaatgacaaaaatcatctctccgaaaaacaagatacttatttaagtaacagtagcatgtctaacagctattcctaccattctgatgaggtatataatgattcaggatatctctcaaaaaataaacttgattctggtattgagccagtattgaagaatgttgaagatcaaaaaaacactagtttttccaaagtaatatccaatgtaaaagatgcaaatgcatacccacaaactgtaaatgaagatatttgcgttgaggaacttgtgactagctcttcaccctgcaaaaataaaaatgcagccattaaattgtccatatctaatagtaataattttgaggtagggccacctgcatttaggatagccagtggtaaaatcgtttgtgtttcacatgaaacaattaaaaaagtgaaagacatatttacagacagtttcagtaaagtaattaaggaaaacaacgagaataaatcaaaaatttgccaaacgaaaattatggcaggttgttacgaggcattggatgattcagaggatattcttcataactctctagataatgatgaatgtagcacgcattcacataaggtttttgctgacattcagagtgaagaaattttacaacataaccaaaatatgtctggattggagaaagtttctaaaatatcaccttgtgatgttagtttggaaacttcagatatatgtaaatgtagtatagggaagcttcataagtcagtctcatctgcaaatacttgtgggatttttagcacagcaagtggaaaatctgtccaggtatcagatgcttcattacaaaacgcaagacaagtgttttctgaaatagaagatagtaccaagcaagtcttttccaaagtattgtttaaaagtaacgaacattcagaccagctcacaagagaagaaaatactgctatacgtactccagaacatttaatatcccaaaaaggcttttcatataatgtggtaaattcatctgctttctctggatttagtacagcaagtggaaagcaagtttccattttagaaagttccttacacaaagttaagggagtgttagaggaatttgatttaatcagaactgagcatagtcttcactattcacctacgtctagacaaaatgtatcaaaaatacttcctcgtgttgataagagaaacccagagcactgtgtaaactcagaaatggaaaaaacctgcagtaaagaatttaaattatcaaataacttaaatgttgaaggtggttcttcagaaaataatcactctattaaagtttctccatatctctctcaatttcaacaagacaaacaacagttggtattaggaaccaaagtctcacttgttgagaacattcatgttttgggaaaagaacaggcttcacctaaaaacgtaaaaatggaaattggtaaaactgaaactttttctgatgttcctgtgaaaacaaatatagaagtttgttctacttactccaaagattcagaaaactactttgaaacagaagcagtagaaattgctaaagcttttatggaagatgatgaactgacagattctaaactgccaagtcatgccacacattctctttttacatgtcccgaaaatgaggaaatggttttgtcaaattcaagaattggaaaaagaagaggagagccccttatcttagtgggagaaccctcaatcaaaagaaacttattaaatgaatttgacaggataatagaaaatcaagaaaaatccttaaaggcttcaaaaagcactccagatggcacaataaaagatcgaagattgtttatgcatcatgtttctttagagccgattacctgtgtaccctttcgcacaactaaggaacgtcaagagatacagaatccaaattttaccgcacctggtcaagaatttctgtctaaatctcatttgtatgaacatctgactttggaaaaatcttcaagcaatttagcagtttcaggacatccattttatcaagtttctgctacaagaaatgaaaaaatgagacacttgattactacaggcagaccaaccaaagtctttgttccaccttttaaaactaaatcacattttcacagagttgaacagtgtgttaggaatattaacttggaggaaaacagacaaaagcaaaacattgatggacatggctctgatgatagtaaaaataagattaatgacaatgagattcatcagtttaacaaaaacaactccaatcaagcagcagctgtaactttcacaaagtgtgaagaagaacctttagatttaattacaagtcttcagaatgccagagatatacaggatatgcgaattaagaagaaacaaaggcaacgcgtctttccacagccaggcagtctgtatcttgcaaaaacatccactctgcctcgaatctctctgaaagcagcagtaggaggccaagttccctctgcgtgttctcataaacagctgtatacgtatggcgtttctaaacattgcataaaaattaacagcaaaaatgcagagtcttttcagtttcacactgaagattattttggtaaggaaagtttatggactggaaaaggaatacagttggctgatggtggatggctcataccctccaatgatggaaaggctggaaaagaagaattttatagggctctgtgtgacactccaggtgtggatccaaagcttatttctagaatttgggtttataatcactatagatggatcatatggaaactggcagctatggaatgtgcctttcctaaggaatttgctaatagatgcctaagcccagaaagggtgcttcttcaactaaaatacagatatgatacggaaattgatagaagcagaagatcggctataaaaaagataatggaaagggatgacacagctgcaaaaacacttgttctctgtgtttctgacataatttcattgagcgcaaatatatctgaaacttctagcaataaaactagtagtgcagatacccaaaaagtggccattattgaacttacagatgggtggtatgctgttaaggcccagttagatcctcccctcttagctgtcttaaagaatggcagactgacagttggtcagaagattattcttcatggagcagaactggtgggctctcctgatgcctgtacacctcttgaagccccagaatctcttatgttaaagatttctgctaacagtactcggcctgctcgctggtataccaaacttggattctttcctgaccctagaccttttcctctgcccttatcatcgcttttcagtgatggaggaaatgttggttgtgttgatgtaattattcaaagagcataccctatacagtggatggagaagacatcatctggattatacatatttcgcaatgaaagagaggaagaaaaggaagcagcaaaatatgtggaggcccaacaaaagagactagaagccttattcactaaaattcaggaggaatttgaagaacatgaagaaaacacaacaaaaccatatttaccatcacgtgcactaacaagacagcaagttcgtgctttgcaagatggtgcagagctttatgaagcagtgaagaatgcagcagacccagcttaccttgagggttatttcagtgaagagcagttaagagccttgaataatcacaggcaaatgttgaatgataagaaacaagctcagatccagttggaaattaggaaggccatggaatctgctgaacaaaaggaacaaggtttatcaagggatgtcacaaccgtgtggaagttgcgtattgtaagctattcaaaaaaagaaaaagattcagttatactgagtatttggcgtccatcatcagatttatattctctgttaacagaaggaaagagatacagaatttatcatcttgcaacttcaaaatctaaaagtaaatctgaaagagctaacatacagttagcagcgacaaaaaaaactcagtatcaacaactaccggtttcagatgaaattttatttcagatttaccagccacgggagccccttcacttcagcaaatttttagatccagactttcagccatcttgttctgaggtggacctaataggatttgtcgtttctgttgtgaaaaaaacaggacttgcccctttcgtctatttgtcagacgaatgttacaatttactggcaataaagttttggatagaccttaatgaggacattattaagcctcatatgttaattgctgcaagcaacctccagtggcgaccagaatccaaatcaggccttcttactttatttgctggagatttttctgtgttttctgctagtccaaaagagggccactttcaagagacattcaacaaaatgaaaaatactgttgagaatattgacatactttgcaatgaagcagaaaacaagcttatgcatatactgcatgcaaatgatcccaagtggtccaccccaactaaagactgtacttcagggccgtacactgctcaaatcattcctggtacaggaaacaagcttctgatgtcttctcctaattgtgagatatattatcaaagtcctttatcactttgtatggccaaaaggaagtctgtttccacacctgtctcagcccagatgacttcaaagtcttgtaaaggggagaaagagattgatgaccaaaagaactgcaaaaagagaagagccttggatttcttgagtagactgcctttacctccacctgttagtcccatttgtacatttgtttctccggctgcacagaaggcatttcagccaccaaggagttgtggcaccaaatacgaaacacccataaagaaaaaagaactgaattctcctcagatgactccatttaaaaaattcaatgaaatttctcttttggaaagtaattcaatagctgacgaagaacttgcattgataaatacccaagctcttttgtctggttcaacaggagaaaaacaatttatatctgtcagtgaatccactaggactgctcccaccagttcagaagattatctcagactgaaacgacgttgtactacatctctgatcaaagaacaggagagttcccaggccagtacggaagaatgtgagaaaaataagcaggacacaattacaactaaaaaatatatctaagcatttgcaaaggcgacaataaattattgacgcttaacctttccagtttataagactggaatataatttcaaaccacacattagtacttatgttgcacaatgagaaaagaaattagtttcaaatttacctcagcgtttgtgtatcgggcaaaaatcgttttgcccgattccgtattggtatacttttgcttcagttgcatatcttaaaactaaatgtaatttattaactaatcaagaaaaacatctttggctgagctcggtggctcatgcctgtaatcccaacactttgagaagctgaggtgggaggagtgcttgaggccaggagttcaagaccagcctgggcaacatagggagacccccatctttacaaagaaaaaaaaaaaggggaaaagaaaatcttttaaatctttggatttgatcactacaagtattattttacaatcaacaaaatggtcatccaaactcaaacttgagaaaatatcttgctttcaaattgacactgatt

SEQ ID NO: 95828 - DNA, 656 bp, Homo sapiens
catccccctttttctccccccgttttccctctgaaccccctcttgtccccctttccctctaccccactgggcccccccccccaaacaatttgttttcacaaaactttttctcaaggcccaagcccgcccaaccaaattttttttttttttttttcttttttttggatttgatcactacaagtattattttacaagtgaaataaacataccattttcttttagattgtgtcattaaatggaatgaggtctcttagtacagttattttgatgcagataattccttttagtttagctactattttaggggattttttttagaggtaactcactatgaaatagttctccttaatgcaaatatgttggttctgctatagttccatcctgttcaaaagtcaggatgaatatgaagagtggtgtttccttttgagcaattcttcatccttaagtcagcatgattataagaaaaatagaaccctcagtgtaactctaattcctttttactattccagtgtgatctctgaaattaaattacttcaactaaaaattcaaatactttaaatcagaagatttcatagttaatttattttttttttcaacaaaatggtcatccaaactcaaacttgagaaaatatcttgctttcaaattgacactgatt

SEQ ID NO: 95829 - DNA, 365 bp, Homo sapiens
tatcttttactgtgattattcttcatcttccttccttttcatgtcattttatatgttcttatgtaaaattactttcatctagaataggaataatgtgaactgaaatcacctaacctattaggagttaggggagggagactgtgtgtaatatttgcgtgcttaaatattttcaatgaaaagttactttgatttagttttttatgttactacataattatgataggctacgttttcatttttttatcagatgtcttctcctaattgtgagatatattatcaaagtcctttatcactttgtatggccaaaaggaagtctgtttccacacctgtctcagcccagatgacttcaaagtcttgtaaagggg

SEQ ID NO: 95830 - DNA, 351 bp, Homo sapiens
tatatctaagcatttgcaaaggcgacaataaattattgacgcttaacctttccagtttataagactggaatataatttcaaaccacacattagtacttatgttgcacaatgagaaaagaaattagtttcaaatttacctcagcgtttgtgtatcgggcaaaaatcgttttgcccgattccgtattggtatacttttgcttcagttgcatatcttaaaactaaatgtaatttattaactaatcaagaaaaacatctttggctgagctcggtggctcatgcctgtaatcccaacactttgagaagctgaggtgggaggagtgcttgaggccaggagttcaagaccagcctggg

SEQ ID NO: 95831 - DNA, 11523 bp, Homo sapiens
gcgcgggcttgtggcgcgagcttctgaaactaggcggcagaggcggagccgctgtggcactgctgcgcctctgctgcgcctcgggtgtcttttgcggcggtgggtcgccgccgggagaagcgtgaggggacagatttgtgaccggcgcggtttttgtcagcttactccggccaaaaaagaactgcacctctggagcggacttatttaccaagcattggaggaatatcgtaggtaaaaatgcctattggatccaaagagaggccaacattttttgaaatttttaagacacgctgcaacaaagcagatttaggaccaataagtcttaattggtttgaagaactttcttcagaagctccaccctataattctgaacctgcagaagaatctgaacataaaaacaacaattacgaaccaaacctatttaaaactccacaaaggaaaccatcttataatcagctggcttcaactccaataatattcaaagagcaagggctgactctgccgctgtaccaatctcctgtaaaagaattagataaattcaaattagacttaggaaggaatgttcccaatagtagacataaaagtcttcgcacagtgaaaactaaaatggatcaagcagatgatgtttcctgtccacttctaaattcttgtcttagtgaaagtcctgttgttctacaatgtacacatgtaacaccacaaagagataagtcagtggtatgtgggagtttgtttcatacaccaaagtttgtgaagggtcgtcagacaccaaaacatatttctgaaagtctaggagctgaggtggatcctgatatgtcttggtcaagttctttagctacaccacccacccttagttctactgtgctcatagtcagaaatgaagaagcatctgaaactgtatttcctcatgatactactgctaatgtgaaaagctatttttccaatcatgatgaaagtctgaagaaaaatgatagatttatcgcttctgtgacagacagtgaaaacacaaatcaaagagaagctgcaagtcatggatttggaaaaacatcagggaattcatttaaagtaaatagctgcaaagaccacattggaaagtcaatgccaaatgtcctagaagatgaagtatatgaaacagttgtagatacctctgaagaagatagtttttcattatgtttttctaaatgtagaacaaaaaatctacaaaaagtaagaactagcaagactaggaaaaaaattttccatgaagcaaacgctgatgaatgtgaaaaatctaaaaaccaagtgaaagaaaaatactcatttgtatctgaagtggaaccaaatgatactgatccattagattcaaatgtagcacatcagaagccctttgagagtggaagtgacaaaatctccaaggaagttgtaccgtctttggcctgtgaatggtctcaactaaccctttcaggtctaaatggagcccagatggagaaaatacccctattgcatatttcttcatgtgaccaaaatatttcagaaaaagacctattagacacagagaacaaaagaaagaaagattttcttacttcagagaattctttgccacgtatttctagcctaccaaaatcagagaagccattaaatgaggaaacagtggtaaataagagagatgaagagcagcatcttgaatctcatacagactgcattcttgcagtaaagcaggcaatatctggaacttctccagtggcttcttcatttcagggtatcaaaaagtctatattcagaataagagaatcacctaaagagactttcaatgcaagtttttcaggtcatatgactgatccaaactttaaaaaagaaactgaagcctctgaaagtggactggaaatacatactgtttgctcacagaaggaggactccttatgtccaaatttaattgataatggaagctggccagccaccaccacacagaattctgtagctttgaagaatgcaggtttaatatccactttgaaaaagaaaacaaataagtttatttatgctatacatgatgaaacattttataaaggaaaaaaaataccgaaagaccaaaaatcagaactaattaactgttcagcccagtttgaagcaaatgcttttgaagcaccacttacatttgcaaatgctgattcaggtttattgcattcttctgtgaaaagaagctgttcacagaatgattctgaagaaccaactttgtccttaactagctcttttgggacaattctgaggaaatgttctagaaatgaaacatgttctaataatacagtaatctctcaggatcttgattataaagaagcaaaatgtaataaggaaaaactacagttatttattaccccagaagctgattctctgtcatgcctgcaggaaggacagtgtgaaaatgatccaaaaagcaaaaaagtttcagatataaaagaagaggtcttggctgcagcatgtcacccagtacaacattcaaaagtggaatacagtgatactgactttcaatcccagaaaagtcttttatatgatcatgaaaatgccagcactcttattttaactcctacttccaaggatgttctgtcaaacctagtcatgatttctagaggcaaagaatcatacaaaatgtcagacaagctcaaaggtaacaattatgaatctgatgttgaattaaccaaaaatattcccatggaaaagaatcaagatgtatgtgctttaaatgaaaattataaaaacgttgagctgttgccacctgaaaaatacatgagagtagcatcaccttcaagaaaggtacaattcaaccaaaacacaaatctaagagtaatccaaaaaaatcaagaagaaactacttcaatttcaaaaataactgtcaatccagactctgaagaacttttctcagacaatgagaataattttgtcttccaagtagctaatgaaaggaataatcttgctttaggaaatactaaggaacttcatgaaacagacttgacttgtgtaaacgaacccattttcaagaactctaccatggttttatatggagacacaggtgataaacaagcaacccaagtgtcaattaaaaaagatttggtttatgttcttgcagaggagaacaaaaatagtgtaaagcagcatataaaaatgactctaggtcaagatttaaaatcggacatctccttgaatatagataaaataccagaaaaaaataatgattacatgaacaaatgggcaggactcttaggtccaatttcaaatcacagttttggaggtagcttcagaacagcttcaaataaggaaatcaagctctctgaacataacattaagaagagcaaaatgttcttcaaagatattgaagaacaatatcctactagtttagcttgtgttgaaattgtaaataccttggcattagataatcaaaagaaactgagcaagcctcagtcaattaatactgtatctgcacatttacagagtagtgtagttgtttctgattgtaaaaatagtcatataacccctcagatgttattttccaagcaggattttaattcaaaccataatttaacacctagccaaaaggcagaaattacagaactttctactatattagaagaatcaggaagtcagtttgaatttactcagtttagaaaaccaagctacatattgcagaagagtacatttgaagtgcctgaaaaccagatgactatcttaaagaccacttctgaggaatgcagagatgctgatcttcatgtcataatgaatgccccatcgattggtcaggtagacagcagcaagcaatttgaaggtacagttgaaattaaacggaagtttgctggcctgttgaaaaatgactgtaacaaaagtgcttctggttatttaacagatgaaaatgaagtggggtttaggggcttttattctgctcatggcacaaaactgaatgtttctactgaagctctgcaaaaagctgtgaaactgtttagtgatattgagaatattagtgaggaaacttctgcagaggtacatccaataagtttatcttcaagtaaatgtcatgattctgttgtttcaatgtttaagatagaaaatcataatgataaaactgtaagtgaaaaaaataataaatgccaactgatattacaaaataatattgaaatgactactggcacttttgttgaagaaattactgaaaattacaagagaaatactgaaaatgaagataacaaatatactgctgccagtagaaattctcataacttagaatttgatggcagtgattcaagtaaaaatgatactgtttgtattcataaagatgaaacggacttgctatttactgatcagcacaacatatgtcttaaattatctggccagtttatgaaggagggaaacactcagattaaagaagatttgtcagatttaacttttttggaagttgcgaaagctcaagaagcatgtcatggtaatacttcaaataaagaacagttaactgctactaaaacggagcaaaatataaaagattttgagacttctgatacattttttcagactgcaagtgggaaaaatattagtgtcgccaaagagtcatttaataaaattgtaaatttctttgatcagaaaccagaagaattgcataacttttccttaaattctgaattacattctgacataagaaagaacaaaatggacattctaagttatgaggaaacagacatagttaaacacaaaatactgaaagaaagtgtcccagttggtactggaaatcaactagtgaccttccagggacaacccgaacgtgatgaaaagatcaaagaacctactctgttgggttttcatacagctagcgggaaaaaagttaaaattgcaaaggaatctttggacaaagtgaaaaacctttttgatgaaaaagagcaaggtactagtgaaatcaccagttttagccatcaatgggcaaagaccctaaagtacagagaggcctgtaaagaccttgaattagcatgtgagaccattgagatcacagctgccccaaagtgtaaagaaatgcagaattctctcaataatgataaaaaccttgtttctattgagactgtggtgccacctaagctcttaagtgataatttatgtagacaaactgaaaatctcaaaacatcaaaaagtatctttttgaaagttaaagtacatgaaaatgtagaaaaagaaacagcaaaaagtcctgcaacttgttacacaaatcagtccccttattcagtcattgaaaattcagccttagctttttacacaagttgtagtagaaaaacttctgtgagtcagacttcattacttgaagcaaaaaaatggcttagagaaggaatatttgatggtcaaccagaaagaataaatactgcagattatgtaggaaattatttgtatgaaaataattcaaacagtactatagctgaaaatgacaaaaatcatctctccgaaaaacaagatacttatttaagtaacagtagcatgtctaacagctattcctaccattctgatgaggtatataatgattcaggatatctctcaaaaaataaacttgattctggtattgagccagtattgaagaatgttgaagatcaaaaaaacactagtttttccaaagtaatatccaatgtaaaagatgcaaatgcatacccacaaactgtaaatgaagatatttgcgttgaggaacttgtgactagctcttcaccctgcaaaaataaaaatgcagccattaaattgtccatatctaatagtaataattttgaggtagggccacctgcatttaggatagccagtggtaaaatcgtttgtgtttcacatgaaacaattaaaaaagtgaaagacatatttacagacagtttcagtaaagtaattaaggaaaacaacgagaataaatcaaaaatttgccaaacgaaaattatggcaggttgttacgaggcattggatgattcagaggatattcttcataactctctagataatgatgaatgtagcacgcattcacataaggtttttgctgacattcagagtgaagaaattttacaacataaccaaaatatgtctggattggagaaagtttctaaaatatcaccttgtgatgttagtttggaaacttcagatatatgtaaatgtagtatagggaagcttcataagtcagtctcatctgcaaatacttgtgggatttttagcacagcaagtggaaaatctgtccaggtatcagatgcttcattacaaaacgcaagacaagtgttttctgaaatagaagatagtaccaagcaagtcttttccaaagtattgtttaaaagtaacgaacattcagaccagctcacaagagaagaaaatactgctatacgtactccagaacatttaatatcccaaaaaggcttttcatataatgtggtaaattcatctgctttctctggatttagtacagcaagtggaaagcaagtttccattttagaaagttccttacacaaagttaagggagtgttagaggaatttgatttaatcagaactgagcatagtcttcactattcacctacgtctagacaaaatgtatcaaaaatacttcctcgtgttgataagagaaacccagagcactgtgtaaactcagaaatggaaaaaacctgcagtaaagaatttaaattatcaaataacttaaatgttgaaggtggttcttcagaaaataatcactctattaaagtttctccatatctctctcaatttcaacaagacaaacaacagttggtattaggaaccaaagtctcacttgttgagaacattcatgttttgggaaaagaacaggcttcacctaaaaacgtaaaaatggaaattggtaaaactgaaactttttctgatgttcctgtgaaaacaaatatagaagtttgttctacttactccaaagattcagaaaactactttgaaacagaagcagtagaaattgctaaagcttttatggaagatgatgaactgacagattctaaactgccaagtcatgccacacattctctttttacatgtcccgaaaatgaggaaatggttttgtcaaattcaagaattggaaaaagaagaggagagccccttatcttagtgggagaaccctcaatcaaaagaaacttattaaatgaatttgacaggataatagaaaatcaagaaaaatccttaaaggcttcaaaaagcactccagatggcacaataaaagatcgaagattgtttatgcatcatgtttctttagagccgattacctgtgtaccctttcgcacaactaaggaacgtcaagagatacagaatccaaattttaccgcacctggtcaagaatttctgtctaaatctcatttgtatgaacatctgactttggaaaaatcttcaagcaatttagcagtttcaggacatccattttatcaagtttctgctacaagaaatgaaaaaatgagacacttgattactacaggcagaccaaccaaagtctttgttccaccttttaaaactaaatcacattttcacagagttgaacagtgtgttaggaatattaacttggaggaaaacagacaaaagcaaaacattgatggacatggctctgatgatagtaaaaataagattaatgacaatgagattcatcagtttaacaaaaacaactccaatcaagcagcagctgtaactttcacaaagtgtgaagaagaacctttagatttaattacaagtcttcagaatgccagagatatacaggatatgcgaattaagaagaaacaaaggcaacgcgtctttccacagccaggcagtctgtatcttgcaaaaacatccactctgcctcgaatctctctgaaagcagcagtaggaggccaagttccctctgcgtgttctcataaacagctgtatacgtatggcgtttctaaacattgcataaaaattaacagcaaaaatgcagagtcttttcagtttcacactgaagattattttggtaaggaaagtttatggactggaaaaggaatacagttggctgatggtggatggctcataccctccaatgatggaaaggctggaaaagaagaattttatagggctctgtgtgacactccaggtgtggatccaaagcttatttctagaatttgggtttataatcactatagatggatcatatggaaactggcagctatggaatgtgcctttcctaaggaatttgctaatagatgcctaagcccagaaagggtgcttcttcaactaaaatacagatatgatacggaaattgatagaagcagaagatcggctataaaaaagataatggaaagggatgacacagctgcaaaaacacttgttctctgtgtttctgacataatttcattgagcgcaaatatatctgaaacttctagcaataaaactagtagtgcagatacccaaaaagtggccattattgaacttacagatgggtggtatgctgttaaggcccagttagatcctcccctcttagctgtcttaaagaatggcagactgacagttggtcagaagattattcttcatggagcagaactggtgggctctcctgatgcctgtacacctcttgaagccccagaatctcttatgttaaagatttctgctaacagtactcggcctgctcgctggtataccaaacttggattctttcctgaccctagaccttttcctctgcccttatcatcgcttttcagtgatggaggaaatgttggttgtgttgatgtaattattcaaagagcataccctatacagtggatggagaagacatcatctggattatacatatttcgcaatgaaagagaggaagaaaaggaagcagcaaaatatgtggaggcccaacaaaagagactagaagccttattcactaaaattcaggaggaatttgaagaacatgaagaaaacacaacaaaaccatatttaccatcacgtgcactaacaagacagcaagttcgtgctttgcaagatggtgcagagctttatgaagcagtgaagaatgcagcagacccagcttaccttgagggttatttcagtgaagagcagttaagagccttgaataatcacaggcaaatgttgaatgataagaaacaagctcagatccagttggaaattaggaaggccatggaatctgctgaacaaaaggaacaaggtttatcaagggatgtcacaaccgtgtggaagttgcgtattgtaagctattcaaaaaaagaaaaagattcagttatactgagtatttggcgtccatcatcagatttatattctctgttaacagaaggaaagagatacagaatttatcatcttgcaacttcaaaatctaaaagtaaatctgaaagagctaacatacagttagcagcgacaaaaaaaactcagtatcaacaactaccggtttcagatgaaattttatttcagatttaccagccacgggagccccttcacttcagcaaatttttagatccagactttcagccatcttgttctgaggtggacctaataggatttgtcgtttctgttgtgaaaaaaacaggacttgcccctttcgtctatttgtcagacgaatgttacaatttactggcaataaagttttggatagaccttaatgaggacattattaagcctcatatgttaattgctgcaagcaacctccagtggcgaccagaatccaaatcaggccttcttactttatttgctggagatttttctgtgttttctgctagtccaaaagagggccactttcaagagacattcaacaaaatgaaaaatactgttgagagacagagtcttgctttgtcacccccaggctggagtacaatagcacaatctcggatcactgcagtgtctgcctcctgggctcaagcgattctcgtgccttagcctcccaagtagctgggactacagaatattgacatactttgcaatgaagcagaaaacaagcttatgcatatactgcatgcaaatgatcccaagtggtccaccccaactaaagactgtacttcagggccgtacactgctcaaatcattcctggtacaggaaacaagcttctgatgtcttctcctaattgtgagatatattatcaaagtcctttatcactttgtatggccaaaaggaagtctgtttccacacctgtctcagcccagatgacttcaaagtcttgtaaaggggagaaagagattgatgaccaaaagaactgcaaaaagagaagagccttggatttcttgagtagactgcctttacctccacctgttagtcccatttgtacatttgtttctccggctgcacagaaggcatttcagccaccaaggagttgtggcaccaaatacgaaacacccataaagaaaaaagaactgaattctcctcagatgactccatttaaaaaattcaatgaaatttctcttttggaaagtaattcaatagctgacgaagaacttgcattgataaatacccaagctcttttgtctggttcaacaggagaaaaacaatttatatctgtcagtgaatccactaggactgctcccaccagttcagaagattatctcagactgaaacgacgttgtactacatctctgatcaaagaacaggagagttcccaggccagtacggaagaatgtgagaaaaataagcaggacacaattacaactaaaaaatatatctaagcatttgcaaaggcgacaataaattattgacgcttaacctttccagtttataagactggaatataatttcaaaccacacattagtacttatgttgcacaatgagaaaagaaattagtttcaaatttacctcagcgtttgtgtatcgggcaaaaatcgttttgcccgattccgtattggtatacttttgcttcagttgcatatcttaaaactaaatgtaatttattaactaatcaagaaaaacatctttggctgagctcggtggctcatgcctgtaatcccaacactttgagaagctgaggtgggaggagtgcttgaggccaggagttcaagaccagcctgggcaacatagggagacccccatctttacaaagaaaaaaaaaaaggggaaaagaaaatcttttaaatctttggatttgatcactacaagtattattttacaagtgaaataaacataccattttcttttagattgtgtcattaaatggaatgaggtctcttagtacagttattttgatgcagataattccttttagtttagctactattttaggggattttttttagaggtaactcactatgaaatagttctccttaatgcaaatatgttggttctgctatagttccatcctgttcaaaagtcaggatgaatatgaagagtggtgtttccttttgagcaattcttcatccttaagtcagcatgattataagaaaaatagaaccctcagtgtaactctaattcctttttactattccagtgtgatctctgaaattaaattacttcaactaaaaattcaaatactttaaatcagaagatttcatagttaatttattttttttttcaacaaaatggtcatccaaactcaaacttgagaaaatatcttgctttcaaattgacactgatt

SEQ ID NO: 95832 - DNA, 1657 bp, Homo sapiens
ggcacgagggtccgcgcgcccgtcccgtcgccgccgccgccgccgcagacccctcggtcttgctatgtcgagctcacccgtgaagcgtcagaggatggagtccgcgctggaccagctcaagcagttcaccaccgtggtggccgacacgggcgacttccacgccatcgacgagtacaagccccaggatgctaccaccaacccgtccctgatcctggccgcagcacagatgcccgcttaccaggagctggtggaggaggcgattgcctatggccggaagctgggcgggtcacaagaggaccagattaaaaatgctattgataaactttttgtgttgtttggagcagaaatactaaagaagattccgggccgagtatccacagaagtagacgcaaggctctcctttgataaagatgcgatggtggccagagccaggcggctcatcgagctctacaaggaagctgggatcagcaaggaccgaattcttataaagctgtcatcaacctgggaaggaattcaggctggaaaggagctcgaggagcagcacggcatccactgcaacatgacgttactcttctccttcgcccaggctgtggcctgtgccgaggcgggtgtgaccctcatctccccatttgttgggcgcatccttgattggcatgtggcaaacaccgacaagaaatcctatgagcccctggaagaccctggggtaaagagtgtcactaaaatctacaactactacaagaagtttagctacaaaaccattgtcatgggcgcctccttccgcaacacgggcgagatcaaagcactggccggctgtgacttcctcaccatctcacccaagctcctgggagagctgctgcaggacaacgccaagctggtgcctgtgctctcagccaaggcggcccaagccagtgacctggaaaaaatccacctggatgagaagtctttccgttggttgcacaacgaggaccagatggctgtggagaagctctctgacgggatccgcaagtttgccgctgatgcagtgaagctggagcggatgctgacagaacgaatgttcaatgcagagaatggaaagtagcgcatccctgaggctggactccagatctgcaccgccggccagctgggatctgactgcacgtggcttctgatgaatcttgcgttttttacaaattggagcagggacagatcatagatttctgattttatgtaaaattttgcctaatacattaaagcagtcacttttcctgtgctgtttcaaaaaaaaaaaaaaaaaaaaaaaaaaaaaaaaggggggggcgggcccaaaagtttccccccggggggcccaggttataccgcgcgttccccaaggttttctgggttccaagaggggcgccccatatataggggagcgctcggatattatatataagcgcataggcgcacggggcgcgcgctcggtttaacacaagcggtcgggagacggggagacaacaccggggatagcgcttggggagacctcttggggagagaagagagagcccttatacttctcgggggggctggcgaccatatatttggggacacaaatcttcaccttacgagagagattttaaagccgcctctaagggggggacactttataacaatttttaaagcgtgggtcataaggggggac

SEQ ID NO: 95833 - DNA, 1585 bp, Homo sapiens
ggcacgagggtccgcgcgcccgtcccgtcgccgccgccgccgccgcagacccctcggtcttgctatgtcgagctcacccgtgaagcgtcagaggatggagtccgcgctggaccagctcaagcagttcaccaccgtggtggccgacacgggcgacttccacgccatcgacgagtacaagccccaggatgctaccaccaacccgtccctgatcctggccgcagcacagatgcccgcttaccaggagctggtggaggaggcgattgcctatggccggaagctgggcgggtcacaagaggaccagattaaaaatgctattgataaactttttgtgttgtttggagcagaaatactaaagaagattccgggccgagtatccacagaagtagacgcaaggctctcctttgataaagatgcgatggtggccagagccaggcggctcatcgagctctacaaggaagctgggatcagcaaggaccgaattcttataaagctgtcatcaacctgggaaggaattcaggctggaaaggagctcgaggagcagcacggcatccactgcaacatgacgttactcttctccttcgcccaggctgtggcctgtgccgaggcgggtgtgaccctcatctccccatttgttgggcgcatccttgattggcatgtggcaaacaccgacaagaaatcctatgagcccctggaagaccctggggtaaagagtgtcactaaaatctacaactactacaagaagtttagctacaaaaccattgtcatgggcgcctccttccgcaacacgggcgagatcaagctggtgcctgtgctctcagccaaggcggcccaagccagtgacctggaaaaaatccacctggatgagaagtctttccgttggttgcacaacgaggaccagatggctgtggagaagctctctgacgggatccgcaagtttgccgctgatgcagtgaagctggagcggatgctgacagaacgaatgttcaatgcagagaatggaaagtagcgcatccctgaggctggactccagatctgcaccgccggccagctgggatctgactgcacgtggcttctgatgaatcttgcgttttttacaaattggagcagggacagatcatagatttctgattttatgtaaaattttgcctaatacattaaagcagtcacttttcctgtgctgtttcaaaaaaaaaaaaaaaaaaaaaaaaaaaaaaaaggggggggcgggcccaaaagtttccccccggggggcccaggttataccgcgcgttccccaaggttttctgggttccaagaggggcgccccatatataggggagcgctcggatattatatataagcgcataggcgcacggggcgcgcgctcggtttaacacaagcggtcgggagacggggagacaacaccggggatagcgcttggggagacctcttggggagagaagagagagcccttatacttctcgggggggctggcgaccatatatttggggacacaaatcttcaccttacgagagagattttaaagccgcctctaagggggggacactttataacaatttttaaagcgtgggtcataaggggggac

SEQ ID NO: 95834 - DNA, 1599 bp, Homo sapiens
  misc_feature (1253)..(1253): n is a, c, g, or t
  misc_feature (1297)..(1297): n is a, c, g, or t
  misc_feature (1303)..(1303): n is a, c, g, or t
  misc_feature (1334)..(1334): n is a, c, g, or t
  misc_feature (1382)..(1382): n is a, c, g, or t
  misc_feature (1411)..(1411): n is a, c, g, or t
  misc_feature (1421)..(1421): n is a, c, g, or t
  misc_feature (1426)..(1426): n is a, c, g, or t
  misc_feature (1581)..(1581): n is a, c, g, or t
  misc_feature (1593)..(1593): n is a, c, g, or t
ggcacgagggtccgcgcgcccgtcccgtcgccgccgccgccgccgcagacccctcggtcttgctatgtcgagctcacccgtgaagcgtcagaggatggagtccgcgctggaccagctcaagcagttcaccaccgtggtggccgacacgggcgacttccacgccatcgacgagtacaagccccaggatgctaccaccaacccgtccctgatcctggccgcagcacagatgcccgcttaccaggagctggtggaggaggcgattgcctatggccggaagctgggcgggtcacaagaggaccagattaaaaatgctattgataaactttttgtgttgtttggagcagaaatactaaagaagattccgggccgagtatccacagaagtagacgcaaggctctcctttgataaagatgcgatggtggccagagccaggcggctcatcgagctctacaaggaagctgggatcagcaaggaccgaattcttataaagctgtcatcaacctgggaaggaattcaggctggaaaggagctcgaggagcagcacggcatccactgcaacatgacgttactcttctccttcgcccaggctgtggcctgtgccgaggcgggtgtgaccctcatctccccatttgttgggcgcatccttgattggcatgtggcaaacaccgacaagaaatcctatgagcccctggaagaccctggggtaaagagtgtcactaaaatctacaactactacaagaagtttagctacaaaaccattgtcatgggcgcctccttccgcaacacgggcgagatcaaagcactggccggctgtgacttcctcaccatctcacccaagctcctgggagagctgctgcaggacaacgccaagctggtgcctgtgctctcagccaaggcggcccaagccagtgacctggaaaaaatccacctggatgagaagtctttccgttggttgcacaacgaggaccagatggctgtggagaagctctctgacgggatccgcaagtttgccgctgatgcagtgaagctggagcggatgctgacagaacgaatgttcaatgcagagaatggaaagtagcgcatccctgaggctggactccagatctgcaccgccggccagctgggatctgactgcacgtggcttctgatgaatcttgcgttttttacaaattggagcagggacagatcatagatttctgattttatgtaaaattttgcctaatacattaaagcagtcacttaaaaaaaaaaanaaaataaaaaaaaaaaaaaaaaaaaaaaaaaaaaagcggccgcncgaatngtcgacgcggccgcgaattcgcggggcaacngggcctgcgagaagacgacagaagggggcttctgtgagtttttccggngcacgcgagtcttctgaaacgtcagctgngctcccctcngagtnctgagcccgcggaaccgcagccatgactgaggctgatgtgaatccaaaggcctatccccttgccgatgcccacctcaccaagaagctactggacctcgttcagcagtcatgtaactataagcagcttcggggagccaatgagggccaccccctcnaggggcatctcngagttc

SEQ ID NO: 95835 - DNA, 667 bp, Homo sapiens
aggctggtactgcgccccgggagttacggatgtgaagctggagcggatgctgacagaacgaatgttcaatgcagagaatggaaagtagcgcatccctgaggctggactccagatctgcaccgccggccagctgggatctgactgcacgtggcttctgatgaatcttgcgttttttacaaattggagcagggacagatcatagatttctgattttatgtaaaattttgcctaatacattaaagcagtcacttttcctgtgctgtttcaaaaaaaaaaaaaaaaaaaaaaaaaaaaaaaaggggggggcgggcccaaaagtttccccccggggggcccaggttataccgcgcgttccccaaggttttctgggttccaagaggggcgccccatatataggggagcgctcggatattatatataagcgcataggcgcacggggcgcgcgctcggtttaacacaagcggtcgggagacggggagacaacaccggggatagcgcttggggagacctcttggggagagaagagagagcccttatacttctcgggggggctggcgaccatatatttggggacacaaatcttcaccttacgagagagattttaaagccgcctctaagggggggacactttataacaatttttaaagcgtgggtcataaggggggac

SEQ ID NO: 95836 - DNA, 1646 bp, Homo sapiens
  misc_feature (1300)..(1300): n is a, c, g, or t
  misc_feature (1344)..(1344): n is a, c, g, or t
  misc_feature (1350)..(1350): n is a, c, g, or t
  misc_feature (1381)..(1381): n is a, c, g, or t
  misc_feature (1429)..(1429): n is a, c, g, or t
  misc_feature (1458)..(1458): n is a, c, g, or t
  misc_feature (1468)..(1468): n is a, c, g, or t
  misc_feature (1473)..(1473): n is a, c, g, or t
  misc_feature (1628)..(1628): n is a, c, g, or t
  misc_feature (1640)..(1640): n is a, c, g, or t
ggcacgagggtccgcgcgcccgtcccgtcgccgccgccgccgccgcagacccctcggtcttgctatgtcgagctcacccgtgaagcgtcagaggatggagtccgcgctggaccagctcaagcagttcaccaccgtggtggccgacacgggcgacttccacgccatcgacgagtacaagccccaggatgctaccaccaacccgtccctgatcctggccgcagcacagatgcccgcttaccaggagctggtggaggaggcgattgcctatggccggaagctgggcgggtcacaagaggaccagattaaaaatgctattgataaactttttgtgttgtttggagcagaaatactaaagaagattccgggccgagtatccacagaagtagacgcaaggctctcctttgataaagatgcgatggtggccagagccaggcggctcatcgagctctacaaggaagctgggatcagcaaggaccgaattcttataaagctgtcatcaacctgggaaggaattcaggctggaaaggagctcgaggagcagcacggcatccactgcaacatgacgttactcttctccttcgcccaggctgtggcctgtgccgaggcgggtgtgaccctcatctccccatttgttgggcgcatccttgattggcatgtggcaaacaccgacaagaaatcctatgagcccctggaagaccctggggtaaagagtgtcactaaaatctacaactactacaagaagtttagctacaaaaccattgtcatgggcgcctccttccgcaacacgggcgagatcaaagcactggccggctgtgacttcctcaccatctcacccaagctcctgggagagctgctgcaggacaacgccaagctggtgcctgtgctctcagccaaggcggcccaagccagtgacctggaaaaaatccacctggatgagaagtctttccgttggttgcacaacgaggaccagatggctgtggagaagctctctgacgggatccgcaagtttgccgctgatgcagtgaagctggagcggatgctgacagaacgaatgttcaatgcagagaatggaaagtagcgcatccctgaggctggactccagatctgcaccgccggccagctgggatctgactgcacgtggcttctgatgaatcttgcgttttttacaaattggagcagggacagatcatagatttctgattttatgtaaaattttgcctaatacattaaagcagtcacttttcctgtgctgtttcaaaaaaaaaaaaaaaaaaaaaaaaaaaaaaaaaaaaaaaaaaanaaaataaaaaaaaaaaaaaaaaaaaaaaaaaaaaagcggccgcncgaatngtcgacgcggccgcgaattcgcggggcaacngggcctgcgagaagacgacagaagggggcttctgtgagtttttccggngcacgcgagtcttctgaaacgtcagctgngctcccctcngagtnctgagcccgcggaaccgcagccatgactgaggctgatgtgaatccaaaggcctatccccttgccgatgcccacctcaccaagaagctactggacctcgttcagcagtcatgtaactataagcagcttcggggagccaatgagggccaccccctcnaggggcatctcngagttc

SEQ ID NO: 95837 - DNA, 1074 bp, Homo sapiens
acacacaagcctaaaagatgaacgatacggtgtttatacttctccctaggaagagccataggccttgggccccatcaaggactcttcagtgtttgaattttaagatttgcctccagtatgaaacgagaggactttgccttcactactcagcttgaagaaagaggaagagatttatttggggtggagaatgtgaagccatcccagtgactgcctcttccacaaattgtctttctgttccaaggcaatgacctcagtgttgtcaactaggaggcacctgagctagtaaggagaagccaagcaagagagagatttgcctcatccccactggttaaatagtttgctcataaaaaatttcggaaatatatttattaaggataactatgtgcaacagtttctaaaatgtcatttgggatgttgcatgagtgatcaatgttagggtggcatgaaaatcctgaactgtagctagcaggctttagcagctgaaggcattttgtttaatactgtaaatacagtaccaaagtttaactgcattgacgattattttacagctgacccatggcccacagagtggttaaaagcaagggcatttgaggcaggtggcctgagggttcatgtccctgctgcatcatttacaatctccatgaccatgggcaagttacttaacttctgtaagccttagttttctccccataagttaaaataaagctgtaccttccttatgagtttggtaagacaaataccttagacagtgcatataaagtaattaacaccatgccttgaatgcagtagttgctccaaaaatattaattattgccactaccattctactatcattacaattgttattttttcatatatttgctcaaaaatacagtggaaatgtaagcatgtaaacgttattgtgttcagtataatatacaaacattagcataagtatttcctttctcatgagcttttgcagagatcacctgctaatgaatgtggaaaaatagaaataaatttagaacatttctgtagaatcaaagttattttcaggttctctaacacttgaaaacaataaaagctgatcaaaaa

SEQ ID NO: 95838 - DNA, 312 bp, Homo sapiens
tggcagcgattagtcacacttggttctaaccatgcttccaagcctggcttatctttaacacccagtctacctcaagacaaacaatataaaggagagaaaaacactttggggtcatttagaattacttgcatcacagatccaatgacaaaggcagccatcgagccgcagagcagggagaggaggctgggtgccaggtccgcagcttggctgccagctcctcgccttgtgcaaaaagtgcttttgttagacattccttgtcaggacttagaaactgatggtttgttccagaagttctttatcctgagatagctc

SEQ ID NO: 95839 - DNA, 504 bp, Homo sapiens
gcatgaaccaccacacctggcccctgttgctttctctaagcatatgttacggactctaaaatccttgatgatgacacaagatgagaaagggcatatatgtggatggatatagatatttcatgtatataccaatgctacccaaaatgcagtctccagaccaatgttggtttgcaaattgtttgttatagctcaccatgagataacattataaatcaaatacatcactaagcacactgcttagttaaactgacttgtttttcacagtaatactttcttgatgaaggaagtattgccttgatttacattttggtacaaattcctcatcttgtcataaacctgcactactgacgtatctatacctgcatactattcaactcattatacactcacatctttactcaaaacaaagctattcagacatatcaaatcttcatcacagttccccctcttaaaatgtactttctttccaaaaaggaaataaaaccagtatgccttcacaatgaa

SEQ ID NO: 95840 - DNA, 356 bp, Homo sapiens
tcatgcccctcagtcaaactccctctgacgaggcaagagctcaggttgctgcgtgcaggcctctatggatccaccgccgcggacgtccctaccgccaaacaccccatcttagcggatgttttctctcccaaatgttccctctttccagctgtttcctttgcacggcatgcaatcttcctaggtgttccgtctacccaccgtggaatctgctcagaggttccttctgcccaccatgagacctgcttaagggttttctgctgttgaccacgccatcttcgcacttaggccttctgctaaacgtgcagtctacctgagtgttccttctgccaaacagctagttgtgtccgctccctccc

SEQ ID NO: 95841 - DNA, 333 bp, Homo sapiens
gttgcagtggccgagatcgtgccattgcactccagagtgagcaacaacagcaggggggtaggcagggagggagaagaacaaaaagctactttatgcttatttaaagttatatgatactgaatcatagtaaaaacataagaactgggtatgtatttttaaacatatcctaaggaaacttatcttaaaaaattaataaactcgttttggctttaaccatactagacagaatacattcagtgtaacgctcaaattctgtgaagtgcgtccctatagtttgttgtgtgtgaataataggatgaaaaatgcttagaacattcggtgagccactcaagg

SEQ ID NO: 95842 - DNA, 708 bp, Homo sapiens
agcggagtaaatcttgagcatcataatatttcatccataaagatctcagtatgtgcccctaataaataaggactcctttaaaaaatacacaaccacaatttcattatcacgcctaaaagagcttagtaatcaaggattccttaattcataaaatattcaacaagtgcttacatttctccaactgtctcaaattgtattcttttacattttgctagtttgaaacagaatccaaataagccccatactctgtaattggttgatggagctcttcatactcttttaatctacagatttcctccctctatttcttttttccaccttgccatttagtaaaccagctcatttgtttaaatttccaatagtctggattttgattattgtgtcaccatgtgtcatttaacctattcctctgtttctgtatattctacaaattgttagatccagagggttgatcagattcaggttcaattttttggtacgaatacttcctcggtggtatttcacacttctatctggaagcatgtaactatgcctggttgcttctgtgacattagcagacactgatgaccactgccccttatttcattaggagcagacacccaattacgaaccacacattttgattaatcgctgatattatatgacttcgttggatcctactgttttacttaaaaatttggtctggaggctgaatcaggggagaattgc

SEQ ID NO: 95843 - DNA, 431 bp, Homo sapiens
caactaatttttaaagttttttgtagagacagggtcttgctttgttgcccaggctgttctcaaactgttggcctcaagcaatcctcttgccttggcctcccaaagtgttgggattacaggtatgagccaccacacctggcaaaaagtttttattcttaacatttagtcacttggaaaactcactgacttagaattttatataacaataaatgaggtatttttgtatttggctttgctactccgtttgcccacttccaagtctacgacttgagcactaaatgctaacataattcaagagtacagtatgatgaagtgaacatgctgggatagtttttctttaatgaggggagttggctaacacatccagctagttatttgacatacaaatactaatcaataaatatttctcaagtataagctgtcataactca

SEQ ID NO: 95844 - DNA, 189 bp, Homo sapiens
tagagaaagacggagaggaaaggggaaggacagggaggtggatgatggatgggctccatggaaccgtcacttcatcttctcctcctctccctgtggcttctcgttcagaggcccaaacttgactgtcagagctgggagagccaggatgcacaaacaccccaaaggagattttcggcagcagcagcagca

SEQ ID NO: 95845 - DNA, 415 bp, Homo sapiens
gttaaagaagtttccttatatacttactgtgctaagactatttaagaagataaaatatagggcatataagcttagaagttgccactgtgttctaacaacaagtattaataaaaatctgaacaaactgaaaaatcagcaactcttcttagatccatcagagaagtgaggtcacagggcaatctaccaccccccaaattagagaaataggcaactacaaagaatcaccacaacttacaggagcagaaacccaagagcagaaatctccagaccatccaatgccagggaaggaacacctgaattacaactgctggtggtgcagtgaggtcaagtctgacagtttacgaaccccagggaaagccagtcatagggagattcccatgcttttctgaattttacttccaggagctctgacaag

SEQ ID NO: 95846 - DNA, 445 bp, Homo sapiens
cagggatcagatctctgagtcaggcagctgggtggatggcagcttttccccgtgtggtggaggcagtggcatgggcagaaaccagtggggagaagtgaggcatgctacaaacccacgtcctatcccatggcagctggcagaattttccaaagagcattccttctcccagagcatcaggaggcttcaggtaagagaagcacagctgctccgaccacacctcactgtcgtccctccctgggagtgaattccttttctgtaaggctggaaggaccacaggattgggggtatacacagcagaaatttgctttctcaccgttctggaagctggaagcctgagaccaaagtgttggtagatcgattccttccgaggcctctctccttgccttgcagatggccgacttctccctgtatcctcacatggtcttcctctctgcagctgtgttct

SEQ ID NO: 95847 - DNA, 287 bp, Homo sapiens
ggccctgatccaacaggattagtgtcctttcaagaaaaacaccagaaggctccctcttgttctctatccaccatgtgaggacacagcaagccaagaagagagccggcaccagaacccactctgctggaccttgatcatggacctttctgcctcttgacctgtgaggttcactgatacggtctcagattccactccacaactactctctacaaaactatcacttgatgggttttgctgtagcatcaaagaagaatacccacaattatccgaaaagctgtgaaatactc

SEQ ID NO: 95848 - DNA, 305 bp, Homo sapiens
atgaataaggtatgtaagaaatcttcctttctgttatgaggtaagagaaaaatgaggttatttaaacaatccatgtttatatgatggccatcttttaacaaaaattcttttcaatacattaaaaatgatcattgaatcatcaaatgtagttttgtcctctgatagacaaaagagtagtgtctagactgtctgatgaatctatttgactgaaagataaaaacaaatgtggtcttgttgtcatctctgtggccttctgaaagcccagtgtacagaggtcacacagggagccccaagagggtggtcag

SEQ ID NO: 95849 - DNA, 349 bp, Homo sapiens
gggaaagctgaaggcactttgcacaggacctagggcagacggcctaattctacacaggacagttaataaaaaacagtgttactgatggtattatttaacccgagaaaagattacaaattaacaaactcagtagttatctatttgtgggccagtatgaaagccagatagttgagaagactttctagactttctgaatcatgttatcaagtttaaacatacctccttagctctctccaaagcatttgctgtaagtcaacaggtcctgctaaaaagagattcactgacaaccaaaattgtttatgctactaagtggttaaagagcaaaacatcagcaagtagttatagtgtg

SEQ ID NO: 95850 - DNA, 311 bp, Homo sapiens
ggtgatctgccagccttgcctcccaaagtgctgggattacaggcatgagcactgtgcctggcctgaaatttatggttattaatgactacattaaaaaaggaaatatcacaaattaataacataaccaccagccttagaaacaagaaaataaaaaatcaaactaaactcaaataagaagaaagaaatagtaaagactcgagtagaaataagcaaaatagagaatacgaacacagtagagaaaatcaatgaaacaaaaagttgattctttgaaaagatcaacaaaaatgacaaacatttagctagactggcca

SEQ ID NO: 95851 - DNA, 382 bp, Homo sapiens
aggtcataggaaacagtgctgtgcagccaactctcttcagaaacccagcaatggagcaactaagttacccacgaggtgtaattgtgaattttcttggctacttcctccaccttaggaaatagatgaagtgaaattgtttcttctccctttaccctctggtgtctggaggggatatctgggatcatgctttcttattatttctcttttctttccctcagatcccttctagaaactaccaagaaatattcagctgacttgcaggaatactttttcagtaggcagataaaccatatcccccaaagtaatatgtagctttctttctttctttctttcttttttgagatggggtctcactctgtcacccaggttggagtgcagtggc

SEQ ID NO: 95852 - DNA, 208 bp, Homo sapiens
atgcccagctaatttttgtatttttagtagtgacaacgcaatattggccaggctggtctcaaactcctgacctcaagtgatccgcctgcctcagcttcccaaagtgctgggattacaggtgtgagccaccacgcccagcctctagtgtgattttaacatgctccttcaacttctctgtttcctgtaacctggttactctatatagctt

SEQ ID NO: 95853 - DNA, 309 bp, Homo sapiens
cctggtgttatctcataggactgtagtgaggagtatgatgagaaggcatatacatactgagtgtagtgtttgacatatagaaagcacataataaggctgaacgcggtggctcatgcctgtaatcccagcactttgggaggccgaggtcgggggatcacctgaggtagggagtttgagaccagcctgaccaacatggagaaaccccatctctactaaaaatacaaagttagtcaggcgtggttgcgcatgcctgtaatactagctactcgggaggctgaggcaggagaatcgcttgaacccgggaggtag

SEQ ID NO: 95854 - DNA, 220 bp, Homo sapiens
ctcaggcgatccgcccgcctcggcctcccaaagtgctggggttacaggcgtgagccaccatgtccggcctcatgtagttattttcacaagaagtgtcactatattaatacattgaaaaagagcaaggtgaattgtcaatgtgaattttctaaacatggccccaggtcacattcttgatcaattaaagcacttcacctctttaaaattcaagacttaaggc

SEQ ID NO: 95855 - DNA, 193 bp, Homo sapiens
ccatctagtttttacatttttagtagaggcgggatttcaccatgttggtcaggctggtctcgaactccttacctcgtgatccgcccgcctcagcctcccaaagtgctggaattacaggcatgagccaccgtgcctggccgagccttgttttattactgaattatcttcacagttccctaaagtacctggcaaa

SEQ ID NO: 95856 - DNA, 310 bp, Homo sapiens
agtcgtccgagacgccgcgcggtgatgctcctgaaaacgtctgcccggcgtaggggaacccagcatgattttcaggatcttatattgcactttaaacacacctaaaattgacatggaaagactcttaggaggacaactaggactagaagatttcatatttgcccatgtgaaaggaatcgaaaaagaagtgaatgtgtataaatctgaggattcacttggtctcaccattacagataatggtgttggctatgcttttataaagattcttatctgctgcctctgatagtgaaatgtgctgtgacttttctct

SEQ ID NO: 95857 - DNA, 2746 bp, Homo sapiens
aggctgggcgggcgggcggctgctccggtccaggggtggaggtcggggccctgacccgacgcagccaggcggaagcgcggctgccattggaggctgcttttacctgcgcggggcccggggcgcaaagtccgaggcgccggggggaggaggcggcggacggcagcgcaggtgggcccgcgctctcggccctgcaagatgcccctgaagctgcgggggaagaagaaggccaagtccaaggagaccgccgggctggtggagggcgagccgacgggcgcgggcggcgggagcctctcagcgtcccgggctcccgcacgcaggctggtcttccacgcgcagctggcgcacggtagtgccacgggccgagtggagggcttctccagcatccaggagctctacgcccagatcgcgggcgcgtttgaaatctcgccgtcggagatcttatattgcactttaaacacacctaaaattgacatggaaagactcttaggaggacaactaggactagaagatttcatatttgcccatgtgaaaggaatcgaaaaagaagtgaatgtgtataaatctgaggattcacttggtctcaccattacagataatggtgttggctatgcttttataaagagaattaaagatggtggtgttattgactcagttaaaacaatctgtgttggggatcatattgaatccataaatggagaaaatattgttgggtggcgtcactatgatgttgctaagaagttaaaggaattaaaaaaggaggaactctttactatgaagttaatagaacctaagaaggcatttgaaatagagctgaggtcaaaggctggaaagtcatcaggagaaaaaattggttgtggaagggcaacacttcgcctgagatcaaaaggtcctgccaccgtggaagaaatgccttctgaaaccaaagcaaaggcaattgaaaagattgatgatgttcttgagttgtacatgggaattcgagatattgatttagccaccacaatgtttgaagctggaaaggacaaagtaaatccagatgaatttgctgtggcacttgacgaaactcttggagactttgcgttcccagacgaatttgtctttgatgtttggggagtcattggtgatgccaaacgaagaggattatgatgtgtacactccatctctgaagaaacaacccatcgttcttttttttctcttttttaaaaagtcctataagatctgtttttggacacctttactaactctggtttaatttcatgtgtatggaatatattctttgaaatataattttggtaattttgatttctgggcactttttaacattgctgatgtagtatgcttaagagaaatgacctaaataaggatcaattgtaatattcattcaaaaggtttttaaaagtaagttttaaggagtatttctcgacagatgattttcttctccattaatacccatgctttgtttttcacatataaatagatgatttcaatagctttgtagttttttttcaaaatcttaatgtaaactaggattggagtatgatttacctcatagtatcttcactgtgttatcctagtttgaacaggatatgttcaggaaatgaaaggtgaattatgccccttattggtctagaagcattggtttttttttgatcctctgagtaagggaaggaagattcctgtggcatgttgatttctatggccaactttctctctttgtaaaacaaagattgattgattttcttgtatgcttctttatacatgctcttaaaacttgtggttgaaatctgtgctgtgtgtgtgtgtctctgcatgtgtaaaagaagggtaaaaaagagatgggtagggtagaactacttgcatttgatttttttttcagtccttaaaacattatttctttttttcactcatagccacttttatgttaccttttataagcactccagggaagattttatatttttttgtagagtttttggaaagatatttactcaaaataactatgctttagaacttttttttttttttttttttttttggttaaacagcagcactttttagttccctaaactttagaagaaatgctatcagaaatagatttccttccagtggaaagaaaggaggaagggagaattgagaaaatatattagtctattattttagagttctaatacactctaaattatagagaaaattgagagtaaatgactgtcttatcactcttatttgacatttcgtaggtgtaagagaaatggaaatgaatggtttcaacaaagatcatttaatacagcagagcatggcatgaccaagcatctttgtaaagtgttagatggaaaatgctgtgtgctgccatggtaatcagaaataataacctgttagggatgtattctaggaaatcagaagtagttctcttttcttgctggattattgcttagataactcttgttttctggtaaaactttagttgtattgccatccactcctttttcaaatgagtttaatgccataaagctgatattctttgtccgattaatttgaaatctgcacagaagctgttttagtcattaatgtgtaacaaaagtagcttatagaatatggactgccttattgctgttgcttatcatttgaaaataaaatccagctcaggttgtaacttgttggtactcgtttagtgagttcgttttggaggttctgaaatacctattaattcttaatattacctctcttggaaagacacaaaaaaagagctgtt

SEQ ID NO: 95858 - DNA, 2645 bp, Homo sapiens
aggctgggcgggcgggcggctgctccggtccaggggtggaggtcggggccctgacccgacgcagccaggcggaagcgcggctgccattggaggctgcttttacctgcgcggggcccggggcgcaaagtccgaggcgccggggggaggaggcggcggacggcagcgcaggtgggcccgcgctctcggccctgcaagatgcccctgaagctgcgggggaagaagaaggccaagtccaaggagaccgccgggctggtggagggcgagccgacgggcgcgggcggcgggagcctctcagcgtcccgggctcccgcacgcaggctggtcttccacgcgcagctggcgcacggtagtgccacgggccgagtggagggcttctccagcatccaggagctctacgcccagatcgcgggcgcgtttgaaatctcgccgtcggagatcttatattgcactttaaacacacctaaaattgacatggaaagactcttaggaggacaactaggactagaagatttcatatttgcccatgtgaaaggaatcgaaaaagaagtgaatgtgtataaatctgaggattcacttggtctcaccattacagataatggtgttggctatgcttttataaagagaattaaagatggtggtgttattgactcagttaaaacaatctgtgttggggatcatattgaatccataaatggagaaaatattgttgggtggcgtcactatgatgttgctaagaagttaaaggaattaaaaaaggaggaactctttactatgaagttaatagaacctaagaaggcatttgaaatagagctgaggtcaaaggctggaaagtcatcaggagaaaaaattggttgtggaagggcaacacttcgcctgagatcaaaaggtcctgccaccgtggaagaaatgccttctgaaaccaaagcaaaggcaattgaaaagattgatgatgttcttgagttgtacatgggaattcgagatattgatttagccaccacaatgtttgaagctggaaaggacaaagtaaatccagatgaatttgctgtggcacttgacgaaactcttggagactttgcgttcccagacgaatttgtctttgatgtttggggagtcattggtgatgccaaacgaagaggattatgatgtgtacactccatctctgaagaaacaacccatcgttcttttttttctcttttttaaaaagtcctataagatctgtttttggacacctttactaactctggtttaatttcatgtgtatggaatatattctttgaaatataattttggtaattttgatttctgggcactttttaacattgctgatgtagtatgcttaagagaaatgacctaaataaggatcaattgtaatattcattcaaaaggtttttaaaagtaagttttaaggagtatttctcgacagatgattttcttctccattaatacccatgctttgtttttcacatataaatagatgatttcaatagctttgtagttttttttcaaaatcttaatgtaaactaggattggagtatgatttacctcatagtatcttcactgtgttatcctagtttgaacaggatatgttcaggaaatgaaaggtgaattatgccccttattggtctagaagcattggtttttttttgatcctctgagtaagggaaggaagattcctgtggcatgttgatttctatggccaactttctctctttgtaaaacaaagattgattgattttcttgtatgcttctttatacatgctcttaaaacttgtggttgaaatctgtgctgtgtgtgtgtgtctctgcatgtgtaaaagaagggtaaaaaagagatgggtagggtagaactacttgcatttgatttttttttcagtccttaaaacattatttctttttttcactcatagccacttttatgttaccttttataagcactccagggaagattttatatttttttgtagagtttttggaaagatatttactcaaaataactatgctttagaacttttttttttttttttttttttttggttaaacagcagcactttttagttccctaaactttagaagaaatgctatcagaaatagatttccttccagtggaaagaaaggaggaagggagaattgagaaaatatattagtctattattttagagttctaatacactctaaattatagagaaaattgagagtaaatgactgtcttatcactcttatttgacatttcgtaggtgtaagagaaatggaaatgaatggtttcaacaaagatcatttaatacagcagagcatggcatgaccaagcatctttgtaaagtgttagatggaaaatgctgtgtgctgccatggtaatcagaaataataacctgttagggatgtattctaggaaatcagaagtagttctcttttcttgctggattattgcttagataactcttgttttctggtaaaactttagttgtattgccatccactcctttttcaaatgagtttaatgccataaagctgatattctttgtccgattaatttgaaatctgcacagaagctgttttagtcattaatgtgtaacaaaagtagcttatagaatatggactgccttattgctgttgcttatcatttgaaaataaaatccagctcaggttgt

SEQ ID NO: 95859 - DNA, 1845 bp, Homo sapiens
  misc_feature (12)..(12): n is a, c, g, or t
acacctggtgtnctagaacccagttaagagcaattgaaaagattgatgatgttcttgagttgtacatgggaattcgagatattgatttagccaccacaatgtttgaagctggaaaggacaaagtaaatccagatgaatttgctgtggcacttgacgaaactcttggagactttgcgttcccagacgaatttgtctttgatgtttggggagtcattggtgatgccaaacgaagaggattatgatgtgtacactccatctctgaagaaacaacccatcgttcttttttttctcttttttaaaaagtcctataagatctgtttttggacacctttactaactctggtttaatttcatgtgtatggaatatattctttgaaatataattttggtaattttgatttctgggcactttttaacattgctgatgtagtatgcttaagagaaatgacctaaataaggatcaattgtaatattcattcaaaaggtttttaaaagtaagttttaaggagtatttctcgacagatgattttcttctccattaatacccatgctttgtttttcacatataaatagatgatttcaatagctttgtagttttttttcaaaatcttaatgtaaactaggattggagtatgatttacctcatagtatcttcactgtgttatcctagtttgaacaggatatgttcaggaaatgaaaggtgaattatgccccttattggtctagaagcattggtttttttttgatcctctgagtaagggaaggaagattcctgtggcatgttgatttctatggccaactttctctctttgtaaaacaaagattgattgattttcttgtatgcttctttatacatgctcttaaaacttgtggttgaaatctgtgctgtgtgtgtgtgtctctgcatgtgtaaaagaagggtaaaaaagagatgggtagggtagaactacttgcatttgatttttttttcagtccttaaaacattatttctttttttcactcatagccacttttatgttaccttttataagcactccagggaagattttatatttttttgtagagtttttggaaagatatttactcaaaataactatgctttagaacttttttttttttttttttttttttggttaaacagcagcactttttagttccctaaactttagaagaaatgctatcagaaatagatttccttccagtggaaagaaaggaggaagggagaattgagaaaatatattagtctattattttagagttctaatacactctaaattatagagaaaattgagagtaaatgactgtcttatcactcttatttgacatttcgtaggtgtaagagaaatggaaatgaatggtttcaacaaagatcatttaatacagcagagcatggcatgaccaagcatctttgtaaagtgttagatggaaaatgctgtgtgctgccatggtaatcagaaataataacctgttagggatgtattctaggaaatcagaagtagttctcttttcttgctggattattgcttagataactcttgttttctggtaaaactttagttgtattgccatccactcctttttcaaatgagtttaatgccataaagctgatattctttgtccgattaatttgaaatctgcacagaagctgttttagtcattaatgtgtaacaaaagtagcttatagaatatggactgccttattgctgttgcttatcatttgaaaataaaatccagctcaggttgtaacttgttggtactcgtttagtgagttcgttttggaggttctgaaatacctattaattcttaatattacctctcttggaaagacacaaaaaaagagctgtt

SEQ ID NO: 95860 - DNA, 778 bp, Homo sapiens
cttttggcatttctcatgagctcatcagcacaagagctaacattttccctgtttgttttcttttcagacacgaatgcatttgcttcagcaaaagagacatgtatcttagaaacctatcaaaaatatttgaatacagctacctcggcaatctctgctctacgggctcctccccccacctttcttttaacctttgcctgagaagaatttaaatggcatatttagtggctgtatattgtgcttcctgtacccactgctgcataaaagggattgatttaaatcgcttacagtaaccatgtgggggaggagggtctagttttctgcaccaaatgctccaggatgcataataagcaaccacaaatacagacaacaaatgagtgtgcttgcatttgtctcttctctggtaaagaattattctttagtacggatggactgcacacttttagcatcaacaagagagcagctcagatgtgcgagcaccaataaaggatacttaagcctccgtcccccaggtaatgagtctcagaaatgttggctaaaaaagtcagagaatgttcctatttataatttttttgaatcatgaaatttataacacctcccaaagcaggaacggaccaagtttaaagattacagctgagtgccagtaaagcgttaaaggcaaccattgttaataacaatcggctgaaaagcaagacacagctcatgctttggagccgtactaagagattcggcatctctaaaatcgctagagcctttgacaagccaggcataaatcaggagg

SEQ ID NO: 95861 - DNA, 272 bp, Homo sapiens
ctcaaaagccctgtgcattcaaaaaaggcttggttgggttatttccagttgtactgtcgggaaaagagctatttctgtcttttaactctcaaatacaaagatactgctcagtgggaatcaaacattcctaattttcatttatttatcttttcattttaattttggattgggggggtatctgcgcagctctgttagacggagtatattgcatggtgctgaggtctgggcttctgatggtcccgtcgttcaagtagcaaacgcgctgcgcgaaa

SEQ ID NO: 95862 - DNA, 2158 bp, Homo sapiens
  misc_feature (1060)..(1060): n is a, c, g, or t
  misc_feature (1467)..(1467): n is a, c, g, or t
  misc_feature (1505)..(1505): n is a, c, g, or t
  misc_feature (1777)..(1777): n is a, c, g, or t
  misc_feature (2048)..(2048): n is a, c, g, or t
  misc_feature (2080)..(2080): n is a, c, g, or t
ctccaacaggggagtgaagggacaggatggagcgggagcggcgccaaagcacggggagaaccagaggccgcaggaatggcagactctggacatgctcctagagatgggaggtcaaaatgatcaacgttcagggtcccttcatctcagagggtctcgagtcacctcatttaaaggtgggaactggggatcctggaacctcccctgcaccccagatgcttctggggcccttgagaacttgccctgagctgtcacctggcctagactcccagccactttcagggcacagagaaactgccctcactctgaaaatgtggagaccgggacccagagagtgtggcctgggacacctcctatccagccatacgccgcccaggactggctcaacagctccaccctccactgctgttcacccatgacacgtcacttcccacccgccactgctgcaccctggggaggggacccagtgcagtgatgcccaagttccagcgttcagactgcctgggagccctgagactccctgacccagcaggacgccccatcctgggtgagggggagagtggggtgggccagaaagcccacccagacaactgagacccctccccacctgctaccccatctgcttgggcccaggaatagaggggccaaggcagacccctcaacatacatgctgaaccctgatgtgtagccgcccacacaccatgagcccagattgtggcattcagtattttttctgacatcaaaacagtcttggcagggcacggtggctcacacttgtaatcctagtactttgggaggccgaggcaggtggatcacctgaggtcaggagttcgagatcagcctggccaacatggtgaaaccctgaaatacaaaaattagtcaggcatggtggtgggcgcctgtaatcccagctactcgggaggctgaggtgggagaattgcttgaacctgggaagtggaggctgcagtgagccgagatcgtgccacctacactccagcctgggtgacagagcaaactctctcttaaaaaaaaaaaaaaaaagaccagggcccggcgtggtggntcatgcctgtaatcccagtactttgggaggccgaggtgggcggatcacctgaggtcaggagtttgagaccagcctgaccaacatggagaaaccccatctctactaaaaatacaaaaaattagctggatgttattgcgggcacctgtaatcccagctacttgggtggccgaggcaggagaatcacttgaaccagggaggcagaggctgcggtgagccgagaccacaccattgcactccagcctgggcaacaagaacaaaactccatctgaaaaaaaaaaaatactgagccagtccatgtgcattatttcatttctggtggactcttcccgatgttaatttcacctgagatatttatgcatgtgctcatgtgaacacacacgtgcgtcagcacacactggcctgctcangcacacacctgcaagtgctgcttccagcctcctgccangaggccagcctggctccctccctgtggagtgggctctgcccacggggcagatggactaagacgaacgctcgttaagccccccagaagttgcctggcttggcactctctgcggtatctgaggcggggctcactcgcccatttgacagatggagaaactgatgcttagagatgtggagtgagtgcctgactcccccagcgcccccggaatcccccagccccaccgactctcccagatcccccgactcccccagcccccccaactcccccagccncaccagcacctgctcccaccctccccaaactcaaattgcacccgccccagcttcagggcttggttggggttcccttttcagtcaaggtacaacatccaggcggtaaaatgctcccatcagccacttactggcgcagtggctcatgccggtaatccagtactttgggaggccaaggcgggcagatcacaaggtcaggagttcaagaccagcctggccaatatggtgaaaaaaattagctggccgtggtggcacatgcccgtaatcccagctngtcaggaggctgaggcaggagaattgcttgancccaggaggcggaggttgcagtgagccgagattgtgccactgcactccagcctgggtgacagagcaagactccatctc

SEQ ID NO: 95863 - DNA, 446 bp, Homo sapiens
  misc_feature (18)..(18): n is a, c, g, or t
tgggtccagggcagcganctagtccatttgtccttttcgaagtgtggcctgggacacctcctatccagccatacgccgcccaggactggctcaacagctccaccctccactgctgttcacccatgacacgtcacttcccacccgccactgctggctcacctgtgacaccccaggcagctcagatgcccggcaggtcctgctggtgtgtgttagccggggtctccaaagaaccagagccagcaggggacacacccatctctgtatctggagaaaaagatcgatgagaaggaatctgctcctgtgatgatggaggctgacaagtcccgagagccacggttggcaccctggagacccctgagggtgataccaccactccaggctgaaagctggcaggcttgagaccctgggagagctggccctctgactcctgggacttcttattctat

SEQ ID NO: 95864 - DNA, 470 bp, Homo sapiens
agctatgcgcctcgtgcctgggagccttagggccacacggaagggtagaaatcagtttcaggtcaggaggtctggaacagctttgttaaacccagtttttttcctatgaaaatggctgcagacactgggggagggagagggtggccctgatcccgatgactctgaaacatgcttggccttccccagagattcctgctcccagcccaggcccagacggcaacagaagctcatggtgagttcaccccggtcctggtctggcacctcattgctggggaggtctcggcagtccagaggaggtagcccccaccctgggcatccatctgcccaggccccagcctccgcgggaagacccaattacagaagagagaagtatgtggagacccttggctgaggttgggggtcctggaagctggaggtagtgttcctgggtatagcatgatgggttgatgggtgggttttattctcttttt

SEQ ID NO: 95865 - DNA, 735 bp, Homo sapiens
agctatgcgcctcgtgcctgggagccttagggccacacggaagggtagaaatcagtttcaggtcaggaggtctggaacagctttgttaaacccagtttttttcctatgaaaatggctgcagacactgggggagggagagggtggccctgatcccgatgactctgaaacatgcttggccttccccagagattcctgctcccagcccaggcccagacggcaacagaagctcatggaatggcagactctggacatgctcctagagatgggaggtcaaaatgatcaacgttcagggtcccttcatctcagagggtctcgagtcacctcatttaaaggtggcctgggacacctcctatccagccatacgccgcccaggactggctcaacagctccaccctccactgctgttcacccatgacacgtcacttcccacccgccactgctggctcacctgtgacaccccaggcagctcagatgcccggcaggtcctgctggtgtgtgttagccggggtctccaaagaaccagagccagcaggggacacacccatctctgtatctggagaaaaagatcgatgagaaggaatctgctcctgtgatgatggaggctgacaagtcccgagagccacggttggcaccctggagacccctgagggtgataccaccactccaggctgaaagctggcaggcttgagaccctgggagagctggccctctgactcctgggacttcttattctat

SEQ ID NO: 95866 - DNA, 2661 bp, Homo sapiens
  misc_feature (18)..(18): n is a, c, g, or t
  misc_feature (869)..(870): n is a, c, g, or t
  misc_feature (901)..(901): n is a, c, g, or t
  misc_feature (926)..(926): n is a, c, g, or t
  misc_feature (1563)..(1563): n is a, c, g, or t
  misc_feature (1970)..(1970): n is a, c, g, or t
  misc_feature (2008)..(2008): n is a, c, g, or t
  misc_feature (2280)..(2280): n is a, c, g, or t
  misc_feature (2551)..(2551): n is a, c, g, or t
  misc_feature (2583)..(2583): n is a, c, g, or t
tgggtccagggcagcganctagtccatttgtccttttcgaagtgtggcctgggacacctcctatccagccatacgccgcccaggactggctcaacagctccaccctccactgctgttcacccatgacacgtcacttcccacccgccactgctggctcacctgtgacaccccaggcagctcagatgcccggcaggtcctgctggtaagagggaggcaggaacttgtcctgtctgggacccgggcattgctgggcgccggagggacctgggacctcaaccacgctgggagctggcctgtcgtacaggcggtgcctggcagatgtggacgggctctgcaggctcctggcggcccacccctgccttcgtgccatccttcctgggagtctcctggccaaggaggactcgaggcctgtcccacctgtgcccagggctcactgtggctcccttcagcggggctctgctctctccccgcctgcttcccctccagctcctgggctctgccccagcatccccccgagcctctcccattcctggccccagcctggccagggatcccagaggatgccttcgccagcccagccccttgcctggtggatcaccactcctgtctcctgctgctctgccccctgccccgggcctgggaaacctgggaggaccctgagggagggtcagggatgtgtgacaccagcaggaggctgacgagttccctggcaggaagcacactgcacagggagcctgccgccatgctgccactctcatgcccctgcggggccgcagagagggatgcctagggcggggtgggcagtggctgccgtaggggaggcgctctgggcagtgctgttccctgagaaactgcagccccaaggggcnngggcagggcctggcctgactgagtgggattnaaggggaggtagggtgggtgtgccntatgatgtaggccactgctgcaccctggggaggggacccagtgcagtgatgcccaagttccagcgttcagactgcctgggagccctgagactccctgacccagcaggacgccccatcctgggtgagggggagagtggggtgggccagaaagcccacccagacaactgagacccctccccacctgctaccccatctgcttgggcccaggaatagaggggccaaggcagacccctcaacatacatgctgaaccctgatgtgtagccgcccacacaccatgagcccagattgtggcattcagtattttttctgacatcaaaacagtcttggcagggcacggtggctcacacttgtaatcctagtactttgggaggccgaggcaggtggatcacctgaggtcaggagttcgagatcagcctggccaacatggtgaaaccctgaaatacaaaaattagtcaggcatggtggtgggcgcctgtaatcccagctactcgggaggctgaggtgggagaattgcttgaacctgggaagtggaggctgcagtgagccgagatcgtgccacctacactccagcctgggtgacagagcaaactctctcttaaaaaaaaaaaaaaaaagaccagggcccggcgtggtggntcatgcctgtaatcccagtactttgggaggccgaggtgggcggatcacctgaggtcaggagtttgagaccagcctgaccaacatggagaaaccccatctctactaaaaatacaaaaaattagctggatgttattgcgggcacctgtaatcccagctacttgggtggccgaggcaggagaatcacttgaaccagggaggcagaggctgcggtgagccgagaccacaccattgcactccagcctgggcaacaagaacaaaactccatctgaaaaaaaaaaaatactgagccagtccatgtgcattatttcatttctggtggactcttcccgatgttaatttcacctgagatatttatgcatgtgctcatgtgaacacacacgtgcgtcagcacacactggcctgctcangcacacacctgcaagtgctgcttccagcctcctgccangaggccagcctggctccctccctgtggagtgggctctgcccacggggcagatggactaagacgaacgctcgttaagccccccagaagttgcctggcttggcactctctgcggtatctgaggcggggctcactcgcccatttgacagatggagaaactgatgcttagagatgtggagtgagtgcctgactcccccagcgcccccggaatcccccagccccaccgactctcccagatcccccgactcccccagcccccccaactcccccagccncaccagcacctgctcccaccctccccaaactcaaattgcacccgccccagcttcagggcttggttggggttcccttttcagtcaaggtacaacatccaggcggtaaaatgctcccatcagccacttactggcgcagtggctcatgccggtaatccagtactttgggaggccaaggcgggcagatcacaaggtcaggagttcaagaccagcctggccaatatggtgaaaaaaattagctggccgtggtggcacatgcccgtaatcccagctngtcaggaggctgaggcaggagaattgcttgancccaggaggcggaggttgcagtgagccgagattgtgccactgcactccagcctgggtgacagagcaagactccatctc

SEQ ID NO: 95867 - DNA, 888 bp, Homo sapiens
gttcccttgaaaaatgaatgattaaatgaattaaacaacagttaaacaattagattcagtatgatattatgtgcatactgtacatacttttgtattttcaaggtcaatcattgcatagaaagaaattaatttttttaagaagttaaaaatatagtacttaatcttgaataaatttgttaataactagggcacattaaaatatgcctcaaacgtagtaaaattacattttaacatttatacaagaggttgtctagaatatcacaaaagaaaaataacctaaaaataaaaactttcccaaaacaaagactcaaaagcagcccaaaactgttacaacaataaaaataatgccacaatatttgtttctattttaattgaaaaaaggaaaagcagatttagttattactctaaatagatactttattgttgatttttctagatttaatagattcaatagtttgaacttaaaaccgtatttctcaattttactctaattttctaacctcaaacttaaaacacatcatttccctctttattttcccaccaaccacacacactagccatgtcattctatttgtatttacctcattctttttcacatactctttgtgtgtgattctgctttaccatcttttagaatatcttttctcaatttttcacctatatcaaatattgttttaatatatagcatattaatagaaaagctaaggtatagtaaggtaaacagatcggaagacaattgccattgaaaagatactcagaatttccaagagaagggagcatgtcacgccaggggagactacagggaagaactcaggtccatcaggaaacagagagagggaggaattcacgagcaagaccctagactgtggtgtttgcaggaagaaacca

SEQ ID NO: 95868 - DNA, 586 bp, Homo sapiens
caattatatgaagaataaataggagagtaagggtagaaagggctgaggacatgttaggaaaacatataatccaaggacatgtagggtgatggcaaaggagatggagaggtctatttggagataaactcagcaagatttgctggtcaattgcatgttgatgatgagggagaggagagggaagtggcaaggttgatttctacgcttcttatcacgaggatctttaagtggatggttgtcttattccatttagtgttgctataaaggaattacctaaggctgggtaatttataaagaaaaggagtttatttggccatggttctacaaactgtacaaggagcatgatgcccgcatctgcttctggtgagggtctcaggcttccacttgtgtcagaaggcagagtaccttttattcttaatacaaactacaattcttgtagatttactgacacttactgattacctactgtctgccagtcactctggtacattctttctttataatattattcagttgttaaacaacagattctcagatatatgtaatgttttctaggtcgaaaacaagtgccagttcttgttgggtcctt

SEQ ID NO: 95869 - DNA, 619 bp, Homo sapiens
tgtatgtgccaggctgaggctccggatttgggcaagcaatggtcaggctccacggaggctcaaagatggatggtttgagacttagggacggatgacagggaagacctcagtgatggggtgatgtctgttgaatgcattacttgctttacatttttaaaagctgaaagcttaagagcttatttcttaaggccgagaaacatgttctcagctgcagcaaagcattctgctctgtcagatagcccagagctggtccaaaacaaaggtgggaagtcgtctgtgtttgtggcccctccctgcctttctgtgcggcttccccactttctgatagagccacctggcaggtgcccagcagttctcaacagcctgtagcatggtcctggagtctccagcaagccatccaggtgtcatcagcactgggccttgcaacccggagccctgcaaccctgtggtagagctgcacagggatggggaggatcgcgggatttagagtcaagaggacctgtgttctgggcctgggtcttagacaaatccctgatcctgagcctgattcttcagctataaacagcatttttcatacttatcagatgggtttggagattgagcaaatatgaaggtataa

SEQ ID NO: 95870 - DNA, 839 bp, Homo sapiens
aaaagaaaaagaaagaaaaaaccctagatgtgtatatctatgtatgaaaaatatatatataattagatgtgctaaggattggacttaggtgaatctgacaaaaattttctcagctcttcatgtttttaattacttccatttagaaatctttttagtttaatgacttatactaatttttgttaacagagtaccaacccagggcaagtaagatccaaaaactaagtccattaaatttgtcacctactactgtccacatgtagcattatttaagtttctctttaaaaagagaagaacaactttggtgcatataacacacacatattataaaagaaaaataccactgtagaaccaagttttatgttattattaaaatacagtttttcttttcctcatttttttttaatttcccaaataatactgggaagcaaaataaagtacctgcatttcaccatttcaaatataatgggaagagttgggtttttaaatcgtccctattcctttccagtctctgcctttaaaagaagatatttttggccggggttggtagctcatgcctgtaatcccagcactttgggaggctgaggagggcagattgcctgagctcaggcgttcgaggccagactggcccaacgtggtgaaaccccatctctactaaaaatacaaaaattagccaggcatggtggcgggagcctgtaatcccagctactcgggaggctgaggcaggagaatcgcttaaacctgggaggcaaaggttgcagtgagccaagattacgccactgcactccagcctgggtgacagatggagactccatctcaaaaaaaaaaaaaaaaaaaaaaca

SEQ ID NO: 95871 - DNA, 429 bp, Homo sapiens
gtgtgcgtggaacatacgatgttttacatctccctcttgagccatcacaattcaaaggctatgagaaggcctggagtagagaaacccattgaggcttgatgttgcatgttctgtgctaatgtgaccctggaaccccctttcagcctcacctcttaatgtgccacagaacacacttgggggaagctgttaaacttcaaaacggtggctccaccacttattagcaatgggacaagtcatttacatctctgaacctcagtttccttgtctgcaaaatggaaataattgggacacctaccctatggagttttagggagggttaaatatgttaagagatgtcaaggtcaccctctgcctgtcagcagggtttgtcccagtggatcattccctcctcttgcttccttctataactttctgtctccctcttacttt

SEQ ID NO: 95872 - DNA, 334 bp, Homo sapiens
tagaaatggagagagaattgaaagttgaggcaatcaagcaagatttccagagaaggttgatactttaatttagacagaacaggtttcaaaattttagctctggagattataagctgtgtggccggtggggaagtcacttcaatgctgggcctcagtttctttattggagcaagagagataacaaggcctacctaccttttaggatttttggacatatttaggtattagagatagtctgtgtacagtgctcaagaaatagaaagcactcaattaaggcaatatgtattatttcagtcgtcactattgactggagagtgaaagttaggtttaaatg

SEQ ID NO: 95873 - DNA, 475 bp, Homo sapiens
ggtctgagtgaggtctgttgttgggggtctgagtgaggtctgttgttgggggtctgagtgaggactgggacccaccaggctttaacagtcactgtagccgctggacaggaaccagcaggaccaggaagcagcaatagtgaggtcagaggatggggccagcatgggtctgagagcagctctggccacggggcaggcagagaaaagccaggccacccggtctcccggcacagccacacctgggcttcagggccagcagggagttcctctcgactcccaggaaacctcatgccagccactcaggtaagattactgccaccttcgcctgagcccagggctccggttacctgctcccgcagggacgtgtgcctgcccgcccgccgagagggcctcaccgcccgccagctggggtccctacacctggatggcaggaagtcatccagagtgaacctgagctggctgacggggcggtacctgc

SEQ ID NO: 95874 - DNA, 503 bp, Homo sapiens
cttttcaagaatatttattaagaagtaaaaattttagccacatcaaacataatgcaaataattattcccagatttcaaccaatttgctaaatggcacactggcaggaattaaggaattcatcctgattcttctgttggttcttttcacttttggggtttcctttctggaataagagtacaatcttttttttttcctgccttgaggaactttaggagatttcagaagataaatgctctttaaattcaacgtggcacaaaaggttactgggaagaaaaaacacgtttgccaatttggacttccaccaaatgttataattggtatcagaagatgtgcaagaatggactcattttgtagtagaatttagatgtgactcattttagtcatggaaccaattttataatgtataagctagatataggtaaaaataaaagagcaaaaggaaatattcttctgtagcattgcagaacccatacatggacattcccttgactcttttcctgtg

SEQ ID NO: 95875 - DNA, 532 bp, Homo sapiens
tgtgggtctgctagtgttctctgaaaaagtgatggattttagcttggccatctttgtgtcagtgccacgacctgaagatttctacctccagagttggaacttattcccgtaactgttatctgaagattcttgagaatcttcttaggagcagcaattgctcagtgttctagtctggggctgtatcatctccagcttcagttccatctcccagaagcttacctgcatctcatgtttgtcctaaaataggatgagcaaattctatttgagaacttttctgacatcttctttatttagcaaatatttaaaaagtgaccattatgttccatgcacggtgaaagaggcagcaagtatagaaatatttctattaaatgttatcggtgagggagaaaagagttacatataaagagccagagttgagggaagtttttttgtttaattttaatccattaaagattaacttgcttacatattgatactcaaccaactgagagaatttagtgaaataaaatagaagaggataatcgatgtgtaa

SEQ ID NO: 95876 - DNA, 957 bp, Homo sapiens
ctcttaggggtctgatctgtggttgcggattattgcagacttttaggacggattgcggtaggggttggggaatttaggaaagtggtttctagtatggggatttaaccttgcccatgtgaataatagcacactaatatagacacagtttctccacttgtcaggagtgtcacacatgtcccttgcagagtgacatccagcagaatgggacgtttactactgcccagtgtgcaggactcaccacgtgcttttcacagaacctttctagttcattctcttaagacagcacatttatctttctctttaaaaaaaaaaaaaaaaaaaaaaaaaaaaaaaaaaaaaaaaaaaaaaaaaaaaaaaaaaaaaaaaaaaaaaaagaaaaagaagaaggggcgggcgccggccacaagaagtactcaccccacgagaggggcgccacaatgatgccgagcaacccccaacgaacttagtgcaacgcaaagcggggccgcccaatataggaggcggactgatattaatcacccgcacggcggcagagcgcggcagcagtagaaaaacaaaaaacagcagtgcagcgggggcgcaaaacacacgctgacacacgcagcgcaagcatcccacagaggcaaagagagaaacacaccacttccaccgcggcgcgggggcgcaacgaacaccaagaggaggcacgcaaaagcaacccaccccccacagaggcggataagtaacgagcaaacccacccacccgcacagggggaccggcaagcaaactaccagcaacaccaacccagccgagaacgagcgctctacacctagcgcggggcggaccaacacaacaaccaacgctgcagacaagacaagggagcggcgcagcctgctgcgacgcaaagaaaaagcagtgggaggacccccgccaggccccagtaaccgtctgcacctcggaggcagaacatatcacac

SEQ ID NO: 95877 - DNA, 434 bp, Homo sapiens
tttccaagtaggttttgtttaccctactccccaaatccctgagccagaagtgtggtgcttatactcccaaacattgcatacccagcctcccgccgttgagttttagtctcttgtgctgtgtctgctggcacttgggctgaaaaggccactgcctcatctaggtttttggtttgtttttgaaacagggtcgcagtggcgtgatctctgctcactgcatcccaggctcaagccatcttcccaactcagcttccctagtagctgggaccacaggcagagaccggggcgagggggtctctacaaaaagtgttggccaggctggtctcgaactcctgggttcaagcaatctgctcacctcaatctcccaaagtgctgggattacagttgggagccacccgccggcctccatctaggttttcataaatatcttactcatg

SEQ ID NO: 95878 - DNA, 406 bp, Homo sapiens
ttcacccctaatcaagaacttaagtgttcataccctggaagagatagtaatcctgcctgctttgtagttcttccctgtcttgtagcactcaaacctttgtctttcccacaagactgaaaactccatgacacaggaatatttcttatcctgtgaacctttgtgtcataccacctatagtagtgtttagtataaaataaattaattgtttggaaatctatcctaaaaaaaaaaacctagattcagtaaaagctctgtggccaaggatgtttgtgttacagtgaacaccttcgagcacttcaggcccaaaaaggggacagcaaatattccaacactaagatctaggaactgtactcattaatacccattctctccatccaagctgccataaacccaagttcaggtctcc

SEQ ID NO: 95879 - DNA, 335 bp, Homo sapiens
tctagttgattcctgaggtatccccacgctctgcataaaggggtgttcaggatgctgtcctttggctgtggtggctggtcctactgctctgtttgccagggtcctgggctcacagtgggtttcttgaggctttggcaagatgggcgattggctctccctgtctccttctttctctttcttcttctctgcctttcttccttccctcctcctttctttccccctccctccttcttttctctcttccgtccctgcttttctctttcttcctttgccctcagttctccctctctctctcttttcattctttcttgaactctccctctttcttcctccct

SEQ ID NO: 95880 - DNA, 301 bp, Homo sapiens
aaaaagggggggggcggggtgaagaaataccaaactgaaaatttctgaaacaaatgtgtaattactactacgctaaacttttttcacacctttgtttgtgagtcagtttccctttaacctttgactcgtaacataaagaaggttaaggccagagtccatcaatggttaaaagattgtgagtgagatgtagaaaaacagtactgatgaattctgaaaggggaaacctcatttccattgcctggttcttgtgcattgcagtattaccacaatatggcattctatacagcagataaatgtaatt

SEQ ID NO: 95881 - DNA, 755 bp, Homo sapiens
gtgaacttggctggttatctgcttcaatttgtccaatgggcaagggtcatcaaatttccattttactatctcattttaaaaacacagatcttccctttggaaattacgtgttagatgtttatcctcaggaaaagggattggaagtggtggggcttgggcacccatctctggctggcccttgtcagttggccacatgagtgaccacagctggcatctgtggaaaacgccctgaatgtttagccagtccggtcacagctcagcccccagtgttgtcatgtaatgatgtccccatgccagactggtgtgactgcaaagcggagaaaagcattgcactaaattcaatgcaaatgtcgagccttgaaaataaaattgaagtaaggaaggacacattaaaaaaaaaagatcaacaatggaaggaggctgggtgcggtggctcactcctgtaatcccagcactttgggaggctgaggtgggtggatcacctgaggtcaggagatcgagaccagcctggccaacatggtgaaaccccgtctctactaaaaatacaagaattagcgagcatggtggcacacgcctgtgaacccagctactcgggaggctgaggcaggagaattgcttgaacccgggaggcggaggttgcagtaagctgagatcgtgccattgcactccagcctggacgagagagcgatactctgtctcaaaaaaaaaaagaaaaagaaaaaaaaaaaaggaaaggctcacaagcaaagaatatc

SEQ ID NO: 95882 - DNA, 672 bp, Homo sapiens
agcggagtccgctacggagctccagcccttctctgagacggggaccagggatggcagccatgcacctgacagcctggccccaggcctgagctatggaattggccctagggcagcaggaacctattgtttcagaagtcggtgacctttgaggacgtggctgtgtacttcacccaggcggaatgggatggcctgtcccctgcacagaggaccctgtacagggatgtgatgctggagaattatgggaatgtggcctccctgggatttccacttctcaaacctgctgtgatctcacaactggagggaggaagtgagctggggggctcatctccactggctgcaggaacaggcctccagggcctccagactgtagatattcagactgacaatgatttgacaaaggaaatgtatgaacggaaaagagaatgtatcatttgaacttcaaagagacttttcccaggaaacagacttttcagaagcctctcttctagagaaacaacaggaagtccactcagcaggaaatatacaagaaggagaagagcaacaccattgatggaacagtgaaagatgagacaagccccgtggaggagtgtttttttagtcaaagttcaaactcatatcagtgtcataccatcactggagagcagccctctgggtgtacaggattggggcaac

SEQ ID NO: 95883 - DNA, 397 bp, Homo sapiens
atgtcagctataggaagaggatttttctctcttttgctgaatataaacaaccaaactttttgcctgcttgcaggcatattgtggccttgaagaaagcctagctgaggacaaataccatatatgcctggtgtagcacagagaagtggctcacccctgtaatcccagcactttgtgggtgccgaggcaggcaaatcacttgaggtcagcagttcgagaccaggctggccaacattgtgaaaccccgtatttaccaaaaacataaaaattagctgggcatcgtgttgggcgcctgtaatcccagctacttgggaggatgaggcaggagaatcgcttgaacctgggaggtggaggttgtggtgagccaatatcatgccactgcactccagcctgggtgaca

SEQ ID NO: 95884 - DNA, 343 bp, Homo sapiens
gaggaacctccaaactgttctccacagtggttatactaatttacattcccactaacagtatatgagggttcccttttcttcacatcctcagtagaatttgttattgcctgacttttgcatataagccattttaactgtggtgaaatgatatctcattgtagttttgatttgcatttctctgaggatcagtgatgttgagcacctattcatatacctgcttgccatttgtatttttccttttgagaaataagcctgatattctttcagggcataaattaagaatgcaaccctcctctgcccatggccacatatatcatgtaagagcaatctggcatagatactc

SEQ ID NO: 95885 - DNA, 199 bp, Homo sapiens
caaagcaaccctgctgagccagagcccaagttaagagatgcaaaaagaatggtaaggtggggaaacaggtaagatcagacaacagacagggcagaggggcatgctctgaggcaaacagggaggtaaggtacattctaaccactctgccttggacaactctgccggacaaaccgctcacctgagacctgacaggtgacag

SEQ ID NO: 95886 - DNA, 325 bp, Homo sapiens
ttacatttggctaatgaatattgactgacatggtggaagatcaggcagggaagagttctaaaccacaatgccaacacacaatggtgtgtcattatgagactagggttgacttgcctcttagtgacacagcctataatttgagcacatcacagggaattgcagtgtacagagctgctgtcttttgtagatgggaaaaaggtgagtatgtgctgatgcaggcattctccagtgtcaggtgaggtaaggcagaacatagcttcagttattagtacattaaaaaaacatgagtaacaaataagagagagcagagatccctaaagaggac

SEQ ID NO: 95887 - DNA, 818 bp, Homo sapiens
caaaatttttgacagtagggggattattcagccaatttaataccagttggaaagctgcagggggtggcttgttttgagtaagatggagaagttttatgagaaccatagtgttgggggaatataaaaattttgaacatttgcaatcatctgtcagtcttgtaatccagtttcccaaggttgtgactgaggaggtctggggtgggttgacagacctgcagaaggctggagtcttctagttgatgaagaatgacactgcactgctgttaataaagcctttgagtttctctgcctgctccccagccaggtgagtgcagtttgttttatgactttcccaggggtgatcatcctctgaggactgatgcaatcttgcctaactcccaacagggtgattaatgccccagaaagctgaagtcttactttatggtgggtctatatttatcatgactgcccaggagatctttgccttggcttctcttctcctgatgaaacctggatgtcaactgtccccctctgctctgattctatggctccatatctgaatgtagaacttagaacctcctcaggttcttgttttgttttttctctttttttgagacagagtcttgctctgtcgcccaggctggagtgcagtggcgtgatctcggctcactgcagcctctgcctcctgggttcaagagattctcagcctccagagtagctgggattacaggctcatgccaccacatccagctgatttttgtacttttagtagagatgcggtttcaccacgttggccaggctggtcttgaactcctgacgtcaggtgatccactcacctc

SEQ ID NO: 95888 - DNA, 1179 bp, Homo sapiens
ggcaggagaatgccacacagacatctcagagcgtcctcattcttcctctttctactgtcctcatagctgctcctgactttctcttgtctgccattatagagacatgccataggaaatgttaaatcaatacatgttactaaaatacaaaatactatcaagattatctgaacagatccaaagtcaagtcttgaagtgaaatatgacttaaataaatgaggtcttaaatgggagctataaaatgcaacaagaaaaaagacagttaagacaaatgtttaaaaatcccaaatgaaggattctgaatgtttaagaagtaaaacaggttttttttggttttgttttgttttgtttttgtttttttgatgcctagaggttggttcaattaggccaggcaagccaagtacctgggtgcgttgtcagaattatctccattttggtcctgttcaggctgggattgacccagaagaccttcaagcatttgcccagggttcttagaagtgatgagcagctgtgatggttttcaggatggatcaagaggccagcaatggctcaagcttcctgggagctctgcccaacactcaggagttaacatggtgtaggttacctccctctggacctccctccctgccccactgaagcctgagaaacacagaactccttgtccatgagcaagggagctcaagcactgggccaggagcggggcagaaaggtgccagtggatagctagacctgaccatcctgggcaactatcacacaccagagcaaaaggggtttaggtgctttgccaagaaatttcttctgtgcatgcctgtatgagagagagagagagaaagagagagagagagagagagagtgtgtgtgtgcgcgtgtgtgtgtctgcctatgtttgtctctgtgttcaatctcagtctgctagccaaatcctagggaccccacaccctgcaatcacaaggactgacctggcaggtggaatcttcatgaagcagaagctgagatctagagatccagatttagagtgttctgtaaagcctagagaagtgtccctttctttctcctccctcacctcaccctatatctccaccatcccctaaaagggcatcctaccaactagctatgaaaaaaaaaagaatttgctgagaaatctgttacccaagaaatattttcaggctgcaagcaaatgtc

SEQ ID NO: 95889 - DNA, 1165 bp, Homo sapiens
ggcaggagaatgccacacagacatctcagagcgtcctcattcttcctctttctactgtcctcatagctgctcctgactttctcttgtctgccattatagagacatgccataggaaatgttaaatcaatacatgttactaaaatacaaaatactatcaagattatctgaacagatccaaagtcaagtcttgaagtgaaatatgacttaaataaatgaggtcttaaatgggagctataaaatgcaacaagaaaaaagacagttaagacaaatgtttaaaaatcccaaatgaaggattctgaatgtttaagaagtaaaacaggttttttttggttttgttttgttttgtttttgtttttttgatgcctagaggttggttcaattaggccaggcaagccaagtacctgggtgcgttgtcagaattatctccattttggtcctgttcaggctgggattgacccagaagaccttcaagcatttgcccagggttcttagaagtgatgagcagctgtgatggttttcaggatggatcaagaggccagcaatggctcaagcttcctgggagctctgcccaacactcaggagttaacatggtgtaggttacctccctctggacctccctccctgccccactgaagcctgagaaacacagaactccttgtccatgagcaagggagctcaagcactgggccaggagcggggcagaaaggtgccagtggatagctagacctgaccatcctgggcaactatcacacaccagagcaaaaggggtttaggtgctttgccaagaaatttcttctgtgcatgcctgtatgagagagagagagagagagagagagtgtgtgtgtgcgcgtgtgtgtgtctgcctatgtttgtctctgtgttcaatctcagtctgctagccaaatcctagggaccccacaccctgcaatcacaaggactgacctggcaggtggaatcttcatgaagcagaagctgagatctagagatccagatttagagtgttctgtaaagcctagagaagtgtccctttctttctcctccctcacctcaccctatatctccaccatcccctaaaagggcatcctaccaactagctatgaaaaaaaaaagaatttgctgagaaatctgttacccaagaaatattttcaggctgcaagcaaatgtc

SEQ ID NO: 95890 - DNA, 196 bp, Homo sapiens
tttcgagttcaaagtgagtgaagagcatgacccctctttcctgctggggggccatgcagttgggagctgtcatcaggtggagctggtctacagggacaggcccaaaggatggagccacataccagagactacaaacacatggtggggagtggagtgtcctggcagccctgctgactccggctcccctgtctttcca

SEQ ID NO: 95891 - DNA, 291 bp, Homo sapiens
gcgaaccgtgacatttttgtataaccaattaaatatgaaaattcttgaatctcatcttttccaaaatatattgaaataggtttgcatgctactatatgcagaagtaaaatgagcaaaacaattttggattacgattttttagaatttttagatagaagctcaatatgattgaatattaatatcaatgactgaatattaaagtttactttaacaaggagaaagtaacatagtagatcaggaaagactttctaattgtagaaaattttggaaaaagtagaaacctgagatgga

SEQ ID NO: 95892 - DNA, 476 bp, Homo sapiens
atggagagaactccaggctggaatggggaaggcatgacaaggcgttctatgtcttccaccaggtggttgaaccttctagacacattctgggaaggtctttacagaccaatatctctggaatacatttcaatgcactaaacagaccaatgcttcttctacagaccatgctgtcctgggtagatcaccactctgtgccttagttactttttctgtaaattggagccactcataatgggctactatctctccaggaatacagatgagatggtacatgtgaaatctcttttgaaaagaaggtatagcatgggctcaattcctaattccctcattcctactgatttttaaaaattgtcatggcaaataaaccattggaggtttcatttcgttcatctcacagataaaaatgtagacaggtaagcgtaggtcatccctgcttagtaaataggcgtgatcgtcaccgggccagtcagtgacag

SEQ ID NO: 95893 - DNA, 421 bp, Homo sapiens
accctagtgcaaaatccacaaatccggaatgaaaatgtaagcatccatgccttccagcatgctccatgcttttcccactgcgctcatggtaaatgctccccatggcatcaccaccgggaaccaaacacatgcatacatacgtatatgaagacagtttagccaagtggttaagagtgaggaccctgtggctacactgcccaggttcaaatcctggctctaccactccttaccaacctcagggaagtcacttgacctttctgagttttccatttccctatttgtaagatggaaacgctagtcataatcaactttcttggcacaacgatcaagagtcaaaataaaccaatatgtaaaaatggttttggaagttttttttttgagatggagtctcgctctgtcacccaggctggagtgcagtagc

SEQ ID NO: 95894 - DNA, 323 bp, Homo sapiens
tttctatttaatgtagaacccccaacatacctgttgtgtattagttttattatatttaacggttattatggtttccttgatgctttgcttaaagagctatcatacaaagccaggcgcggtggctcacgccggtaattccaggactttgggaggccgaggcgggcggatcacaaggtcaggagatcaagaccatcctggctaacacagtgaaaccccgtctctactaaaaaattagctgagcgtggtggcaggcgcctgtagtcccagctactccagaggctgaggcaggagaatggcgtgaaccagggagatggaccgtctca

SEQ ID NO: 95895 - DNA, 476 bp, Homo sapiens
aggtggctgctgtgtctagctgggctgagatccacacagcagcccgactgctgcgggtaccaccagagtgcctggagggggctgtcaccaggagggtcacggtgagcccgagggtcctggggagaggggcctggcctggctgacccacaggctgagtaagcaccatgagggctgcaggcctgacacaccagctgtgcctcctctgccctccaggagacgccctatggccaggtctcgcgatccctgcccgtggaaagtgccgttgatgccaggtggccctagagacgggtgagagtcagagcagggcccgaggcacggctctatgtggctcacccacccgccatgcctacagggacgccctggccaaggcactgtattcccgcctcttccaccggcttctgaggagaaccaatgcacggctggcaccaccaggggagggaggcagcattggcaccgtcactgtcgtgaaaaaaaaa

SEQ ID NO: 95896 - DNA, 220 bp, Homo sapiens
agctcaacatggattaagacttaaatgtaaggtctgaaactgtaacactcctacaagaaaacagaggaaaaagctttgtgacattgggtcttggcaatgctttcatcaatatgactccaaaggaactggcaacaaaagcaaaaatagatgacatcaaactaaaaccttctgcacagcaaaggaaactatcaacagagagaaaagctcacctatagaatgg

SEQ ID NO: 95897 - DNA, 291 bp, Homo sapiens
ctggattctgttattttttaaattgctctccagtggttctttttccagatttctctaaaggaaagctattcccttgctattcagagctgtgtccaaggaccagcacaaacatcacctgagtgctcatgagaaatgcagactccaatacctgctgagtcagaatgtgcactttccagaagctcctcaacgaattcatgacaatttgaatgccctgttccacactggtgtgcttccatattggtttaccctaactggcctttttggcctagcctcaacttctttcctattatg

SEQ ID NO: 95898 - DNA, 284 bp, Homo sapiens
ggtttgagttcatggccaaaaagaccggaggctgagctgagttagagagggccgctcctgccccctcccctgccaggattcaaactaccagtggacaccatcaaaggtaaaataccctggtcaattaaaaagtcaattctccactaaggagataagcctcaccgttagtcagatggaagtccttacctggggcacccaccacctgcaaatgctaatcagagaaaagcccatctcagaagtgactgaaacccccactcagcccctcaggctcaggaccccccacc

SEQ ID NO: 95899 - DNA, 1310 bp, Homo sapiens
tgtccaactgtttttcaccttttctaatgaaagtattctccaaagaacaaattggaatgcttccaattatagttgttcccccttatcctagggggacacattgcaagactccccaatgaatccctgaaactgaagtctgtatacactgccgaagcctaagtataccatgttttttagatctaataaccaagatgggctgatagcgtatacagcatggatacactggacaaagggatgattcacgtcctaggcaggagggggcaaactttcattttgctactcagaacatgctcttgccccatttaaaacttaggaattggccaaagtgctgggattacaggcgtgaccaccggcacccggccatgttttttgatattctggaataaaaaggatatagcagttgggataggcttgggttcttgtcctttatgttcttgtcctttcctcatgataatcaaatcataattagaaataagatgctaagaatacaaaggtggctctatgttaatactgtattgataggtcaaaggagaaaaagcatgagatcaattcattagatactgaaaagtcttttgagggaatttaatgtcttcttgctttctttattaacagaataggaataaataatagcataggcataaattaaaaataatgtaattttttaaaatctcaaactaaaaatgggaatcatacttaaacattagcattccccaggagagttggagcaagacctctgtgcccactatcactcaacatttcattatttaagtcctagcaagtgcaaaacagaaaagatgcataaatattagagaaggaaagttattttttgcaaatggcgtattttttatctggaaataccagagaatcaagtgagaaactttgaagaataaaataattcagtaatgatgcttcctaccctaggttaattaatataaagaagagttaaattcctatggcatatttctggtaacaaaaacatcactaaacttttaaataaaacccaaaacacttctagtattaaacatttaaatgagctgggcgcagtggctcacgcctgtaatcccagcactttgggaggccaaggtgggcggatcacaaggtcaagagatggagaccatcctggacaacatggtgaaaccccgtctctactaaaaatacaaaaattagtgggtgtagtggcccgcacctgtagtcccagctactcaggagactgaggcacgagaatcgcttaaactgaggaggcggaggttacagtgaaccaagatcgcgccactgcactccagtctggcgacagagcgagactccatctc

SEQ ID NO: 95900 - DNA, 341 bp, Homo sapiens
ttgcagtggcctcccaagttgactcaggttttggcatgtgattgacaacaggacatcagcaagtatgatgcaagcagaggtttgatggtgcagcacactgggatgctccttcctggacccagccacccactgggaaaagcctaagccacgtggagcagctacatagaagagggccggggccacagctacagccagcagctcctgccagccacgtgagagagctaccttgatgttccagcctccagagatctaagagcttccagacatctaccaccccagccacaccacctgagccaatgtcccacagagtcatgggagataataaaaggctgttgttctct

SEQ ID NO: 95901 - DNA, 272 bp, Homo sapiens
acacagaagctggggagccagtcaatagatcctcctagtgtttcccatgaaatcttaaaaaaaattttgttctgggaggaagcagtagaccattggttttggaatcagaagacttaggttctgatccagctttatagtctttttttttttcagctgcacgactttaggcaaatcctgtaacttttctgagtcaatttcatcctttatgacacgtgtgaggataatacctatcctacaggtttttgaggatgcttacaggagacaacatagtg

SEQ ID NO: 95902 - DNA, 101 bp, Homo sapiens
cttctaacctctggtggccaggtcagcctcaggaaggggctgggactgagtggaggggcctggaaacaactgcgcacactcgtatccattctcgggctcac

SEQ ID NO: 95903 - DNA, 427 bp, Homo sapiens
actgttattatgttctatgcggtagaagcaaaaattttaaaaaacttactttaaatagtagcattttagaagacagtacagaaatatccaagtagtgttaatatctctgccataaagacattcacaaattcaaaaacaaatttctactgaccatcttagtgtacagagtactgttctaggctctggggttatagcaataaacaatatatccagtccaaattcttaagaaatctacacttagctagggtggggtagaaggaaaaaatgataaacacaataaagtcagatcatgataaattctcatgaaaaaaaaaccataaaactcggtaagagattaaaagatggaagtgtttggcggtgggtgcattttagagagagtggacaggcaagacctttctgagaaaatggcatgcgggtataacataaa

SEQ ID NO: 95904 - DNA, 771 bp, Homo sapiens
agcggctgaaatatctcagaatggttaaaacatttaaaagcagactacccacaaaggaaatagaattaagcatctgaagagcaacacatgagtttccacaaaacttaagagaaaatgatttcaaatctagaatcttatactcagattaactattagttaaaggtgagggaaaatcatggcattttcaggtttatagtaatggctaatatttaatgaactcttactatgagccagttgtatctccatgctcgttgcaattattaacttatttattttatactcagaacagcccagctagttcggtactattattatcactggttttacaaatgaaaaaccagaagtatagagaagttgagaaacctgccaaagatcatgccactcgtagaaggcagagttgggttttgaatccaggaagtttggctgcagactctacactcttaactactacacaacagtgccactctgttggtcaggcactcagaaaatttatgtcccatgtagcctctttgaaaaaaaaaatgcttgaggatatactacaataaaatgaaaaaggaagtcaagaaagagggaagcgtcagatcctagaaagagtggcactaacctgggggtcaggccatttcaggacaacagcatgtctatgaaattaaaacagaaaatcagaacattccatgaaaaaatgtcatccaaagagaaagattctattgttcgaattgtatgattaaaaccctgaagttcttaatagtaaaatgatggcgtgtatttcccctg

SEQ ID NO: 95905 - DNA, 617 bp, Homo sapiens
aactgcatttaaagtgttataaataccatgactacataagctaagggaatgaatgtattaactctgatgcagtctgtcaggttttaacagtagtgaatcttgggatcggtacatctcattccagtatagctatggtaaatgacatagagatcgctgaattgttgtatttccaggacttttcaaaagtgactattaaggttggctgtgggatctagcaggttattgtcctagaacacttgtggccttctcctaaaacagactgggaaaattctggttctttattcactgacatctcaaagggcaaagagggaggcaccatgacattctgcagttgcaggcctctcaggatgagactgtatttttccatacagcaatgttgatttgatctggcctaattctccgattgatgtggtgagaggcaggactacttgggaatgtattcactgtgcctgatttctctctgggcaatttatttggtcatcaatctttttatcctcctgacatttgatttctagatattggcccaaattccataagataggaatttttgttctgaattttaataacatatgtattttaattaatagtatattttaaaataaaagtaatacgacaaa

SEQ ID NO: 95906 - DNA, 486 bp, Homo sapiens
cccacatccccacccaaactccaagttccctgaggacatttcctcccagaggaactgtgtgcattagttatcagcatgagttgtgccaaggccagcagagctcacagcaatgatcaggtcactctccactccatgtcaatcatcggcaggacattagtgcactacacatatgcagacatccattttctgactctaattatggatttatttggctgatggtggttggctccaccagaggcccctgggggcagtgttgaacctgaccaaggatgctaaagagagctaggtcgtgttctttcattctctcgcaaacaaccctaaggcctcaagaactccttgggtgtgctcagaccaggcgagcacccgaggaggcgagcaccagcatcactgacaaagctggcagagtcgggcatggcacagtctagggactagggcagtccctgggttccgttacccagcagatgacccttagacataacacaaact

SEQ ID NO: 95907 - DNA, 299 bp, Homo sapiens
cggccaaccagagaccaacaagggagcaaacccttgcactgtccttgcggaagggccctacccagcatcctgggatgtaactgggaaggatgtgtctcattagcacctctgccccacctctggaataccagctccaagccaaacacgtcccctctgagcagctgctgtgccctgcccccgagtgctctatgttgaggatcctccgggcaggaatggtgggctggatgctgagccctctacagttgtccccatgtccctctcccaccagactccactccccagcagcagtgggcaacctc

SEQ ID NO: 95908 - DNA, 374 bp, Homo sapiens
tttcatccagaattaattttggtcaaagagttcaatagggctacaatttatttttccctgaagaggcgggacagctgtcccaatataattcactaaagagcccatctttcctctgccaatctgcaatgccaactttactacaatgtctgcaacttaatctcaaatggtagagcaacaaacatatttagagtgtgtgtgtgttgaaattaaatcaaatgtggagaaatgttagcatagcaattattgaatcaagatagtacatttggccttcattacccacgggttctgtatctatctgcccattcaaccaactgcagattgaaaatactctggaaaaaaattttttaaatacaataataaaaaataatgcaaat

SEQ ID NO: 95909 - DNA, 385 bp, Homo sapiens
gagcctatgtctaggggagagcaccagtggaaagagaggtgacaatgaggatccgagagaggggacgtcctagctggatggaggagttagggagtgaggagggaaaggccttctcagaaatcccaggggatgcacgcatcggcctttacagtttataaagtacaccctgtacttccgctcttaaaatgcgcttgttaggaattatgattgctattttatgggaaaggaaacaggctcagagaagttaagcagcttgctcaagataacaagggggagagttgggatttgaacacagcgctctgtgcctgactcaggttctatctctgccacacccagccaaaaaagggggctagtttcagtgtgtattggaaatctgtctgttgga

SEQ ID NO: 95910 - DNA, 332 bp, Homo sapiens
ttcaccattttggccagactggtctcgaattcctggccacaggtgatccgcccacctggacctcccaaagtgctgggattgcaggtgtgagccaccatgcctggcctaattcttacgttatttctaagagttttcccattgattaattttggctttttggatgttcagttatattatctatacgtaaagataatttggccacctctttcaaatattgatgtcttactttacggaccaatataatttactagcagttcctcctcagtgttaaatcagcagggatatccagccctttgctctatcattgacttcttttctttccttctgccccc

SEQ ID NO: 95911 - DNA, 650 bp, Homo sapiens
ggcccaggactgagactaaggagatcttggcccacaggggctcccctgggggcactgcccaggagacaggggaggagactagactagggcctccaaacctgccactcgccagaaaggactttccaaatggaaaaagccacggggactgttgctgtcagtatcggaagttctccctgctgtctgccctcaaggcttcccactgtactgccctggccctgggctcacctgagattgctggggaaaagaaagggtcaaccgggaggtttagacacgtggagaaggagtgtgcctggctctaccagttggaactgggatcagaagtggagctgaggaggctggtccagggagaatgcagtgctaagagacgatgctgctgacaagcccggcctcaggctggagtcagactgccctgatattacattactgaggcacactaggctaaggctgacaacaccaaatgctggcaggaatgtggagcaacaggaacaggaattcgtggctgatgggaatgcaaaatggtacagctactttggaagaaagtgtggcagtttcctaaaaaactaaacatactcttaccatacgatccaggaatcatgctccttggtatctacccaaaggagatgaaaacttacgtccacatgaaaatctgc

SEQ ID NO: 95912 - DNA, 816 bp, Homo sapiens
aagatggagtcttgctctgtcacccaggctggagtgcaatggcgcgatctccactcactgcaacctctgcataccaggttcaagcgattctcctgtctcagcctcctgagtagctgggattacaggtgcccaccaccacagctggctaatttttgtatttttagtagagactgggttttaccatattggccagactggtctcgaactcctgacctcaggtggtccgcctgccttggcttcccaaagtgctgggattataggagtgagccactgcgcctggccatttgattcttataacacctttgaaagtaggcatgacaaatattataatcacaatgttacataatattatgctggttttagaaagaagggaactgaggctctgcagggtgcttagaagttttgctgctgaagtttaggtgcatttgcttctattcaatgtctttgttaccatctgaacaaccatacagttggctgtgatgctgaaaatgtcccgtcatgcacctacactgccacagacaatatagtgcaccttgacctgagctcagaattgcaggtatattaaatgttagtcttcaccatttaaaggcaactgtatttcctatggaagagactactcgttttctccctatgcatttcccccataagaatagaatttgtgttttttttgacttcataggtagctgtccagaataaagcgtacattacccagtacacattgggtcaagggaatgtcaggtgactaactaaattctagatgaaactagaagtgtcacatgacagcttccaaggcatagcaaggacatgctcctccta

SEQ ID NO: 95913 - DNA, 249 bp, Homo sapiens
taaaaattttttttgctattataacattgaaacttgcaaacatttttgtacacttcgctttattttttagaatcattgctggtatgaaaaaaaaatctcccaagttgagataattgattcaaggagtacaaagttttttccttgtttaaaactgtgatgacccagctacattgggaggctgaggtgggaggatcatttgagcacgggaaatctactgtattggcatcgttatcacttggatgtgtactt

SEQ ID NO: 95914 - DNA, 872 bp, Homo sapiens
cataccatgcttttgtcgaatggaatggaagagaatcttcgaacggacccgaatggaatcatctaatggaatggaatggaataatccatggactcgaatgtaatcatcatcgaatggaatcgaatggaatcatcgaatggactcaaatggaataatcattgaacggaatcgaatggaatcatcatcggatggaaacgaatggaatcatcatcgaatggaaatgaaaggagtcatcatctaatggaattgcatggaatcatcatcaaatggaatcgaatggaatcaacatcaaatggagtcaaatggaatcatgatgtagaaatgagagtctaataagaaagacagaaatatatagaatcatattttaaaatgttttatatttgtattggtcttctacgcttgtttaacatcccccgccacccaccccaagcctaaatatgtcactattgttattatcatttgcttcttgtctggtttctttgccagagagatgaaaacaaatcatttttttgctcaaggtaatgagaaagaaaggaagaaaaataggaaaacagaaagaatactggatactttgaaaggacatgatgaatttaagtgattgggacagcttgaaccgggtgtattcagcaatataaccccttgctgttatgccactaaaatatttaccattgtcacttgctttcataattgctatgggtctttgtgagttttaaattgattttgccacttgtgcctgtttgtgttctctggctcatttagatttaaacatttatcagtgaggtaaataataaattttgcttgatttgaaaaattgggctgttgtgctttccatcagtcattttgtgaattaaatcagatttcaaatgctactt

SEQ ID NO: 95915 - DNA, 834 bp, Homo sapiens
aggccttggtttgctcactgctgaaaaaggagggctctgcatctttttagatgaacagtgctgcttttatcccaataaatcaggcctagttcaagatgcagtaaaaaaactcaaagattgagcccaaaaaataaaagaaaacacatctgctacctggtccctctggtcctcatggtccctcagctcctgggttccctggcgactacccctccttggcccagctataaccatctttcttctgttagcttttggaccctgcttcatgtgtctccttatccagtttttacaggaccacatcaaaaccttcacccatggaacagtgcgaggtatactgctgcttcaagcataccagcggcttcaagaacaaccatcgcaagccccccaagcctttccccttgcacaccgcccctctacagctagaagcagtcagatgataaagtcactcctcttcctttatcacctattaaaggctggaatgttagagagccaagctacccctcctcctcctccatgacctttgcaatacggtcctttgtgaccacctacaaacacctccccactttttctacagccacttctgcaagactttcagtagaactggtaaacagttccaggatgtggttaagacatctgcccaccttgcctagccaagcttgcctagccaagcaggcaaaaacatttccaggaaatggttgaaacacctgcaactctactcagtttcccccaccccaacctagcaccttgccctataaaaccccacagcagcctgtaagcggggctacctcctccacagtggagcagcccagcaggttaataaaaacttgcttgcctgac

SEQ ID NO: 95916 - DNA, 4412 bp, Homo sapiens
ccgcgctctctgatcagaggcgaagctcggaggtcctacaggtatggatctctggcagctgctgttgaccttggcactggcaggatcaagtgatgctttttctggaagtgaggccacagcagctatccttagcagagcaccctggagtctgcaaagtgttaatccaggcctaaagacaaattcttctaaggagcctaaattcaccaagtgccgttcacctgagcgagagactttttcatgccactggacagatgaggttcatcatggtacaaagaacctaggacccatacagctgttctataccagaaggaacactcaagaatggactcaagaatggaaagaatgccctgattatgtttctgctggggaaaacagctgttactttaattcatcgtttacctccatctggataccttattgtatcaagctaactagcaatggtggtacagtggatgaaaagtgtttctctgttgatgaaatagtgcaaccagatccacccattgccctcaactggactttactgaacgtcagtttaactgggattcatgcagatatccaagtgagatgggaagcaccacgcaatgcagatattcagaaaggatggatggttctggagtatgaacttcaatacaaagaagtaaatgaaactaaatggaaaatgatggaccctatattgacaacatcagttccagtgtactcattgaaagtggataaggaatatgaagtgcgtgtgagatccaaacaacgaaactctggaaattatggcgagttcagtgaggtgctctatgtaacacttcctcagatgagccaatttacatgtgaagaagatttctactttccatggctcttaattattatctttggaatatttgggctaacagtgatgctatttgtattcttattttctaaacagcaaaggattaaaatgctgattctgcccccagttccagttccaaagattaaaggaatcgatccagatctcctcaaggaaggaaaattagaggaggtgaacacaatcttagccattcatgatagctataaacccgaattccacagtgatgactcttgggttgaatttattgagctagatattgatgagccagatgaaaagactgaggaatcagacacagacagacttctaagcagtgaccatgagaaatcacatagtaacctaggggtgaaggatggcgactctggacgtaccagctgttgtgaacctgacattctggagactgatttcaatgccaatgacatacatgagggtacctcagaggttgctcagccacagaggttaaaaggggaagcagatctcttatgccttgaccagaagaatcaaaataactcaccttatcatgatgcttgccctgctactcagcagcccagtgttatccaagcagagaaaaacaaaccacaaccacttcctactgaaggagctgagtcaactcaccaagctgcccatattcagctaagcaatccaagttcactgtcaaacatcgacttttatgcccaggtgagcgacattacaccagcaggtagtgtggtcctttccccgggccaaaagaataaggcagggatgtcccaatgtgacatgcacccggaaatggtctcactctgccaagaaaacttccttatggacaatgcctacttctgtgaggcagatgccaaaaagtgcatccctgtggctcctcacatcaaggttgaatcacacatacagccaagcttaaaccaagaggacatttacatcaccacagaaagccttaccactgctgctgggaggcctgggacaggagaacatgttccaggttctgagatgcctgtcccagactatacctccattcatatagtacagtccccacagggcctcatactcaatgcgactgccttgcccttgcctgacaaagagtttctctcatcatgtggctatgtgagcacagaccaactgaacaaaatcatgccttagcctttctttggtttcccaagagctacgtatttaatagcaaagaattgactggggcaataacgtttaagccaaaacaatgtttaaaccttttttgggggagtgacaggatggggtatggattctaaaatgccttttcccaaaatgttgaaatatgatgttaaaaaaataagaagaatgcttaatcagatagatattcctattgtgcaatgtaaatattttaaagaattgtgtcagactgtttagtagcagtgattgtcttaatattgtgggtgttaatttttgatactaagcattgaatgactatgtttttaatgtatagtaaatcacgctttttgaaaaagcgaaaaaatcaggtggcttttgcggttcaggaaaattgaatgcaaaccatagcacaggctaattttttgttgtttcttaaataagaaacttttttatttaaaaaactaaaaactagaggtgagaaatttaaactataagcaagaaggcaaaaatagtttggatatgtaaaacatttattttgacataaagttgataaagatatttttaataatttagacttcaagcatggctattttatattacactacacactgtgtactgcagttggtatgacccctctaaggagtgtagcaactacagtctaaagctggtttaatgttttggccaatgcacctaaagaaaaacaaactcgttttttacaaagcccttttatacctccccagactccttcaacaattctaaaatgattgtagtaatctgcattattggaatataattgttttatctgaatttttaaacaagtatttgttaatttagaaaactttaaagcgtttgcacagatcaacttaccaggcaccaaaagaagtaaaagcaaaaaagaaaacctttcttcaccaaatcttggttgatgccaaaaaaaaatacatgctaagagaagtagaaatcatagctggttcacactgaccaagatacttaagtgctgcaattgcacgcggagtgagttttttagtgcgtgcagatggtgagagataagatctatagcctctgcagcggaatctgttcacacccaacttggttttgctacataattatccaggaagggaataaggtacaagaagcattttgtaagttgaagcaaatcgaatgaaattaactgggtaatgaaacaaagagttcaagaaataagtttttgtttcacagcctataaccagacacatactcatttttcatgataatgaacagaacatagacagaagaaacaaggttttcagtccccacagataactgaaaattatttaaaccgctaaaagaaactttctttctcactaaatcttttataggatttatttaaaatagcaaaagaagaagtttcatcattttttacttcctctctgagtggactggcctcaaagcaagcattcagaagaaaaagaagcaacctcagtaatttagaaatcattttgcaatcccttaatatcctaaacatcattcattttgtgttgttgttgttgttgagacagagtctcgctctgtcgccaggctagagtgcagtggcgcgatcttgactcactgcaatctccacctcccacaggttcaggcgattcccgtgcctcagcctcctgagtagctgggactacaggcacgcaccaccatgccaggctaatttttttgtattttagcagagacggggtttcaccatgttggccaggatggtctcgatctcctgacctcgtgatccacccgactcggcctcccaaagtgctgggattacaggtgtaagccaccgtgcccagccctaaacatcattcttgagagcattgggatatctcctgaaaaggtttatgaaaaagaagaatctcatctcagtgaagaatacttctcattttttaaaaaagcttaaaactttgaagttagctttaacttaaatagtatttcccatttatcgcagaccttttttaggaagcaagcttaatggctgataattttaaattctctctcttgcaggaaggactatgaaaagctagaattgagtgtttaaagttcaacatgttatttgtaatagatgtttgatagattttctgctactttgctgctatggttttctccaagagctacataatttagtttcatataaagtatcatcagtgtagaacctaattcaattcaaagctgtgtgtttggaagactatcttactatttcacaacagcctgacaacatttctatagccaaaaatagctaaatacctcaatcagtctcagaatgtcattttggtactttggtggccacataagccattattcactagtatgactagttgtgtctggcagtttatatttaactctctttatgtctgtggattttttccttcaaagtttaataaatttattttcttggattcctgataatgtgcttctgttatcaaacaccaacataaaaatgatctaaacc

SEQ ID NO: 95917 - DNA, 3527 bp, Homo sapiens
  misc_feature (3527)..(3527): n is a, c, g, or t
ccgcgctctctgatcagaggcgaagctcggaggtcctacaggtatggatctctggcagctgctgttgaccttggcactggcaggatcaagtgatgctttttctggaagtgaggccacagcagctatccttagcagagcaccctggagtctgcaaagtgttaatccaggcctaaagacaaattcttctaaggagcctaaattcaccaagtgccgttcacctgagcgagagactttttcatgccactggacagatgaggttcatcatggtacaaagaacctaggacccatacagctgttctataccagaaggaacactcaagaatggactcaagaatggaaagaatgccctgattatgtttctgctggggaaaacagctgttactttaattcatcgtttacctccatctggataccttattgtatcaagctaactagcaatggtggtacagtggatgaaaagtgtttctctgttgatgaaatagtgcaaccagatccacccattgccctcaactggactttactgaacgtcagtttaactgggattcatgcagatatccaagtgagatgggaagcaccacgcaatgcagatattcagaaaggatggatggttctggagtatgaacttcaatacaaagaagtaaatgaaactaaatggaaaatgatggaccctatattgacaacatcagttccagtgtactcattgaaagtggataaggaatatgaagtgcgtgtgagatccaaacaacgaaactctggaaattatggcgagttcagtgaggtgctctatgtaacacttcctcagatgagccaatttacatgtgaagaagatttctactttccatggctcttaattattatctttggaatatttgggctaacagtgatgctatttgtattcttattttctaaacagcaaaggattaaaatgctgattctgcccccagttccagttccaaagattaaaggaatcgatccagatctcctcaaggaaggaaaattagaggaggtgaacacaatcttagccattcatgatagctataaacccgaattccacagtgatgactcttgggttgaatttattgagctagatattgatgagccagatgaaaagactgaggaatcagacacagacagacttctaagcagtgaccatgagaaatcacatagtaacctaggggtgaaggatggcgactctggacgtaccagctgttgtgaacctgacattctggagactgatttcaatgccaatgacatacatgagggtacctcagaggttgctcagccacagaggttaaaaggggaagcagatctcttatgccttgaccagaagaatcaaaataactcaccttatcatgatgcttgccctgctactcagcagcccagtgttatccaagcagagaaaaacaaaccacaaccacttcctactgaaggagctgagtcaactcaccaagctgcccatattcagctaagcaatccaagttcactgtcaaacatcgacttttatgcccaggtgagcgacattacaccagcaggtagtgtggtcctttccccgggccaaaagaataaggcagggatgtcccaatgtgacatgcacccggaaatggtctcactctgccaagaaaacttccttatggacaatgcctacttctgtgaggcagatgccaaaaagtgcatccctgtggctcctcacatcaaggttgaatcacacatacagccaagcttaaaccaagaggacatttacatcaccacagaaagccttaccactgctgctgggaggcctgggacaggagaacatgttccaggttctgagatgcctgtcccagactatacctccattcatatagtacagtccccacagggcctcatactcaatgcgactgccttgcccttgcctgacaaagagtttctctcatcatgtggctatgtgagcacagaccaactgaacaaaatcatgccttagcctttctttggtttcccaagagctacgtatttaatagcaaagaattgactggggcaataacgtttaagccaaaacaatgtttaaaccttttttgggggagtgacaggatggggtatggattctaaaatgccttttcccaaaatgttgaaatatgatgttaaaaaaataagaagaatgcttaatcagatagatattcctattgtgcaatgtaaatattttaaagaattgtgtcagactgtttagtagcagtgattgtcttaatattgtgggtgttaatttttgatactaagcattgaatgactatgtttttaatgtatagtaaatcacgctttttgaaaaagcgaaaaaatcaggtggcttttgcggttcaggaaaattgaatgcaaaccatagcacaggctaattttttgttgtttcttaaataagaaacttttttatttaaaaaactaaaaactagaggtgagaaatttaaactataagcaagaaggcaaaaatagtttggatatgtaaaacatttattttgacataaagttgataaagatatttttaataatttagacttcaagcatggctattttatattacactacacactgtgtactgcagttggtatgacccctctaaggagtgtagcaactacagtctaaagctggtttaatgttttggccaatgcacctaaagaaaaacaaactcgttttttacaaagcccttttatacctccccagactccttcaacaattctaaaatgattgtagtaatctgcattattggaatataattgttttatctgaatttttaaacaagtatttgttaatttagaaaactttaaagcgtttgcacagatcaacttaccaggcaccaaaagaagtaaaagcaaaaaagaaaacctttcttcaccaaatcttggttgatgccaaaaaaaaatacatgctaagagaagtagaaatcatagctggttcacactgaccaagatacttaagtgctgcaattgcacgcggagtgagttttttagtgcgtgcagatggtgagagataagatctatagcctctgcagcggaatctgttcacacccaacttggttttgctacataattatccaggaagggaataaggtacaagaagcattttgtaagttgaagcaaatcgaatgaaattaactgggtaatgaaacaaagagttcaagaaataagtttttgtttcacagcctataaccagacacatactcatttttcatgataatgaacagaacatagacagaagaaacaaggttttcagtccccacagataactgaaaattatttaaaccgctaaaagaaactttctttctcactaaatcttttataggatttatttaaaatagcaaaagaagaagtttcatcattttttacttcctctctgagtggactggcctcaaagcaagcattcagaagaaaaagaagcaacctcagtaatttagaaatcattttgcaatcccttaatatcctaaacatcattcattttgtgttgttgttgttgttgagacagagtctcgctctgtcgccactgcactccagcctgggcaaaggagn

SEQ ID NO: 95918 - DNA, 1633 bp, Homo sapiens
cgagctcggtaccctcgattggcgggcacttaccaggcaccaaaagaagtaaaagcaaaaaagaaaacctttcttcaccaaatcttggttgatgccaaaaaaaaatacatgctaagagaagtagaaatcatagctggttcacactgaccaagatacttaagtgctgcaattgcacgcggagtgagttttttagtgcgtgcagatggtgagagataagatctatagcctctgcagcggaatctgttcacacccaacttggttttgctacataattatccaggaagggaataaggtacaagaagcattttgtaagttgaagcaaatcgaatgaaattaactgggtaatgaaacaaagagttcaagaaataagtttttgtttcacagcctataaccagacacatactcatttttcatgataatgaacagaacatagacagaagaaacaaggttttcagtccccacagataactgaaaattatttaaaccgctaaaagaaactttctttctcactaaatcttttataggatttatttaaaatagcaaaagaagaagtttcatcattttttacttcctctctgagtggactggcctcaaagcaagcattcagaagaaaaagaagcaacctcagtaatttagaaatcattttgcaatcccttaatatcctaaacatcattcattttgtgttgttgttgttgttgagacagagtctcgctctgtcgccaggctagagtgcagtggcgcgatcttgactcactgcaatctccacctcccacaggttcaggcgattcccgtgcctcagcctcctgagtagctgggactacaggcacgcaccaccatgccaggctaatttttttgtattttagcagagacggggtttcaccatgttggccaggatggtctcgatctcctgacctcgtgatccacccgactcggcctcccaaagtgctgggattacaggtgtaagccaccgtgcccagccctaaacatcattcttgagagcattgggatatctcctgaaaaggtttatgaaaaagaagaatctcatctcagtgaagaatacttctcattttttaaaaaagcttaaaactttgaagttagctttaacttaaatagtatttcccatttatcgcagaccttttttaggaagcaagcttaatggctgataattttaaattctctctcttgcaggaaggactatgaaaagctagaattgagtgtttaaagttcaacatgttatttgtaatagatgtttgatagattttctgctactttgctgctatggttttctccaagagctacataatttagtttcatataaagtatcatcagtgtagaacctaattcaattcaaagctgtgtgtttggaagactatcttactatttcacaacagcctgacaacatttctatagccaaaaatagctaaatacctcaatcagtctcagaatgtcattttggtactttggtggccacataagccattattcactagtatgactagttgtgtctggcagtttatatttaactctctttatgtctgtggattttttccttcaaagtttaataaatttattttcttggattcctgataatgtgcttctgttatcaaacaccaacataaaaatgatctaaacc

SEQ ID NO: 95919 - DNA, 3847 bp, Homo sapiens
aaagtatcactgagcctttggctgagtctgatacagtccttatatacagacaatttttttttttccttgagacggagtcttactctgttgcccaggctggagtgcaatggcgcaatcttggctcactgcaaccgccgccccccaggttcaagcaattctcctgcctcagcctccagagtagctgggattacaggcatgcgccaccaagcccagctaattttgtatttttagatacagtttcaccatgttggtcagactggtctcgaactcctgacctcaggtgatctgcccacctcagcctcccaaagcgctgggattacaggcgtgagctaccgcgcctggccccatttaaggattaaaatgctgattctgcccccagttccagttccaaagattaaaggaatcgatccagatctcctcaaggaaggaaaattagaggaggtgaacacaatcttagccattcatgatagctataaacccgaattccacagtgatgactcttgggttgaatttattgagctagatattgatgagccagatgaaaagactgaggaatcagacacagacagacttctaagcagtgaccatgagaaatcacatagtaacctaggggtgaaggatggcgactctggacgtaccagctgttgtgaacctgacattctggagactgatttcaatgccaatgacatacatgagggtacctcagaggttgctcagccacagaggttaaaaggggaagcagatctcttatgccttgaccagaagaatcaaaataactcaccttatcatgatgcttgccctgctactcagcagcccagtgttatccaagcagagaaaaacaaaccacaaccacttcctactgaaggagctgagtcaactcaccaagctgcccatattcagctaagcaatccaagttcactgtcaaacatcgacttttatgcccaggtgagcgacattacaccagcaggtagtgtggtcctttccccgggccaaaagaataaggcagggatgtcccaatgtgacatgcacccggaaatggtctcactctgccaagaaaacttccttatggacaatgcctacttctgtgaggcagatgccaaaaagtgcatccctgtggctcctcacatcaaggttgaatcacacatacagccaagcttaaaccaagaggacatttacatcaccacagaaagccttaccactgctgctgggaggcctgggacaggagaacatgttccaggttctgagatgcctgtcccagactatacctccattcatatagtacagtccccacagggcctcatactcaatgcgactgccttgcccttgcctgacaaagagtttctctcatcatgtggctatgtgagcacagaccaactgaacaaaatcatgccttagcctttctttggtttcccaagagctacgtatttaatagcaaagaattgactggggcaataacgtttaagccaaaacaatgtttaaaccttttttgggggagtgacaggatggggtatggattctaaaatgccttttcccaaaatgttgaaatatgatgttaaaaaaataagaagaatgcttaatcagatagatattcctattgtgcaatgtaaatattttaaagaattgtgtcagactgtttagtagcagtgattgtcttaatattgtgggtgttaatttttgatactaagcattgaatgactatgtttttaatgtatagtaaatcacgctttttgaaaaagcgaaaaaatcaggtggcttttgcggttcaggaaaattgaatgcaaaccatagcacaggctaattttttgttgtttcttaaataagaaacttttttatttaaaaaactaaaaactagaggtgagaaatttaaactataagcaagaaggcaaaaatagtttggatatgtaaaacatttattttgacataaagttgataaagatatttttaataatttagacttcaagcatggctattttatattacactacacactgtgtactgcagttggtatgacccctctaaggagtgtagcaactacagtctaaagctggtttaatgttttggccaatgcacctaaagaaaaacaaactcgttttttacaaagcccttttatacctccccagactccttcaacaattctaaaatgattgtagtaatctgcattattggaatataattgttttatctgaatttttaaacaagtatttgttaatttagaaaactttaaagcgtttgcacagatcaacttaccaggcaccaaaagaagtaaaagcaaaaaagaaaacctttcttcaccaaatcttggttgatgccaaaaaaaaatacatgctaagagaagtagaaatcatagctggttcacactgaccaagatacttaagtgctgcaattgcacgcggagtgagttttttagtgcgtgcagatggtgagagataagatctatagcctctgcagcggaatctgttcacacccaacttggttttgctacataattatccaggaagggaataaggtacaagaagcattttgtaagttgaagcaaatcgaatgaaattaactgggtaatgaaacaaagagttcaagaaataagtttttgtttcacagcctataaccagacacatactcatttttcatgataatgaacagaacatagacagaagaaacaaggttttcagtccccacagataactgaaaattatttaaaccgctaaaagaaactttctttctcactaaatcttttataggatttatttaaaatagcaaaagaagaagtttcatcattttttacttcctctctgagtggactggcctcaaagcaagcattcagaagaaaaagaagcaacctcagtaatttagaaatcattttgcaatcccttaatatcctaaacatcattcattttgtgttgttgttgttgttgagacagagtctcgctctgtcgccaggctagagtgcagtggcgcgatcttgactcactgcaatctccacctcccacaggttcaggcgattcccgtgcctcagcctcctgagtagctgggactacaggcacgcaccaccatgccaggctaatttttttgtattttagcagagacggggtttcaccatgttggccaggatggtctcgatctcctgacctcgtgatccacccgactcggcctcccaaagtgctgggattacaggtgtaagccaccgtgcccagccctaaacatcattcttgagagcattgggatatctcctgaaaaggtttatgaaaaagaagaatctcatctcagtgaagaatacttctcattttttaaaaaagcttaaaactttgaagttagctttaacttaaatagtatttcccatttatcgcagaccttttttaggaagcaagcttaatggctgataattttaaattctctctcttgcaggaaggactatgaaaagctagaattgagtgtttaaagttcaacatgttatttgtaatagatgtttgatagattttctgctactttgctgctatggttttctccaagagctacataatttagtttcatataaagtatcatcagtgtagaacctaattcaattcaaagctgtgtgtttggaagactatcttactatttcacaacagcctgacaacatttctatagccaaaaatagctaaatacctcaatcagtctcagaatgtcattttggtactttggtggccacataagccattattcactagtatgactagttgtgtctggcagtttatatttaactctctttatgtctgtggattttttccttcaaagtttaataaatttattttcttggattcctgataatgtgcttctgttatcaaacaccaacataaaaatgatctaaacc

SEQ ID NO: 95920 - DNA, 476 bp, Homo sapiens
acaggtcccaagacttacagatgcaaatgaaaataactacttcgccacttatttaaggaagaaagaagaaaggaatcatagcacagagaatatattatttctccaagccagccaacaccacaaatagaggaaacttttccagctgatggaatgacaacttcagtcaattctcccatggggaaaaatgctttttatgaacactgttccttccaattcagctccatttcacagtgcatgattatcttccattttattgtcaccaaggcaccagagaaaacaaatagaataaagacaaccattattaacaggtaatagatgtttttcttgcagttttagtggtaaattaaactttaatggcatctgttcacaatgaaaaatgtaaccaccttagtgataaatatgctttaatttcaaatgtcaaattataacttgttttcatttaaatgtaaaataaattcactttccatcataagaaa

SEQ ID NO: 95921 - DNA, 1138 bp, Homo sapiens
taaggaatgcattaggggtgtgctgggaaccttttcttgagcgatgtcttaaagccagcttctcttctctgtctctgataaataattggaaggaaaggcaatgaatttttttctgacagttggttctaactgggggccagggcctcgtttgcaaatgaaaggactgctgttggagtagttgaaatcacaatgggccctgactcttttcacatcaaagtgtaaaagaatctccaggggtgataaatgggggctgctggactcattacttgtaaacaaagctgagggatgacctctacatttttttttaattaaaggaaaacagggtttcctagtggtgagcatggggctgctcttcgtttgaattttgactgttcacactggaaaagatctttctttaaggttacaagggagctgccgctgttacccaggatttaccctgaatctcaaacactactggaaaaatgctgtgcctaggacggcccagcaggtatcctgcatgtgttgagaattgaagtgcagtgggttccgctgcgttgttacagtaaagtggaacagggcagaatttctgagtgctgctcctctcaggagactgagggctcctttactccttttcccacccgacatcaggaggaaaactcctttattcctgtgcagtgtagaaaaaggtccgtttttaagtaaattcttagctctttgtaaaagaagtccaaaggcagtggttttagagtttaaagatagtatttctttatatttgtgtagttacaaggctttgagtatgatcaaaacgtttaaccaaaactaaagtatgtgcatactttatggtgttgaaagcaatgctactaaaaatagtacaacattttatgggattaagattgcaaattgctgcctaaattcagcttgcagttaaggcctaccttcagtaaactctcgttgtgtagtcagctccccaccaagcttatctcttgctgtttttccacttggctcctctgttgcagtcagtccaagccctaccagattttaaacaactggaggtcagagactgccctttgtaacctgagtggaactggtaaggcactgggcacccaagaattctaatgtgtttactgactttccacatgtttagtaatcaccttctgag

SEQ ID NO: 95922 - DNA, 421 bp, Homo sapiens
taaggaatgcattaggggtgtgctgggaaccttttcttgagcgatgtcttaaagccagcttctcttctctgtctctgataaataattggaaggaaaggcaatgaatttttttctgacagttggttctaactgggggccagggcctcgtttgcaaatgaaaggactgctgttggagtagttgaaatcacaatgggccctgactcttttcacatcaaagtgtaaaagaatctccaggggtgataaatgggggctgctggactcattacttgtaaacaaagctgagggatgacctctacatttttttttaattaaaggaaaacagggtttcctagtggtgagcatggggctgctcttcgtttgaattttgactactaaacaagagagtctcatctagtagtgacggcaaagcggttcacacgag

SEQ ID NO: 95923 - DNA, 407 bp, Homo sapiens
ctgcggcccccgcccgcgggtgtcctgcttaccgcgcgtggcggttccgggccagacctggggccggctccgagtctcttctgcgcgtggccgtggcgcggaggggcgcgcacaaactttctcaagtccggtggcgccgctgggccgctcttggctgcaagctgggctcccccgcctcctcccggggcttcggtggggcacccctggtgccgtggccgcacggcgcggaggggcggccgacctgagcccaggtcgctgacgttggcggggccggccctcccctcccccgctccggcgggggcgccgtgtgcggccagggtgggggtccctgggaggccagcggggtccttccccccaggtggcggcggggcgggggtctgggcgcagaccgggcggcggggcccccg

SEQ ID NO: 95924 - DNA, 1418 bp, Homo sapiens
tccaaccagtcccactgatatgaactgggtacctcagttggaaatgcagaaatcacccgccttctgcgttgatctcactgggagctgcagaccagagctgttcctatttggccatcttgccagcaatcagaccagagttttaaatggactacaaaataggtcaaactctatttcagaactagaggctaggaataatgtccaaacttggttatgaaagtttttttttttttggtctggtaggataagagggtttttactcatcttaagtttgaattaaactttgtaacaaagttattgtttttttaaacaatgcatgtatcaaattatctgtctcattagataactaggtagacttttccaagatggtttcaaaatcaaatatatattcaaagatcttccagtgtaaagcaataggaatgaaacaagccatgagaaagcagaatattttgagtatattctcatgcctttctttaaaggagaagcgcctatctaaacagttacagaaacccaaattcaaagtagattaaacaagaagtaaatttgtaaactcttttaactgggagacaggaagtagggagggctccaggcacaatatcattagcagttcaatgtgaacgaagacccatgtcctttccaagcctccctctgccatcagcattgccctccttcccagggtcacagatggctatcaatggcaaaactggggttccgcgttctcttctcctcatctggcaagagaaaatgggaaatctctatcccaagcttggattaaaaattattttcatttttgtgttccagcaaacttgggtcctatgcccagccatggaccaaaaataggcttaatgtgaatgttatgtgctgattggattaaaataagttctgactctgaatctgggaatgtggtcaccttcctcagagacaagttgagaggttggcttatctgaataaaagcagagaatatgagatgctggagaggtgttcattaaggagaacattccctgaggtgaattaacggttagaattatctatctctgtatttatctatccacccatctatcatcatcatcacctcatctccctcctttctctctctctaaatatatacatgcgggtatgttgagtgtgtatatatttattaggtgtgtaatatggtgtgtgtgtgtgtgtattccaggcagatgtgtgcatatatacccaaactttcctgatgaccttgaaattaaatgggtcatgtgaagctaaagattatagaaccccttgattcctttataaacagtatttctaagataagatcaacactaatctttcaaattagttgactgtgtatagaacaacttgtttatttaaagtcatctagtctaatgcaatcaaggagtaaattataaataaccagttagcataaatggaaagaaaatagt

SEQ ID NO: 95925 - DNA, 407 bp, Homo sapiens
agacagggtcttgctctgtcacccaggctggagtccagtggcatgattatggctcacttcagcctctatctcctggatgtaagtgatcctcccacctcagactccaagtagctgggaccacctccgagtagctggaaccaccacagctggctaatttttgtactttttatagataaggggtctggttatgttgcccaacctggtcttgaactcctgggctccagcgatcctcctgcctcagcctcccaaagtgctgggatcacaggcatgagctgttgcgcccacctacaccttctttacacagtcggctggtgcttgcaggtgctgtgctgttttctgggaaggttggctccatcacgagccatccacttcctcgccctgtgtcatcatggacatggcagtaaagc

SEQ ID NO: 95926 - DNA, 447 bp, Homo sapiens
gacaggtttcaccgtcgggagacagcaggcctgtcctccgccctcccagccacaacgtgtccttctgtgcacgtttcagctgaaaccttgcatttagttttctaactcagagggtttgtcaatcttttacctgcgaactcctgttcctgcctcgaatttctccactacgtccctatcgctgattccctgttttccaacccggccatggcttactccagggagaaggttgaactttctacacacgagtaactcccacccctgaatggtgtgtgcgatgactgcggtctgaaagcatgaacgtgcccaaactccaatttcacccactgtcatgatctattcttaaaagatggtgattctgggaaatgtttctgaaaattgaaagtgagataaacagcaatgccaactctaaggagtgcctgcaaggagcccgcgggcctgaccatgccc

SEQ ID NO: 95927 - DNA, 348 bp, Homo sapiens
tctccaaaatgctcatatatagtataattattgtaaagacctaactaaaaaatagggttggtgaaatattttttttcccctgcatctcagattttttaaaataaccagaagtcacctgtaatcccagcactttgggaggccaaggcgggcagaccacttgaggccaggagtttgaaactggcctggccaacatggtgaaatgccatctctcctaaaaatacaaaaattagccaggcagtgtggtgcacacctgcaatccagctactcagctgaggcaggagaatcacgtgaaccagggaggcagaggttgcagtgagccgagattgcacaaccgcaccccagcctggg

SEQ ID NO: 95928 - DNA, 690 bp, Homo sapiens
gttttgaagagacgggtctcactttgttgcccaggctggtgtcagactcctgggctcaagctaaatcacccaccttggcttcccaaagtgtcgggattacaggtgtgagccactgcgcccagctctgattttgtatttcttacttaaggcgacatacttagtagctgtgcgtcttggggcagatacctcccaaaatgctgggattacaggtgtaagccaccgcgcctggccgtagtttttaaattttctgtagaaacagagccttttgctgttgcccaggctagtctcaaactcctgcgctcaagcagggtcctcccactttggcctcccaaagtgctaggattacaggcacgagccactgcgcccagttgaaggttttctgtttagaattagttttttaaagtttcagttttatatcattagattaatatatttgccatcatatgatattgtgtctttttaatccagaaattgtagttaatttgcagaagattgcagttactctgcagataaaattgtatacgttttctttgaatctacaaaaagagtccctttgaaagaaaaacatttttaaatgttctaactgaacatccattccctattgaattaagaatcaatcgtggaacataataggcggtggagtgtttctagggtatattgctttctatatttttgttttttttggaatat

SEQ ID NO: 95929 - DNA, 745 bp, Homo sapiens
tgcggcttctttaaagggaaggcaggaggcggacagcttggctgtgaccctttagcgctgggtcgcgtgtggcccaccctcggcctgaggcattgttgggtggttggaggtggttgtagtatttggaaaagaacttgtccctgaagggctcaggggacttggtttctcagctcctaatatggaaaattaaggcatttcttacgagatgcagattttaaagcaggcatatctactcgacggctttggattactgcactgcacaaattccagtctctgtcggttttggctgagaagagctgtgcttctcaccagctactggtgagacattcgccctacaggaaagggtcggtatgattgtggacattgacatgcgtagcaaaagaaagtggctaatttgcgccaataataataaattagcttgtatttgaattagccaagtctttgcggttttgctaacttggcttcactttgcatggagtgggaagcgcctgcttctgaaaaggtgacttttttcctaattagaatggactcctcttaaggccatgcagttttcaaagaagaaagacaagctggacgttttgttagtaacaaaatgtagctgaagcagagagagaaggcagcatacgtcagcattttcttctctgcacttacaagaaagatcaaagactttaagactttcactgtttcttctaccgctatctactacgagcttcaaagaggaaccaggagtatgggaggagcatga

SEQ ID NO: 95930 - DNA, 520 bp, Homo sapiens
ttgggtgatctaaggatcccgtcgaggtaccaacacaaaactggtcattatcactataaattccaaaccttttctcactcttatcttttctgtaaagaggtattcaatcccctgagtttctgttatcaaaggcaagatatacaaggacaggtagtgtcctgtctgttctcttcaacatggcacatacagcaccttgaacttggtgtcttatttcattcatgtttttatatccattaaaataagctttgtttgtttgtttttttgagatggagtctcgctctgtcgcccaggctggagtgcagtggtgcgatcttggctcactgaaagctccgcctcctgggttcacgccattcccctgcctcagcctcccgagtagctgggactacaggcgcccaccaccacacgcggctgatttttgtatttttagtagagacagggtttcaccatgttagccacagtggtttcgatctcctgaccttgtaagtccacccgcctcggcctcccgaagtgctgggattac

SEQ ID NO: 95931 - DNA, 373 bp, Homo sapiens
ttcaatcacatttgctctgcctcttccaaattaaccccctaccaccttgaacttggtgtcttatttcattcatgtttttatatccattaaaataagctttgtttgtttgtttttttgagatggagtctcgctctgtcgcccaggctggagtgcagtggtgcgatcttggctcactgaaagctccgcctcctgggttcacgccattcccctgcctcagcctcccgagtagctgggactacaggcgcccaccaccacacgcggctgatttttgtatttttagtagagacagggtttcaccatgttagccacagtggtttcgatctcctgaccttgtaagtccacccgcctcggcctcccgaagtgctgggattac

SEQ ID NO: 95932 - DNA, 740 bp, Homo sapiens
agcggagtgggaggccaaggtgggcagatcacttgaggtcaggggttcgagaccaccctcaccaacatggtgaaactccgtctctactaaaaatacaaaaattagccaggcatggtggcgggcacctgtaatcccagctgctcaggaagctgaggcaggagaattgcttgaacctgagaggcggaggttgcagtgagcagagatcacgctactgcacttcagcctgggtggcagagctaggctctgactcataaaaagtaaaaataaaataaaaataagaaggaattacaaaatggaaccttttctttaataccagcctctaccacacaatcccattcctcctgtctcctgcagaggtagcctaaagattaaaatactcaacaaatttctcacaccaccattaaagctgcttaccaagaacttccccagcattttgacttccttgtttgatagctgaattgtgagcaggtgatagaagagcctttctagttgaacatacagataatttgctgaatacattccatttaatgaaggggttacatctgttacgaagctactaagaaggagcaaaagcatagggaaaaaaatctgatcagaacgcatcaaactcacatatgccccatctactacaaacagattgtagtgctgtgctggtttattccgttgtgcagaactgcaagctgagtcactaaaccaaagagaggaaataataggttagtaaacattgtaatcccaggaac

SEQ ID NO: 95933 - DNA, 380 bp, Homo sapiens
tgagaagctacaattccaacggacagctctgtgtgcatggctggggctgccacttgggaagtcctactgtgtgacgattgtcatctggaggtctttaggactatgtaatgtctctgttctcttttctgggggatagacccttggttgctgacattctgggagcaaggcaggggaacaggctgagagggccgtcccattcggtatgcatattttcacttgatctcctcttttcagccatatgttttgcctccactttctactaaggcttgtatccccaaatctggaatttctgcacagaataaacatctaatcttctgcttccacaggcctagctacctaaagtagggggatccacctgctccttatacgtattttctgcc

SEQ ID NO: 95934 - DNA, 179 bp, Homo sapiens
cacatgtggcttgcgtatattcctgttgaatagagctgttctaaagctattagttggattaaaatctgagtgcataatgccttaaagtcacccacagaatagatatgagtgaaatcgtctgtatttttgtcaaatgcggggtaaagatagagctggttaatccatagacacccttcaat

SEQ ID NO: 95935 - DNA, 351 bp, Homo sapiens
gaaagagagaaatagactgagtggggacatcatttgaaggtgaaagattaaactggaggtgtggcagacagaataatggcccccagacatgtccacatcctcatctctgaaacctgtggacatgttgttttacatggcaaaaggaactttgcagatgtaattaaggatcttgagataggagaattatcctggattatttgggtgggcccactgggtccttagaagagggaagttagaaggtcagagtccggccaggcgaggtggctcacacctgtaatcccagcactttgggaggccgaggcaggcggatcatgaggtcaggagatcgagaccatcctggctaacacagtg

SEQ ID NO: 95936 - DNA, 523 bp, Homo sapiens
tcagatgtgcatcaggactaagaggagtacgggggctagaatgtgctggacaggtgagggtgaaacctaatagagtggtataagttagggtgccaaagtgctgagagggcaggtttgagtaccgagggttaggccaaggtgtatgaggggttaagactgagatcaggtccagatactctacaacaagtttagatttaagccagagtagaggccaggttgagtggggccaggacttaaaggtaaagatttggagaataaggcccagatgtaaggtgattcaagaagggaggggctagacctctaggagtctctagaggtttttgatgacctctttggctctgtcccccacatcaggacttttgaagactaagtgaaacggtacatgcagagtgacctgagcatagttggcatagaactctaatcggtctcccttaagacttcctgtcttcactgacaaactcctactcaacttttaaggccttgctcaaatatcctctccgtgaagccttctccaagttccact

SEQ ID NO: 95937 - DNA, 713 bp, Homo sapiens
cttagaataaaaaacttttaaagtcagcaatatgtgaaatatgtattgaatatattatgctatatttatctgagtattttggtttaacaaattaaatgcatatttttttctttttaaaaaatgtattgaccatatttatataactacttatctttttatttggtagatttaagtaaaatttattatttatttaacacttttgaatttatattatacttgaagtggtttatttatccttggccagctacccccttgagactctggctttctattttatagaactattttaatgatagtttaaacatgtatacctgttactggttattttctgttccccttatcttgggagttcagcataatgctgtgcggatcaggataacaaggtcccactgaggtgaaggagggaggctgggaatggctacagcctggagtggaggtgtgatttcagtaggtggaaggttgtcttcctgaaaggaattggcagaagtagattcttactgattcagatacattttccaccaactgaaggaaggaattattaaagccaatggtgaacaaagcatttcaagcattttataggaagtgactagatgaggagatttttttcattccttttttaatcagcaaaaaagaaattagtattattgaattagcagattcttcctattctatattaagaaagatttaatttttgtaccaaggaaggttaggtg

SEQ ID NO: 95938 - DNA, 439 bp, Homo sapiens
acacactctcaccccaggcgcaaatccgttgtcttcataggaaggagaaagaggggtggtggtgaagggaaacactatcctcccaagcagggaagagatgacaaaaattaaattgcgctctctgctttcgccccagctctgccaccggactcggtccgcaaattccctaatcgctccgagctgttcagaatctcgcaaacaaagggagaaaactctttcaagtgctaccaaacgaaagttcgggttgctgtgcggcgcagaataaaacaagcacacacacgtctacttccaaacctcgcttcaccacgctaaaaatccgagccatttcaagttccactgcctccccagacccagcaggcttggaaggagagaaaaacctgctctacccagccaggtcccttcctttggagaagttataagccttccatggcacccgcta

SEQ ID NO: 95939 - DNA, 838 bp, Homo sapiens
agcggaaagaaattctaatggacaatgccttattgagcagctgtggtcaaatatttattaaaaaggacgtattgatttgcagattaaaactgaccacatatgaactcttcttttccagtgacattcttatttaaggtattgattaaagactttttatgcagaaagcatttttcttgtcagctcagttatgctggcttttgtaataagctaatttgatttccttttttaacctttgtttgattaggggaacagacatttgcattaagattcaagagagatgaagtctatcatcgatcttgacttcctcatggacctcttgtactcagcgaaagatgatttagagaatgtcaagaatcttggaacaaccgtaatgagagagaaaaaaaaatcacttcagacttatataccaggaagggcttatttgacagaaagggcaattgcatttggtggatatgttttagagaaatcaaatccaggaagattaattttgttcttaggccaaatcattaaaatatctatgggataagctgccattaataaagtacttgctagttaaaccaaaacatttcaaaacatccaaagagtttaagcaaaacatatacattattacttgtcacaaagggatactaaaagtaaattctagtatttctttataaacatgttcctagtaaaacactaacttcagacaggtttggaatttaatcctctattgctttctctgagaattgtgggggtaaaacactaatagattagcccaagtctttcatgagtgtacccaggattaatcctctttcacaataggactcaaagctatttgcaaatttttttttaattaaaa

SEQ ID NO: 95940 - DNA, 264 bp, Homo sapiens
agatagaaatttctgatacagcctctagaaaggctgtaccactttacattttgcaggatgcatagtcacagtgctgtctccaatactgtttatgatacttgttatagtctggtgttactaagtttttaattaaatttttagtttatatttttatgagactaatggacaattttttcttgtgtttgttggcaatgtttatctctcttttgtgacttgtcaattcatatcttctatcctttttttgagacagagtgttgttctgtc

SEQ ID NO: 95941 - DNA, 1520 bp, Homo sapiens
tcagttgtcatactgggctgctgtcagagaatgtttttttacatgaatgaacagattaaaaatggaataatatggtcgggtgcggtggctcacgcctgtaataccagcaatttgggaggccaaggcgggtggatcatttgaggttaggagtttgagaccatcctggccaacatggtaaaaccccatctgtactaaaaaaatacaaaaattagccgggcctggtggcatgcacctgtaatcccagctacccaggaggctgaggcaggagaactgctcgaatcccgggaggcagaggttgcaatgagctgaaatcgcaacactgcactgcagcctgggcaatggagtgagactccgtctcaaaaaaaaaaaaaaaaggaataatatttgaactacagagcatttttggggtcagcatgagctgctctagtaaggactcttgagtctgggaaaagtggtatcactataccttctccccactcctcacccacccgagcccatacactccctgcttttcatggatatgtattgaaaacaggtgcttctcagaagcactttgcctcaaccagagttatgtatgccctgcctatcttcccttcttaaccctgtaggaatatggatttacttttccaggaaaggggatagatttacatttctaggcatactctcaggtcctctatgtgatgtttgtgaaaggaattagggtgtgtcatgtgtgccatgaaacaacaaaaccaactaccctagaatcatttatgcagggggtactagagttagaaataataatgagggcagataacatttgtacctcagtctaccaaaaaattatagtactaaatttaacttctaggcgtttcctggaagcagatgctctataatttgtgatagcattctcataaatggagtcctacacataattggacagagatgtggaaatggtggtttccttctgataagggatacagtggaccatgtcgcttatatatcaccctactaggggatataattttcccttctaagcaagggaaatggcagtgctaaatagttttgtaaagtttttgaatgagaagcttttaggtaaagataaactgtcataatatttttcagatgcatttgcattgactatgggagaaaaattagggggaaatgacagtcatggtgtttttttttaattttaaggactgaaattctgttacatgatgtatgacaatataaaaacatacttagttttatactaaatctttttttaaggtcttggcatttaatataaagcaaattcacacgttttctaactttccataagttccaaaaagggaaagaagaaacctcagtcttgaaattttgatttttaaaaatcatgacactgttttaccatgaaattgagtagctaacttttggtaacaccttttgtttctttgtatgtttgtaataatggacattttaaaacacaggaatgttttggtttgtacagactttgacaaatgtgtgttaataaaaattcatattgactcaagtgtaaaagt

SEQ ID NO: 95942 - DNA, 1466 bp, Homo sapiens
tcagttgtcatactgggctgctgtcagagaatgtttttttacatgaatgaacagattaaaaatggaataatatggtcgggtgcggtggctcacgcctgtaataccagcaatttgggaggccaaggcgggtggatcatttgaggttaggagtttgagaccatcctggccaacatggtaaaaccccatctgtactaaaaaaatacaaaaattagccgggcctggtggcatgcacctgtaatcccagctacccaggaggctgaggcaggagaactgctcgaatcccgggaggcagaggttgcaatgagctgaaatcgcaacactgcactgcagcctgggcaatggagtgagactccgtctcaaaaaaaaaaaaaaaaggaataatatttgaactacagagcatttttggggtcagcatgagctgctctagtaaggactcttgagtctgggaaaagtggtatcactataccttctccccactcctcacccacccgagcccatacactccctgcttttcatggatatgtattgcctatcttcccttcttaaccctgtaggaatatggatttacttttccaggaaaggggatagatttacatttctaggcatactctcaggtcctctatgtgatgtttgtgaaaggaattagggtgtgtcatgtgtgccatgaaacaacaaaaccaactaccctagaatcatttatgcagggggtactagagttagaaataataatgagggcagataacatttgtacctcagtctaccaaaaaattatagtactaaatttaacttctaggcgtttcctggaagcagatgctctataatttgtgatagcattctcataaatggagtcctacacataattggacagagatgtggaaatggtggtttccttctgataagggatacagtggaccatgtcgcttatatatcaccctactaggggatataattttcccttctaagcaagggaaatggcagtgctaaatagttttgtaaagtttttgaatgagaagcttttaggtaaagataaactgtcataatatttttcagatgcatttgcattgactatgggagaaaaattagggggaaatgacagtcatggtgtttttttttaattttaaggactgaaattctgttacatgatgtatgacaatataaaaacatacttagttttatactaaatctttttttaaggtcttggcatttaatataaagcaaattcacacgttttctaactttccataagttccaaaaagggaaagaagaaacctcagtcttgaaattttgatttttaaaaatcatgacactgttttaccatgaaattgagtagctaacttttggtaacaccttttgtttctttgtatgtttgtaataatggacattttaaaacacaggaatgttttggtttgtacagactttgacaaatgtgtgttaataaaaattcatattgactcaagtgtaaaagt

SEQ ID NO: 95943 - DNA, 143 bp, Homo sapiens
aactggacactaaaagggagaattttaccatatttaaattttacctcaaaaaaacaggttttattttattttttgagatgggacagtggcaggtctcactatgttgcccaggctggtctcaaacttttgggctcaagccatcc

SEQ ID NO: 95944 - DNA, 413 bp, Homo sapiens
tgttattttaagacagaataagtagtatacccagagtacctgttacctttaaacatggctcagtaattgaaaggcatattactagaagtatttggagataattataatacttggaatatcaacagataaaaatactagttgatttttcccctgaacttcagagacactcatttgacctccaaaatagaatgccttgttcttgatactcattttttcgtttaatacattcagtgttcctgctgcaggtgccaaatgccagccttgagtttcgtgcttttaagtagaggtatagaaaacacagagcttatggagcccactctttctcagtttatgttactttcactgtgagcacctgcttactgtttggcaaactagacataactgttcagcatctgacggataaccctgctgag

SEQ ID NO: 95945 - DNA, 409 bp, Homo sapiens
caaaatattgttatttcaacatataatcaatataaaaattacttaagatactttatattattattatttatttatttttgggacggagtttcggtcttgtcgtccaggctggagtgcaatagctcaatctcggctcactgcaacccccgcctcctgggttcgagcgattctcctgcctcagcctcctgagtagctgggattacaggcacccgccatgatgcccgactaatttttgtcttcttagtagagacagggtttcaccatgttggccaggctagtctcgaactcctgacctcaggtgatccacccacctcggcctttgtacccaagtcttcaaaatctcttgtgtgttttctagtatgtctcggtttgcaccagccacattttaagtgctcactagtggctagcg

SEQ ID NO: 95946 - DNA, 422 bp, Homo sapiens
tagatggagtccagagggaagatggcagatcctcccctgcctgggatcctgtctggaaggacagaggaagcatcagctggaatggcagtggtctggagttttgagtcttgcagccgcccttgcttaatcagttgactcagctacactgcctttgagggagtcccttgagaggccagggcacacagtttccagggctggggccattgttcacagacagagccttaaagcaatgattcccaaagtttgtggcttgctagaatcacccggaaatctttttaaataaaatcctgatgcccagattcacctatattgttaaatgagaatgcccgagggccggagccagagtcggtaatctgggaatctctgctttgagtgtgcaaggcagagcttcaggcctcagagtggaaccaccgcacgcttcc

SEQ ID NO: 95947 - DNA, 446 bp, Homo sapiens
tttcctgtgcctgttccattccttcaaaaaaatttttttttctgtaatttacccatcactatatatttgatgtgctctactaaagtccaaatacttaatgccatttaaaaatactgtttcattttaacttgatttttagcaatgggcagtcaagagtgcttgctgatagaaagttagacaagggagtccaggaccttatggagacaaataagacatattttgaaacatagtgatggtgcccagtagctgacctgttccaacacttggatgctagactcctagccctgcctgctgcttactaactgtgggaccctgggcaagatttttaagctctgtgggcttcagtcttctcatttataaaattgggataagaatatcaccttgccagagggctgattgctggatacagcagaggcatttgccaggttatacaggtaagaatggcc

SEQ ID NO: 95948 - DNA, 332 bp, Homo sapiens
gcgccggtggtcctgagccgagatcaccatgacgtgagcggcaccgacagcccctttagggagacctccaacatttacgacggctctgccttctgtgcagacatggctgtgcagaacttcgtgggagatgcctgtcgcggagccacctgggtcgcccttcacaacggagggggcgtgggctggggtgaggtgatcaacgggggattcggcctcgtgctggacggtaccccggaggccgaggggagagccaggctgatgctcagctgggatgtctccaatggtgtggcccggcgctgctggtcagggaaccagaaggcctatgagatcatctg

SEQ ID NO: 95949 - DNA, 396 bp, Homo sapiens
aggtaggtatctagttttactctttttgcatgtgaatatctgcttgtccccccatcattgttgaaaaaaactattctttccccattaaatgatcttgggacccttgtaaaaaaatcaattgactatagatgtatggggtccagaggattttaatggccagaataaattaggatatgtttgagatgattaaatgcagggtttctcaacagtggtactgttgataattctttgttttagggtccatcttgtgcattataagatgtttggcagcatgtctggcctttatttattagatgccagtagcacctcacctccatcttagtcataacaaacaacaatgtctccagacattgccaaatgtcccctggagggaggggagcacaattactcccagct

SEQ ID NO: 95950 - DNA, 446 bp, Homo sapiens
taaaattaagaaaaatgtctatggaagtcaaagttcccctcaaactgttcattcttgcataaaccttgatatcccagagaccaatatctcaaagcatagttataatcactgacttcccaaccaaaggcttctgcagcttctgcttgcctgcagttgtagctcctaatctcattatcatcagaagcgtgatgcttcagactaatcataatcatgattatgattcaggattgcaggagtggggctccaacacatgcatgtttatgaagctcccacgtaattccgatggtcagtgagactaaagccttttgatgagaacttgagctcctcctgcttcatagcctttccctccatccctgctgcgtaattatcatcgatgactccaccatccaggtgggtgacctcccaacacccaggcctctcaattctttggccttctagccaccaat

SEQ ID NO: 95951 - DNA, 483 bp, Homo sapiens
cagagagcttgtgtatttaccttacggtggatggcttctgtatttttatctctaggctaaccttacctgctgagctctctgtatctgtttatttatttactcttcatttattcaaaattatttttaaaaattgagaacatactgtgtattattgctttgctgggctctggagaatttatattctactgtagtgtttctccagttgtagtttactgccagcctgcatcatttggtatgcttgtgaaaaatgcagattcctagtctcttcatctggtttattcacttgtgatctctacctgtgggcattatttatactacaagttgcaaacctctggtctcctagatgagatgtcaccacttgatgtcttgagagtaaattaaagttcgtatgttcaaaagttcattactctttcccatctctcattgtgcccagattttatgaatggcaccactagttaccatagcctgacccaggtatacccc

SEQ ID NO: 95952 - DNA, 587 bp, Homo sapiens
taaatttaatttaattttatctttatagagatggggtctcactatattgaccaggctggtctcaaactcctggcctcaagtgatcctcacatctcggcttcccaaagtgcaaggattatgggcatgagccactgagcccagcctaaacaaagcttttaaaagctcctgcaacctcaaggttgttaacctggtcatctcatggtaattagaaactctgattggctgctttagatttcttgattaaaaacctaagtaaactgattaagttttaggcattctttcaaaggtttctcagtgaaaagattgggaactattctatttggtgctttgtgaaaatattttgaattagtatatgtgccagttattgccatttcttaagtccaaaatgtttttctggtcaaataaatagcagtttttcaaaaacaaaaattagctgtgtgtggtggcatgcatgtgtagtcccagctactcaggaggctgtgggaggactgcttaagcctgggagatcaaggctgcagtaagctaagatggtgtcactgcactccagcctgggtgacagagtaagaccctgtctcagaaaaaaaaaa

SEQ ID NO: 95953 - DNA, 427 bp, Homo sapiens
acctcgtgatctgctggcctcggcctcccaccaggtgacctgttttttagcaaaaatctcagaagcattgcatagtgttaaaataccaaacatgcataaatctgtcacaaaatattcatactttgggtttggttctctgcacacattttcatacttagtaacacatcttctcaaggtgagtgtattgaccctgcccactgggaaggcagtgggcttcccaaagcttcccggacgctgctgggacgctgaggttcccatctgggaggttgggggcaagcacgagagccaaagggcacagagttgtctttttctttgagatggagtcttgctctgttacctaggctggagggcagtggcaccatcacagctcactccagttttgacctcctgggctcacatgatcctcccaccttagcctccacaggca

SEQ ID NO: 95954 - DNA, 156 bp, Homo sapiens
  misc_feature (8)..(8): n is a, c, g, or t
  misc_feature (10)..(10): n is a, c, g, or t
agcactgntnaaggcatgtactcagaccccatcatggccagcaagcctaaggttcaaagaagatactaacctctataattcccttgtgcacatggctgttcacctatcataggagcagaacactacctgagctaacttatgcccacctgaatcatg

SEQ ID NO: 95955 - DNA, 831 bp, Homo sapiens
caattcgactgtgggactcagagagaaaacggaggagcctcactcatggaggaggaacaaggtaggctggaggcagggacttgtaggcctcagacagaaggaagctggtgaagctcccataggcaaaatgcccaggagctccggctagaaggcagcaggagtgtgcagtccaggcaagaggaagagatcccccacagcacctccctctgcccagctcagacaaatgggacagtcaatccccaggctgatggaggcgggagcgagaaccacaaagttgtcagactggtttgcccaggacagggagagcagggaacacaaattgcagcaggagctcagcttcagggggcagaaaaaagcagcaaaattggtgggctgtagggaaacaaggacccaggtccatgcgatttcctgggtgcagaggggaaatccagcaggccaagagcaagggagccaagggacaaggggccagcagatgctgaaaaggaccaaggtttctggaaaaaaagagagtgacacttacaagaagggacacctacaaggagagaaacctgtcccctactcttacactggcccaagctcaggaccactcacacctgtctcctgagggacaggccagtgcaagaagaatggacaggacactgccaaccacgggatactgacagagattctgtccctcaccaaactttattcctctgagccctctactcatctggtcctgacctagggttcctaactccattctctctaagagcctagttttagcaaaactcctgttaaccagaatcccccaacctcaatatctaatcaccctggatatctgaacgtatttct

SEQ ID NO: 95956 - DNA, 509 bp, Homo sapiens
gtcgtgtcttccctgttaccaacagaattcagcaaaagggactgtgtgatttccaaacatgggtcagcaagagcaatgcagcctcaactttgtttgcctgaacacttgcacttagagccctgggttacccagtaagaaatccaactactctatagccaccattctacaaggatgccacatggagaggcgctcctataaggcgtcctaatccgaattcttccagccccagaaccagacaaaggagtgaacacgacttaagccctcagcaactgagtctctctcctggcctttgagttttttcacaaatgatcagacgtcatggagcagagacatgctgtccccattgtgacttgtccaaattcctggcctacagaatttgttaacaaaatataaaattgatttaagattagatttcacgatgatttgttttgtaaaaatagcagccacaacaccggggaaagctacttccccacatttaagaatatggaaaaaaagagataagtttctca

SEQ ID NO: 95957 - DNA, 212 bp, Homo sapiens
attaggcctcgttgccacctctgcacaggcgcttggagcccttgtagaagctggtgctgctgggacaacagagggatagaatcctctttggccagatgccaaatgctgtttgttggtctccttgtaaaaacacccagaaatcatgggggctttccatgtgtgagctgcacctcttactctctgcagcacccaggtgtctcccgggcaccatg

SEQ ID NO: 95958 - DNA, 271 bp, Homo sapiens
tgggccgttgttgatgcaaggacaggggaaggaataggagggaagctgatggggtctaatgctccctcattatgtaggagatcatctcccttcatgacatctacacattcaggtcaaaatatcagagtgacatgagctgagatgaaagtgctgtgagaaccatttctcccgtcaaagtccacaagcagccttgaagatggctggtccactcacagagcaagacctcgggggtcaggatgtctcaaggcgaccttccacctcctccaacgtg

SEQ ID NO: 95959 - DNA, 161 bp, Homo sapiens
gttttgcctcctaagctcaaggataacacagctattacttcttctcattataaaaccatcatctgcgttacggggcagttagagaacacagaagaggaaaaccagccaccccaatcctaccctcagaacatgtcgggttttggtccattttccactgtctc

SEQ ID NO: 95960 - DNA, 565 bp, Homo sapiens
agcggcaactcatttgggtcccctcccacgctgtgggagatttgtgcttttgctcttcacaataaatcttgctgcagctcgctctttgggtccgcactacctttatgagctgtaacactgcgaaggtctgcggtttcactcctgaagtcagcgagaccaagaacccaggggaaggaaccaattctggacacattggtacacacattggcaggtagaggggctaccttgtaggagctaaggctggaatactctgctatcattattattattattattattattttgagatggagtctcactatgtcacctaggatggagcgcagtggtgcagtctaggctcactgcaacctccgtgtgccaggttaaaacgattctcctacctcagtctcctgagtagctgggcttacaggtgcctgccaccacacctgggtaatttttctatttttagtagagggaaatgactttgtatctcccttcacaaagagagatgtgaagaggtgtctctcatcgaaagtcacacagtctgaaatgctactgtgtctcttaactccttttctttataggt

SEQ ID NO: 95961 - DNA, 764 bp, Homo sapiens
ctcttctccctcccgtctctgctgcacgctgagccggaaccccggagtgaggttctggccaacagtcctcctcctcctcctcttcctcctcctatcagcagaatctcccttgcgtgttaaccacccactcggtgaacggcagcaatacaagcataggtatgtgagccctaagcacgtgcaactccctggcttcagtgccttgggccacaccaggttccctggggctggcctcaagcctccaagctcccttctctgatggcaccgccccagtttttaagacagcatatgccctccttgaaggttcccagggtgccgcctccacgcccggcttcaaattggagccaaggacctgggtacagatctgtccccgccacaggggtgtgcatggctcagctggaggcgacactctggccaagagttgggaagagatggcctctttctcactcgctatagctaggacgggcccaggggctgcaggcgaggagagttctcagcagcagagccaggaaacagtccagtgggaagcagtggaaggagctgaacctgtggctagaagtcgacccctggcctgctctgtcatgagctgacaaatgctcctttgcgtgggcttgctgccgctacatttgaaaccagcatctgtgcagcacccagacttcatggccacgccctcaatccaggaatgggagccaacgtgcgcctgcagggttgttttctctgcctagaaaactcctatgcactcttcaaaatccaacttaagtagcacc

SEQ ID NO: 95962 - DNA, 373 bp, Homo sapiens
atttcttagattaagtcttcaaaatgtggtatatattttaaatttacagcattatctcaaattagcctctttttaagggctcagtagccacatatggctagtggtaccctattggacagctcaggtctatttgatggaacatatattggcaggttctaccttttactcaagggaattttagtttcatggttaattggcgttaattatcagtagtaatcataatgtaactcaccatagttattactttagctaatatatgggcagaagtccacatgcctagtttaaataattccttatttttggttgagaaaaagtataaatatttatatcaaaattacctttctacatgacacttaaagtagtataatatttt

SEQ ID NO: 95963 - DNA, 320 bp, Homo sapiens
ttggtcatcaccacaggtctctctcgtactaaatccagcagatacaccttggccctcatcttacttatttgcagcctctacgattgtttcccactctcattctgaagtcctccttccttggcctcttaccattctgccttctagtttccttcactggttattttaagaacataaatgtgctatatttaagctggttcattcattatattaccaagcttggtatcacaaatagacttcatatagaaatgctataatccttccttcccctccttccctgcctccctctgttccttccatccttccattcctttctttcataa

SEQ ID NO: 95964 - DNA, 1691 bp, Homo sapiens
  misc_feature (16)..(16): n is a, c, g, or t
  misc_feature (604)..(604): n is a, c, g, or t
aaagaggctttgcctnagtagctcttctcaaccccagctgccgtgagtctgattcaactgatggggcatcggtggttgttcagcctccccaggtgaactcgaagtggagcaaaaggtgacagtcacagcttagtagcccgccctgaagatgttggcaccagcctctactttgtaaatgactccttgcagcaggtgaccttttccagctccgtgggggtggtggtgccctgcccggccgcgggctcccccagcgcggcccttcgatggtacctggccacaggggacgacatctacgacgtgccgcacatccggcacgtccacgccaacgggacgctgcagctctaccccttctccccctccgccttcaatagctttatccacgacaatgactacttctgcaccgcggagaacgctgccggcaagatccggagccccaacatccgcgtcaaagcagttttcagggaaccctacaccgtccgggtggaggatcaaaggtcaatgcgtggcaacgtggccgtcttcaagtgcctcatcccctcttcagtgcaggaatatgttagcgttgtatcttgggagaaagacacagtctccatcatcccagaanacaggttttttattacctaccacggcgggctgtacatctctgacgtacagaaggaggacgccctctccacctatcgctgcatcaccaagcacaagtatagcggggagacccggcagagcaatggggcacgcctctctgtgacagaccctgctgagtcgatccccaccatcctggatggcttccactcccaggaagtgtgggccggccacaccgtggagctgccctgcaccgcctcgggctaccctatccccgccatccgctggctcaaggatggccggcccctcccggctgacagccgctggaccaagcgcatcacagggctgaccatcagcgacttgcggaccgaggacagcggcacctacatttgtgaggtcaccaacaccttcggttcggcagaggccacaggcatcctcatggtcattgatccccttcatgtgaccctgacaccaaagaagctgaagaccggcattggcagcacggtcatcctctcctgtgccctgacgggctccccagagttcaccatccgctggtatcgcaacacggagctggtgctgcctgacgaggccatctccatccgcgggctcagcaacgagacgctgctcatcacctcggcccagaagagccattccggggcctaccagtgcttcgctacccgcaaggcccagaccgcccaggactttgccatcattgcacttgaggatggcacgccccgcatcgtctcgtccttcagcgagaaggtggtcaaccccggggagcagttctcactgatgtgtgcggccaagggcgccccgccccccacggtcacctgggccctcgacgatgagcccatcgtgcgggatggcagccaccgcaccaaccagtacaccatgtcggacggcaccaccatcagccacatgaacgtcacaggcccccagatccgcgacgggggcgtgtaccggtgcacagcgcggaacttggtgggcagtgctgaatatcaggcgcgaataaacgtaagaggtgcctgtctacatttaaatatcagaataggtttttgagttcctttgccatctctgtggttaccattattcttgtgctgattagtacttat

SEQ ID NO: 95965 - DNA, 5590 bp, Homo sapiens
  misc_feature (5036)..(5036): n is a, c, g, or t
cagcatttatcaagaaattacaaagcgctgtgtgaagcctctgaaatgtattaattcattttatcctcagactatccatgagatggcacgccccgcatcgtctcgtccttcagcgagaaggtggtcaaccccggggagcagttctcactgatgtgtgcggccaagggcgccccgccccccacggtcacctgggccctcgacgatgagcccatcgtgcgggatggcagccaccgcaccaaccagtacaccatgtcggacggcaccaccatcagccacatgaacgtcacaggcccccagatccgcgacgggggcgtgtaccggtgcacagcgcggaacttggtgggcagtgctgaatatcaggcgcgaataaacgtaagaggcccacccagcatccgggctatgcggaacatcacagcagtcgccgggcgggacacccttatcaactgcagggtcatcggctatccctactactccatcaagtggtacaaggatgccctgctgctgccagacaaccaccgccaggtggtgtttgagaatgggaccctcaagctgactgacgtgcagaagggcatggatgagggggagtacctgtgcagtgtcctcatccagccccagctctccatcagccagagcgttcacgtagccgtcaaagtgccccctctgatccagcccttcgaattcccacccgcctccatcggccagctgctctacattccctgtgtggtgtcctcgggggacatgcccatccgtatcacctggaggaaggacggacaggtgatcatctcaggctcgggcgtgaccatcgagagcaaggaattcatgagctccctgcagatctctagcgtctccctcaagcacaacggcaactatacatgcatcgccagcaacgcagccgccaccgtgagccgggagcgccagctcatcgtgcgtgtgccccctcgatttgtggtgcaacccaacaaccaggatggcatctacggcaaagctggtgtgctcaactgctcggtggacggctaccccccacccaaggtcatgtggaagcatgccaaggggagcgggaacccccagcagtaccaccctgtgcccctcactggccgcatccagatcctgcccaacagctcgctgctgatccgccacgtcctagaagaggacatcggctactacctctgccaggccagcaacggcgtaggcaccgacatcagcaagtccatgttcctcacagtcaagatcccggccatgatcacttcccaccccaacaccaccatcgccatcaagggccatgcgaaggagctaaactgcacggcacggggtgagcggcccatcatcatccgctgggagaagggggacacagtcatcgaccctgaccgcgtcatgcggtatgccatcgccaccaaggacaacggcgacgaggtcgtctccacactgaagctcaagcccgctgaccgtggggactctgtgttcttcagctgccatgccatcaactcgtatggggaggaccggggcttgatccaactcactgtgcaagagccccccgaccccccagagctggagatccgggaggtgaaggcccggagcatgaacctgcgctggacccagcgattcgacgggaacagcatcatcacgggcttcgacattgaatacaagaacaaatcagattcctgggacttcaagcagtccacacgcaacatctcccccaccatcaaccaggccaacattgtggacttgcacccggcatctgtgtacagcatccgcatgtactctttcaacaagattggccgcagtgaaccaagcaaggagctcaccatcagcactgaggaggccgctcccgatgggccccccatggatgttaccttgcagccagtgacctcacagagcatccaggtgacctggaaggcacccaagaaggagctgcagaacggtgtcatccggggctaccagattggctacagagagaacagccccggcagcaacgggcagtacagcatcgtggagatgaaggccacgggggacagcgaggtctacaccctggacaacctcaagaagttcgcccagtatggggtggtggtccaagccttcaatcgggctggcacggggccctcttccagcgagatcaatgccaccactctggaggatgtgcccagccagccccctgagaacgtccgggccctgtccatcacttctgacgtggccgtcatctcctggtcagagcccccgcgcagcaccctcaatggcgtcctcaaaggctatcgggtcatcttctggtccctctatgttgatggggagtggggcgagatgcagaacatcaccaccacgcgggagcgggtggagctgcggggcatggagaagttcaccaactacagcgtccaggtgctggcctacacccaggctggggacggcgtacgcagcagtgtgctctacatccagaccaaggaggacgttccaggtccccctgctggcatcaaagctgtcccttcatcagctagcagtgtggttgtgtcttggctcccccctaccaagcccaacggggtgatccgcaagtacaccatcttctgttccagccccgggtctggccagccggctcccagcgagtacgagacgagtccagagcagctcttctaccggatcgcccacctaaaccgcggtcagcagtatctgctgtgggtggccgccgtcacctctgccggccggggcaacagcagcgagaaggtgaccatcgagcctgctggcaaggccccagcaaagatcatctcctttgggggcaccgtgacaacaccttggatgaaagatgttcggctgccttgcaattcagtgggagatccagcccctgctgtgaagtggaccaaggacagtgaagactcggccattccagtgtccatggatgggcaccggctcatccacaccaatggcacactgctgctgcgtgcagtgaaggctgaggactctggctactacacgtgcacggccaccaacactggtggctttgacaccatcatcgtcaaccttctggtgcaagttcccccggaccagccccgcctcactgtctccaaaacctcagcttcgtccatcaccctgacctggattccaggtgacaatgggggcagctccatccgaggcttcgtgctacagtactcggtggacaacagcgaggagtggaaggatgtgttcatcagctccagcgagcgctccttcaagctggacagcctcaagtgtggcacgtggtacaaggtgaagctggcagccaagaacagcgtgggctctgggcgcatcagcgagatcatcgaggccaagacccacgggcgggagccctccttcagcaaagaccaacacctcttcacccacatcaactccacgcatgctcggcttaacctgcagggctggaacaatgggggctgccctatcacagccatcgttctggagtaccggcccaaggggacctgggcctggcagggcctccgggccaacagctccggggaggtgtttctgacggaactgcgagaggccacgtggtacgagctgcgcatgagggcttgcaacagtgcgggctgcggcaatgaaacagcccagttcgccaccctggactacgatggcagcaccattccacccatcaagtctgctcaaggtgaaggggatgatgtgaagaagctgttcaccatcggctgccctgtcatcctggccacactgggggtggcactgctcttcatcgtacgcaagaagaggaaggagaaacggctgaagcgactccgagatgcaaagagtttggcagaaatgttgataagcaagaacaatagaagctttgacacccctgtgaaagggccaccccagggcccacggctacacattgacatccccagggtccagctgctcatcgaggacaaagaaggcatcaagcaactgggagatgacaaggccaccatccctgtgacagatgctgagttcagccaagctgtcaacccacagagcttctgtactggcgtctccttgcaccacccaaccctcatccagagcacaggacccctcatcgacatgtctgacatccggccaggaaccaatccagtgtccaggaagaatgtgaagtcagcccacagcacccggaaccggtactcaagccagtggaccctgaccaagtgccaggcctccacacctgcccgcaccctcacctccgactggcgcaccgtgggctcccagcatggtgtcacggtcactgagagtgacagctacagtgccagcctgtcccaggacacagacaaaggaaggaacagcatggtgtccactgagagtgcctcttccacctacgaggagctggcccgggcctatgagcatgccaagctggaggagcagctgcagcacgccaagtttgagatcaccgagtgcttcatctctgacagttcctctgaccagatgaccacaggcaccaacgagaacgccgacagcatgacatccatgagcacaccctcagagcctggcatctgccgctttaccgcctcaccacccaagccccaggatgcggaccggggcaaaaacgtggctgtgcccatccctcaccgggccaacaagagtgactactgcaacctgcccctgtatgccaagtcagaggccttctttcgaaaggcagatggacgtgagccctgccccgtggtcccaccccgtgaggcctccatccggaacctggctcgaacctaccacacccaggctcgccacctgaccctggaccctgccagcaagtccttgggccttccccacccaggggcccccgctgccgcctccacagccaccttacctcagaggactctggccatgccagcccccccagccggcacagcccccccagcccccggccccacccctgctgagccacccaccgcccccagcgctgcccctccggcccccagcaccgagcctccacgagccgggggcccacacaccaaaatggggggctccagggactcgcttctcgagatgagcacatcgggggtagggaggtctcagaagcagggggccggggcctactccaaatcctacaccctggtgtagggccngcaggaagagcagccacgcctgggccgcgccgcgccgcagccccacacgccagctcggctgtttttctgcattatttatattcaactgacagacaaaaaccaaccaacgacaaaacaaaaacccccaatcatgaacgcctgtacatagaactcttttgtacaaatgaaactattttcttcttctccatgaagccagggcacaaagaatttgacagtacaagtcaaatcccccaccccacaaaatatgtgtggagatatatatacatatatagacagacaggaacgcgtccacgagctatatatctatatatttctctcaccctattttgagacagaggcacaaagactcagcaatttttttccctcctcctcaccttccccccagtctaggtggttttgacaaagaccaaaatcccaactcagagacactgcatgcgattttactgttccaagaaaaccaggagttgcttcaatttgcagatgcttatgtgttaatacctttttctatgaaaaaagacccagcgccgtgtgcaataaaggttatgtttctatgt

SEQ ID NO: 95966 - DNA, 181 bp, Homo sapiens
tggttgtgtcttggctcccccctaccaagcccaacggggtgatccgcaagtacaccatcttctgttccagccccgggtctggccagccggtaagtgagttcagggccagatgatgaaggggatggaagaaaagaaaagggaccttgtacatcagccggcttccaggccaaaccctgaggct

SEQ ID NO: 95967 - DNA, 610 bp, Homo sapiens
ccttatcaactgcagggtcatcggctatccctactactccatcaagtggtacaaggatgccctgctgctgccagacaaccaccgccaggtggtgtttgagaatgggaccctcaagctgactgacgtgcagaagggcatggatgagggggagtacctgtgcagtgtcctcatccagccccagctctccatcagccagagcgttcacgtagccgtcaaaggtaggcctccctcaccagccagggcccctgcccgcctgaccacccaggatgcgtgggcctttccccagctgggactcagacaacaataggcaatcctgggtgaacggaaggctgagcaagagaggccccagcttggcattcagaaaaaagggagcagggcagaagactgtgggtggacgcaggccatgagctcctctacatccggggtcctcctcgggctgcagaataagacagcacacaccccaggtgcatgagagggtgagttacagataaaggaggcaggctgccttctgggagagaggccaggtcagagatgggctgcatggggcctctgctgttgggatggagcccccaggagctcagcgggcccacacaaggaggccacaagcaac

SEQ ID NO: 95968 - DNA, 7231 bp, Homo sapiens
  misc_feature (1024)..(1024): n is a, c, g, or t
  misc_feature (6677)..(6677): n is a, c, g, or t
cgggtaagctgagtccgaaagaggcaggaagctcgtgtcccaggtgacttaggccagtagaaaccgggcgtccttggctgaagcatggcaggctgttggcacatggatgacacatgcctgtctgcgaccacaggctccaagccggtgggtgacagggacccctcgcctctcagacagcggagccgggtcggggcggtctggcccgggccgccgctcctgttcctgggcttgtggggctggggtccgtctgggctccgggctcgcgcggcgctcaccacccggggtgccgcgggggggcggggagagcggccgcctagcccagccccgcggatgacaggagccggggagccgaggagggaggagccgccgccgcagccgagcgctgggctgaggagcagagagagcggggcgccgagtgcgggcggctgggagcgcgctgagcgggggagaggcgctgccgcacggccggccacaggaccacctccccggagaatagggcctctttatggcatgtggctggtaactttcctcctgctcctggactctttacacaaagcccgccctgaagatgttggcaccagcctctactttgtaaatgactccttgcagcaggtgaccttttccagctccgtgggggtggtggtgccctgcccggccgcgggctcccccagcgcggcccttcgatggtacctggccacaggggacgacatctacgacgtgccgcacatccggcacgtccacgccaacgggacgctgcagctctaccccttctccccctccgccttcaatagctttatccacgacaatgactacttctgcaccgcggagaacgctgccggcaagatccggagccccaacatccgcgtcaaagcagttttcagggaaccctacaccgtccgggtggaggatcaaaggtcaatgcgtggcaacgtggccgtcttcaagtgcctcatcccctcttcagtgcaggaatatgttagcgttgtatcttgggagaaagacacagtctccatcatcccagaanacaggttttttattacctaccacggcgggctgtacatctctgacgtacagaaggaggacgccctctccacctatcgctgcatcaccaagcacaagtatagcggggagacccggcagagcaatggggcacgcctctctgtgacagaccctgctgagtcgatccccaccatcctggatggcttccactcccaggaagtgtgggccggccacaccgtggagctgccctgcaccgcctcgggctaccctatccccgccatccgctggctcaaggatggccggcccctcccggctgacagccgctggaccaagcgcatcacagggctgaccatcagcgacttgcggaccgaggacagcggcacctacatttgtgaggtcaccaacaccttcggttcggcagaggccacaggcatcctcatggtcattgatccccttcatgtgaccctgacaccaaagaagctgaagaccggcattggcagcacggtcatcctctcctgtgccctgacgggctccccagagttcaccatccgctggtatcgcaacacggagctggtgctgcctgacgaggccatctccatccgcgggctcagcaacgagacgctgctcatcacctcggcccagaagagccattccggggcctaccagtgcttcgctacccgcaaggcccagaccgcccaggactttgccatcattgcacttgaggatggcacgccccgcatcgtctcgtccttcagcgagaaggtggtcaaccccggggagcagttctcactgatgtgtgcggccaagggcgccccgccccccacggtcacctgggccctcgacgatgagcccatcgtgcgggatggcagccaccgcaccaaccagtacaccatgtcggacggcaccaccatcagccacatgaacgtcacaggcccccagatccgcgacgggggcgtgtaccggtgcacagcgcggaacttggtgggcagtgctgaatatcaggcgcgaataaacgtaagaggcccacccagcatccgggctatgcggaacatcacagcagtcgccgggcgggacacccttatcaactgcagggtcatcggctatccctactactccatcaagtggtacaaggatgccctgctgctgccagacaaccaccgccaggtggtgtttgagaatgggaccctcaagctgactgacgtgcagaagggcatggatgagggggagtacctgtgcagtgtcctcatccagccccagctctccatcagccagagcgttcacgtagccgtcaaagtgccccctctgatccagcccttcgaattcccacccgcctccatcggccagctgctctacattccctgtgtggtgtcctcgggggacatgcccatccgtatcacctggaggaaggacggacaggtgatcatctcaggctcgggcgtgaccatcgagagcaaggaattcatgagctccctgcagatctctagcgtctccctcaagcacaacggcaactatacatgcatcgccagcaacgcagccgccaccgtgagccgggagcgccagctcatcgtgcgtgtgccccctcgatttgtggtgcaacccaacaaccaggatggcatctacggcaaagctggtgtgctcaactgctcggtggacggctaccccccacccaaggtcatgtggaagcatgccaaggggagcgggaacccccagcagtaccaccctgtgcccctcactggccgcatccagatcctgcccaacagctcgctgctgatccgccacgtcctagaagaggacatcggctactacctctgccaggccagcaacggcgtaggcaccgacatcagcaagtccatgttcctcacagtcaagatcccggccatgatcacttcccaccccaacaccaccatcgccatcaagggccatgcgaaggagctaaactgcacggcacggggtgagcggcccatcatcatccgctgggagaagggggacacagtcatcgaccctgaccgcgtcatgcggtatgccatcgccaccaaggacaacggcgacgaggtcgtctccacactgaagctcaagcccgctgaccgtggggactctgtgttcttcagctgccatgccatcaactcgtatggggaggaccggggcttgatccaactcactgtgcaagagccccccgaccccccagagctggagatccgggaggtgaaggcccggagcatgaacctgcgctggacccagcgattcgacgggaacagcatcatcacgggcttcgacattgaatacaagaacaaatcagattcctgggacttcaagcagtccacacgcaacatctcccccaccatcaaccaggccaacattgtggacttgcacccggcatctgtgtacagcatccgcatgtactctttcaacaagattggccgcagtgaaccaagcaaggagctcaccatcagcactgaggaggccgctcccgatgggccccccatggatgttaccttgcagccagtgacctcacagagcatccaggtgacctggaaggcacccaagaaggagctgcagaacggtgtcatccggggctaccagattggctacagagagaacagccccggcagcaacgggcagtacagcatcgtggagatgaaggccacgggggacagcgaggtctacaccctggacaacctcaagaagttcgcccagtatggggtggtggtccaagccttcaatcgggctggcacggggccctcttccagcgagatcaatgccaccactctggaggatgtgcccagccagccccctgagaacgtccgggccctgtccatcacttctgacgtggccgtcatctcctggtcagagcccccgcgcagcaccctcaatggcgtcctcaaaggctatcgggtcatcttctggtccctctatgttgatggggagtggggcgagatgcagaacatcaccaccacgcgggagcgggtggagctgcggggcatggagaagttcaccaactacagcgtccaggtgctggcctacacccaggctggggacggcgtacgcagcagtgtgctctacatccagaccaaggaggacgttccaggtccccctgctggcatcaaagctgtcccttcatcagctagcagtgtggttgtgtcttggctcccccctaccaagcccaacggggtgatccgcaagtacaccatcttctgttccagccccgggtctggccagccggctcccagcgagtacgagacgagtccagagcagctcttctaccggatcgcccacctaaaccgcggtcagcagtatctgctgtgggtggccgccgtcacctctgccggccggggcaacagcagcgagaaggtgaccatcgagcctgctggcaaggccccagcaaagatcatctcctttgggggcaccgtgacaacaccttggatgaaagatgttcggctgccttgcaattcagtgggagatccagcccctgctgtgaagtggaccaaggacagtgaagactcggccattccagtgtccatggatgggcaccggctcatccacaccaatggcacactgctgctgcgtgcagtgaaggctgaggactctggctactacacgtgcacggccaccaacactggtggctttgacaccatcatcgtcaaccttctggtgcaagttcccccggaccagccccgcctcactgtctccaaaacctcagcttcgtccatcaccctgacctggattccaggtgacaatgggggcagctccatccgaggcttcgtgctacagtactcggtggacaacagcgaggagtggaaggatgtgttcatcagctccagcgagcgctccttcaagctggacagcctcaagtgtggcacgtggtacaaggtgaagctggcagccaagaacagcgtgggctctgggcgcatcagcgagatcatcgaggccaagacccacgggcgggagccctccttcagcaaagaccaacacctcttcacccacatcaactccacgcatgctcggcttaacctgcagggctggaacaatgggggctgccctatcacagccatcgttctggagtaccggcccaaggggacctgggcctggcagggcctccgggccaacagctccggggaggtgtttctgacggaactgcgagaggccacgtggtacgagctgcgcatgagggcttgcaacagtgcgggctgcggcaatgaaacagcccagttcgccaccctggactacgatggcagcaccattccacccatcaagtctgctcaaggtgaaggggatgatgtgaagaagctgttcaccatcggctgccctgtcatcctggccacactgggggtggcactgctcttcatcgtacgcaagaagaggaaggagaaacggctgaagcgactccgagatgcaaagagtttggcagaaatgttgataagcaagaacaatagaagctttgacacccctgtgaaagggccaccccagggcccacggctacacattgacatccccagggtccagctgctcatcgaggacaaagaaggcatcaagcaactgggagatgacaaggccaccatccctgtgacagatgctgagttcagccaagctgtcaacccacagagcttctgtactggcgtctccttgcaccacccaaccctcatccagagcacaggacccctcatcgacatgtctgacatccggccaggaaccaatccagtgtccaggaagaatgtgaagtcagcccacagcacccggaaccggtactcaagccagtggaccctgaccaagtgccaggcctccacacctgcccgcaccctcacctccgactggcgcaccgtgggctcccagcatggtgtcacggtcactgagagtgacagctacagtgccagcctgtcccaggacacagacaaaggaaggaacagcatggtgtccactgagagtgcctcttccacctacgaggagctggcccgggcctatgagcatgccaagctggaggagcagctgcagcacgccaagtttgagatcaccgagtgcttcatctctgacagttcctctgaccagatgaccacaggcaccaacgagaacgccgacagcatgacatccatgagcacaccctcagagcctggcatctgccgctttaccgcctcaccacccaagccccaggatgcggaccggggcaaaaacgtggctgtgcccatccctcaccgggccaacaagagtgactactgcaacctgcccctgtatgccaagtcagaggccttctttcgaaaggcagatggacgtgagccctgccccgtggtcccaccccgtgaggcctccatccggaacctggctcgaacctaccacacccaggctcgccacctgaccctggaccctgccagcaagtccttgggccttccccacccaggggcccccgctgccgcctccacagccaccttacctcagaggactctggccatgccagcccccccagccggcacagcccccccagcccccggccccacccctgctgagccacccaccgcccccagcgctgcccctccggcccccagcaccgagcctccacgagccgggggcccacacaccaaaatggggggctccagggactcgcttctcgagatgagcacatcgggggtagggaggtctcagaagcagggggccggggcctactccaaatcctacaccctggtgtagggccngcaggaagagcagccacgcctgggccgcgccgcgccgcagccccacacgccagctcggctgtttttctgcattatttatattcaactgacagacaaaaaccaaccaacgacaaaacaaaaacccccaatcatgaacgcctgtacatagaactcttttgtacaaatgaaactattttcttcttctccatgaagccagggcacaaagaatttgacagtacaagtcaaatcccccaccccacaaaatatgtgtggagatatatatacatatatagacagacaggaacgcgtccacgagctatatatctatatatttctctcaccctattttgagacagaggcacaaagactcagcaatttttttccctcctcctcaccttccccccagtctaggtggttttgacaaagaccaaaatcccaactcagagacactgcatgcgattttactgttccaagaaaaccaggagttgcttcaatttgcagatgcttatgtgttaatacctttttctatgaaaaaagacccagcgccgtgtgcaataaaggttatgtttctatgt

SEQ ID NO: 95969 - DNA, 175 bp, Homo sapiens
ccccttctaaaccacagctcaaggatgccacctccaagaagctctcccagattgatctgcctccctctcccaactctgtcattttccccaaaggctgtgctcctgctttctctcaactgaccaggccttctccctgctcagttccaggtccccctgctggcatcaaagctgtccc

SEQ ID NO: 95970 - DNA, 682 bp, Homo sapiens
ctaaattataaatgtcaaagcaaaaaaacacatcgttttcaatgaacagtggaataattgttaaagaattagtcagcatctcttaatgtaatcctgggaataggttcacatctacccaaggaaagacctagaaggaaaaggatgtaaagagggaagacctcagcctcacactgtctttcagtggatctgtggggtgtagatgttcaggccacctagtggggaggaaagccacttgttatggtcttgtgcccccattctttgaaactgacactgtgttctttttggtctcctttccccagtgtctccctctgtaagcccattttcaatcgtatttttaaggtttcttttgaaattcaagaggaaagcaactcttttctgatatcataagtgaaattgtagttactctatgaaacagaactgctgagaagataaggaacctttcaatcacacagacatctttcacatactaaaaacagtgcaaataaaacatagtggaagaaagggcactaaggttttgtgcatgccatattttggagagagggagttcttgctaagattaacataaacactgacactcttaaaatgcattttcacacccccactcatgaggagagattgcattttaaatgggggttaagacatccaggcgaactccagggctctgtaaaaggaaccctaaggc

SEQ ID NO: 95971 - DNA, 750 bp, Homo sapiens
cattgtgatacactgtgatgagtatactatcagaaataacaataagcactatgagaatatggatataacagtttgagttagtcacaagaagatgaaggtttgctgtatttctgacatgtttttttaaatgtgttggatgttttctgcttccttttttggatcatttatatattatttctcaacttttttacttaatattttacgttctgaaatattttatatattgagatatgatattgaagcttttgaatctcttcatgttttcattatattgtatgtacttcagtaattcatagaaatattggaatatatttacttaaaacctaattttttagaaagatattatttaattgactattcttacttgccaggtactttctagaatacttaattttattgtacttttcattatttaccgtttataatttggaggtaagaccattagacccaaagaacttttgtcttggtgtgttcttgtttaaatatggaatttattttacaaaatagttttgttttgtatacatgtctagtctcaagggcgaagtgaaatcttaatgagtctacagaaagttctaagtggactgggtggtgcagcagcttcctcccatcgtgatatttacaagaatgccaggtctctcttgactgataggtcaatggctgttcgatgtgcagtggccaagtgtctactagaactacagaatgaagctgtatttatgtggactgctgaactagaaaatatagccactctct

SEQ ID NO: 95972 - DNA, 436 bp, Homo sapiens
tatggtgtctgagcacccaacgtacacatggaggagggagtgaacaactgtgtcaaatgctgtggagaaggaatggcaatgtgctgcacacactagtgaccttgatgagaatgtttcagtggggtcgaggaggcagataccagactgcaccggattagagcatgcataggtggtgataacacaaagagcaagtgcagatccagtcttgctgagtccacttgctcctactgccagggaaacctgctttatcctcctcacccttgcagccactccaaaaggttgcagcagacatgctcacctctttccatttctccattaattactgtggcatttacttgctaagcaatgtattcattactgttaattactgtgtgttaattactatataattataatttttttcacctcatgtagattgagatccttgaaacagggt

SEQ ID NO: 95973 - DNA, 1001 bp, Homo sapiens
tctgcctccgtagctgggactacaggcacgcgccaccatgctcagcaaattaaaaaaaatttttttttggtagagacagggttttgccacgttgcccaggctggtcttgaactactgggttcaagcaatcctcccaccttgaaccatgtgtcaaatctttgccccagccaaatatttgaagtaaataaagaaattgggtaatttctccaatctaaccctcctaaatgctgatggagctggctagtagaaacagttttattttctgataaaactcgagccctttccttctcagccttctcagagtttattttttttcttttgggagttcttagtttcctttgagaatctagcaagagttaaaagacctcctgagaaaagcacacatgcataatttggtatgtaatttcggagggttctttgatctgtggagtgaagctcatttatgcagatctaatgctgtctcttaaatcagcaagtttgatgcccattttgtgtactattgggatgctgttttggtgtttcaggaacttgtagtctgtagaaaaataaaagttccataatacagctgctttagggttgttattacagaaaaagtcaagagaagctggcttctaccagtctggttcatggagggctttgaggaggagttcatggcacttgtgcttgacctttaaaagatctgtcaaatttgacacacagaaaaaggaaaatatttaaggctgagggaaaagaacaagcaagacaaagtttatgctgaaagaagttgtgtagttggagtatatgataaactgaactagtgggaaaactatctggaaaggttgacgtttgtggaagaccttaaaaatgctggggtaggccaggtgcagtgactcacacctgtaatcccagcactttgggaggccaaggcaggagaatctcttgaacccagaaggcagaggttgcagtgagctgagatcacgccactgcattccagcctgggtgactgagtgagactctgtctc

SEQ ID NO: 95974 - DNA, 691 bp, Homo sapiens
aggtggcttctaacacaaggatcagggcgaggaccagggtagctgccggtggtcccttggccatttggggctgagggagaggtggcctggtagcctctcaggcccagctgcacctgctgcctgaacacgtgcctctcagctgcccaggaagggggcagggctccccagcagctgcagctccaccacgcagccgccctgggcaaagcatcaagtctagctcctcccagcagtctcaccccagcccacgccatgggcgactatgcatcctggtggtgtctgcttcccaccctcagttccgtagtgctgaggggcccgcgttctctgtgcacagtcctgggaggcccatggcttctgcccggcaagtcggtcagatgctggtttgattactatgtctaagggcacgggtgagcattcagggtgctttggtggcttcacccacttagcaccttgttaagacagggagccccttatggacactgttgaggtagaggattcctgtcttggggataagccctttgtttcatcaaaatctactccctgggtctgacttagtttgggggcatttaatgctttggtaaagttaatatcctcttactccctggcaaaactgttcattactcttacctcaaatgtacacttgatttgctgaggctttttaaaaacaggccggccacggtggcttacgcctgta

SEQ ID NO: 95975 - DNA, 544 bp, Homo sapiens
ggctatcttggcttcagaggggagaaatgaaacccatctgggtacctccctaatctcccacgtgcccccagtctcctgctccccaacctgccaccttgattacaaaggagcaagtgccctgggcagtgttcactgtggcagccaccctgctaatacattactctggggtcttgggtcagcaagttaggttactgagggagcttctgttggggtggagtggctggttagggtggactttggaggcgtggacatgggtttgaatgtgtctaactggacagaggaagccatgagccctgtgtggaatcctggctctgagcagttagaataatggttatcattgactgggtgcctatggcctgccaagccctatgctgggaacttttatcatccctcttaatcctcccactgagctggaaggtgctgtgatgtccattttgcagatgaggatcatcaagggcctaagttgtaacatactagcctggagtcctgctatttgtaagtggcaggagcttgtagtgaagcccctctctgactcaagatcatg

SEQ ID NO: 95976 - DNA, 553 bp, Homo sapiens
tcttcatcttgactatcatcaccctagtatagaccatcgtctcttctctggatagatcactcccttgttgcaggctcctaccatccccaaacaaactcatctttacccacgaacatgtttatcttcctgtacccccatttttagtggcatccaatctgccaaacgataatgtaaatgcagggctatgaaatagggctgccaggaaaatgagaaaagtagttacagaactgaaaaccaaattaagattcttggcacgattgtgatcataactgccctacatagtttagttagagctgcatctctataaactgaagcgtagtcatatttactctgaaatgattgaaatagaacaaagggaattcagcttccttaaaggaaggatagagaccgcaagctctgagataaggcttttttctgacacttattatccaaaataatctcaaattctaaactgacacatattcaccactaaggaaaagtggagtcttttaggtgtggtcccttctaatacaaggaccacagcctccctggaggtttgggtgagaaggcagaa

SEQ ID NO: 95977 - DNA, 116 bp, Homo sapiens
tccttctcttaaatgtctctaccccttcaatccttcccacattccctcgattctcttgtggctgacaggaagggtagggacagatttcctggaactgaggctcccaagccctgctg

SEQ ID NO: 95978 - DNA, 794 bp, Homo sapiens
cctgggccctcttcctggtaggccacagcaccacacacactgcaaaccaggcctcttcttcatccaccaccaccgtccaggcctcaacatcaccgcgtggggtcttgtgccctctgggggaacttccgggctaatgaggggggacagtccccattaccggtctatctttataaggcagtatatgcaacagtggaagttctgtgagacatgttccaaccccggggctgctggcagaactgtccccaaacccaccctcgatcccacggccaggaagtgggtccaaaattgcctggccaggtcacacccctgcgtgaaccgccccacaacacccagggcgctgcctgacttgccgtccacctctcagcccctcccctcacccctgccgcagctgcagggcctaccctcgccgggggctgctccctgcttacctccctcgcccgtgcaatgccatctacttcccgcaaggcctaccgggagatgttacaggtcacggtcatatttgagcatgagaagctcacgcagagaacattctggctgagggagaggtcttggggttcaaggctgttatcttggctctgctcagccatgccaggcaggaaaatgggcacctctagtgacccaggctggctgagagcctgcagggaagagcctttggaacgtgagccactgtgggctggcaggactgcaactggcgtctccatctactggtaccgaggcgaggaggaaaaagcaggggggcccggagacggcccctctaagtctgtaactccagagctgctgctcagtccccagaa

SEQ ID NO: 95979 - DNA, 300 bp, Homo sapiens
  misc_feature (261)..(261): n is a, c, g, or t
  misc_feature (293)..(293): n is a, c, g, or t
catgtgtactaatggctttcttagatcacagaggtctgcggcattccagtgcaaaagttcggagcaggacggcttacctgttttctagatttgtcaaatctctcaataagcaaatgaatcctttcattgaggatattttgaatagaatacaagatttattagagctttctccacctgagaatggccaccagtccttactgagcagcgatgatcaactttttatttatgagacagctggagtgctgattcctcattaaggcntgtttcctttctgccgatattcactataaggnccggcgc

SEQ ID NO: 95980 - DNA, 2313 bp, Homo sapiens
  misc_feature (1991)..(1991): n is a, c, g, or t
catgtgtactaatggctttcttagatcacagaggtctgcggcattccagtgcaaaagttcggagcaggacggcttacctgttttctagatttgtcaaatctctcaataagcaaatgaatcctttcattgaggatattttgaatagaatacaagatttattagagctttctccacctgagaatggccaccagtccttactgagcagcgatgatcaactttttatttatgagacagctggagtgctgattgttaatagtgaatatccggcagaaaggaaacaagccttaatgaggaatctgttgactccactaatggagaagtttaaaattctgttagaatagttgatgctggcacaagatgaagataggcaagcctctctagcagactgtctcaaccatgctgttggatttgcaagtccaaccagtaaagctttcagcaacaagcagactataaaacaatgtggctgttctgaagtttgtctggactgtttacagacattcctgccagccctcagttgtcccttacaaaaggatattctcagaagtggagtccgtactttccttcatcgaatggttatttgcctgggggaagaagtttttccgttcatcccagctgcttcagaacgtatgctcaaagattgtgaagcagaagacctccaggagttcattcttcttatcaaccagattacggccaaattcaagatacaggtatccccgtttttacaacagatgttcatgcccctgcttcatgcaatttttgaagtgctgctccggccagcagaagaaaatgaccagtctgctgctttagagaagcagatgttgcggaggagttactttgctttcctgcaaacagtcacaggcagtgggatgagcgaagttatagcaaatcaaggtgcagagaatgtagaaagagtgttggttactgttatccaaggagcagttgaatatccagatccaattgcacagaaaacatgttttatcatcctctcaaagttggtagaactctggggaggtaaagatggaccagtgggatttgctgattttgtttataagcacattgtccccgcatgtttcctagcacctttaaaacaaacctttgacctggcagatgcacaaacagtattggctttatctgagtgtgcagtgacactgaaaacaattcatctcaaacggggcccagaatgtgttcagtatcttcaacaagaatacctgccctccttgcaagtagctccagaaataattcaggagttttgtcaagcgcttcagcagcctgatgctaaagtttttaaaaattacttaaaggtgttcttccagagagcaaagccctgaggactggatttccctgtgcctacttcatgatcatgaattccagttaatttataaagaggcgatttttgtgtgccattcacactggtctttttcacattgttttgagcttattgcagtatatgttttgggatttttctgtaaaatgggtgtaattttcctaatacaggtatgtaacaacaaaagaagttgcctgcatgccggtccaaattgttctgtataaagatgctcttaaaagacacaagagttatcctagaaccttaattcttttttatttgaaattttaagtcaagtcctttataaagaccatagcagtggaaaacagtgtactttttaaaaaattgctgaatataaaatctttgaaaattttctttatgtgtgaagacacaaagtatgggggaagacagcaatcaaaactaactttttgtagatagccatttcatttctttaaactgtttcaacgccaatatgtattctacaaaagagaatggttttaggctccagtgttatacttttttttatatatatatataaaaataaactttacgtagtgaaatcttccaagtcttttctggaattattataaatactttagttttattttctcatcttaatctctccataatttcccatttaaggtttacaaatatgagtgtgtggatgctntaattcatttaacctcactcctcaaaggtacatgcaacttagttctgttatatggagagtctttttctttaatgtacttgggaaaaagcctatgtgaatctcgttgatagcaattttcacattccaaggcggggcgtgagagggtcaccgaaatgttatcccgaaactttgggaggcccagcaggtggatccctttgagtcacggagtttcagaatatcctgggcacattgttgaaaccccctcttttataataaaacaccggggttgttatttcacccccctaggccggtacacagggtattcaaaacatcactcgcaccg

SEQ ID NO: 95981 - DNA, 1884 bp, Homo sapiens
catgtgtactaatggctttcttagatcacagaggtctgcggcattccagtgcaaaagttcggagcaggacggcttacctgttttctagatttgtcaaatctctcaataagcaaatgaatcctttcattgaggatattttgaatagaatacaagatttattagagctttctccacctgagaatggccaccagtccttactgagcagcgatgatcaactttttatttatgagacagctggagtgctgattgttaatagtgaatatccggcagaaaggaaacaagccttaatgaggaatctgttgactccactaatggagaagtttaaaattctgttagaatagttgatgctggcacaagatgaagataggcaagcctctctagcagactgtctcaaccatgctgttggatttgcaagtccaaccagtaaagctttcagcaacaagcagactataaaacaatgtggctgttctgaagtttgtctggactgtttacagacattcctgccagccctcagttgtcccttacaaaaggatattctcagaagtggagtccgtactttccttcatcgaatggttatttgcctgggggaagaagtttttccgttcatcccagctgcttcagaacgtatgctcaaagattgtgaagcagaagacctccaggagttcattcttcttatcaaccagattacggccaaattcaagatacaggtatccccgtttttacaacagatgttcatgcccctgcttcatgcaatttttgaagtgctgctccggccagcagaagaaaatgaccagtctgctgctttagagaagcagatgttgcggaggagttactttgctttcctgcaaacagtcacaggcagtgggatgagcgaagttatagcaaatcaaggtgcagagaatgtagaaagagtgttggttactgttatccaaggagcagttgaatatccagatccaattgcacagaaaacatgttttatcatcctctcaaagttggtagaactctggggaggtaaagatggaccagtgggatttgctgattttgtttataagcacattgtccccgcatgtttcctagcacctttaaaacaaacctttgacctggcagatgcacaaacagtattggctttatctgagtgtgcagtgacactgaaaacaattcatctcaaacggggcccagaatgtgttcagtatcttcaacaagaatacctgccctccttgcaagtagctccagaaataattcaggagttttgtcaagcgcttcagcagcctgatgctaaagtttttaaaaattacttaaaggtgttcttccagagagcaaagccctgaggactggatttccctgtgcctacttcatgatcatgaattccagttaatttataaagaggcgatttttgtgtgccattcacactggtctttttcacattgttttgagcttattgcagtatatgttttgggatttttctgtaaaatgggtgtaattttcctaatacaggtatgtaacaacaaaagaagttgcctgcatgccggtccaaattgttctgtataaagatgctcttaaaagacacaagagttatcctagaaccttaattcttttttatttgaaattttaagtcaagtcctttataaagaccatagcagtggaaaacagtgtactttttaaaaaattgctgaatataaaatctttgaaaattttctttatgtgtgaagacacaaagtatgggggaagacagcaatcaaaactaactttttgtagatagccatttcatttctttaaactgtttcaacgccaatatgtattctacaaaagagaatggttttaggctccagtgttatacttttttttatatatatatataaaaataaactttacgtagtgaaatct

SEQ ID NO: 95982 - DNA, 1812 bp, Homo sapiens
catgtgtactaatggctttcttagatcacagaggtctgcggcattccagtgcaaaagttcggagcaggacggcttacctgttttctagatttgtcaaatctctcaataagcaaatgaatcctttcattgaggatattttgaatagaatacaagatttattagagctttctccacctgagaatggccaccagtccttactgagcagcgatgatcaactttttatttatgagacagctggagtgctgattgttaatagtgaatatccggcagaaaggaaacaagccttaatgaggaatctgttgactccactaatggagaagtttaaaattctgttagaatagttgatgctggcacaagatgaagataggcaagcctctctagcagactgtctcaaccatgctgttggatttgcaagtccaaccagtaaagctttcagcaacaagcagactataaaacaatgtggctgttctgaagtttgtctggactgtttacagacattcctgccagccctcagttgtcccttacaaaaggatattctcagaagtggagtccgtactttccttcatcgaatggttatttgcctgggggaagaagtttttccgttcatcccagctgcttcagaacgtatgctcaaagattgtgaagcagaagacctccaggagttcattcttcttatcaaccagattacggccaaattcaagatacaggtatccccgtttttacaacagatgttcatgcccctgcttcatgcaatttttgaagtgctgctccggccagcagaagaaaatgaccagtctgctgctttagagaagcagatgttgcggaggagttactttgctttcctgcaaacagtcacaggcagtgggatgagcgaagttatagcaaatcaaggtgcagagaatgtagaaagagtgttggttactgttatccaaggagcagttgaatatccagatccaattgcacagaaaacatgttttatcatcctctcaaagttggtagaactctggggaggtaaagatggaccagtgggatttgctgattttgtttataagcacattgtccccgcatgtttcctagcacctttaaaacaaacctttgacctggcagatgcacaaacagtattggctttatctgagtgtgcagtgacactgaaaacaattcatctcaaacggggcccagaatgtgttcagtatcttcaacaagaatacctgccctccttgcaagtagctccagaaataattcaggagttttgtcaagcgcttcagcagcctgatgctaaagtttttaaaaattacttaaaggtgttcttccagagagcaaagccctgaggactggatttccctgtgcctacttcatgatcatgaattccagttaatttataaagaggcgatttttgtgtgccattcacactggtctttttcacattgttttgagcttattgcagtatatgttttgggatttttctgtaaaatgggtgtaattttcctaatacaggtatgtaacaacaaaagaagttgcctgcatgccggtccaaattgttctgtataaagatgctcttaaaagacacaagagttatcctagaaccttaattcttttttatttgaaattttaagtcaagtcctttataaagaccatagcagtggaaaacagtgtactttttaaaaaattgctgaatataaaatctttgaaaattttctttatgtgtgaagacacaaagtatgggggaagacagcaatcaaaactaactttttgtagatagccatttcatttctttaaactgtttcaacgctttgacaggcctctcggatctcg

SEQ ID NO: 95983 - DNA, 556 bp, Homo sapiens
gggttgactaacgctttcccattagcttaaggtattgtaaagtctggccttacctagtttaaaatctctattctctctccctcccttttccccctctctttcccctatctcctttccccacttctctctccttcctctctcgaggttgagtcttgttcaggcccagaaacctgtagtggagaaacggagtaagttgatttcctgtttctgtcctttgattctcttctcccttcccgcccccaggcccttgtagactctggctcttcaagattgaggggagaaaggaagcagagataatggtcagtgtttagagaccagcattgttagcgggcactctgggtgtagctgctgtccatgtgctgggtctttgttttgtgggtaatatgggctgttgggaacctgactgacagaaatctcccatctgcagcctctttgcttttgctttaggtcaggagttggcaaactacatacagctcatgggccaaatccagcccagcacctgtttttgtgtggcctgaaggctaagagtgatttatacatttgtaaatggttgaga

SEQ ID NO: 95984 - DNA, 661 bp, Homo sapiens
cagacacgagtggaggcattgtgacctccagcctcagcagacacctccacactgcgcagggcagagcaaccacgccaccgagtgagccccatttgcagactttgagcaaataatgattgtgcacgttggatcatttattgagtttctctcgtacaccaagcactggttggatcccatgcttgttggtgacagaactgctgtgatgccagtcctgcgtccccttcagcctgtgaaggaggagcaccatgaaccagccaactaacacgtgtctaatcacataaagggaactgaacaccagagagccacagtcactttccgaaggtcacacagcaagtgcaaatgaggcctcatcctcagggctgggttccaggcctgctgggcaggtcggttactgctgcacaaaatttctgttatcctaaaattgtttcagacaagcaccaaaggacgtcccatagttctgcttgactaaggtttaatgaagttaatgttcatactttccactctatttttccactctttaaggatccaaattttcttggtgtaactgcgtataaaagtttaactattacagagataaccacaaaatttgatgaggcttcattgagtggaaaacactgtagtccaaataaatgcagaaatcattggtttgggaaccaaggga

SEQ ID NO: 95985 - DNA, 455 bp, Homo sapiens
gccactgctttcacagagaagggcactgtaagtcacatgccaacaggcaaggatgtataattttctccaggaaagaggggtgaaaaatcggatacaaaattacagtcaaccacatcttcctttctggatgaaactttacatgtgataaatatacactcttacagaattagatacaatttaccattttatattggcttttaagatatgcattttctcccaagttaaggtctgaaatcgtgatgcatcttacggtagatggggtcttataatcactgcaagccaggcagctgttgtgatgtcattgcctaggcatgagagaacttggctgctagtcctggtggtaggattggacacctgcaaccattgacatttcaggatcatttgagaaaggaatatgagtcctgactttcatttgaaaattttctgttgacaccccctagtaagatcagcatcca

SEQ ID NO: 95986 - DNA, 317 bp, Homo sapiens
tttccgattccaagacctgtttggtgtgaaagtgcagctaagttactgttaatcaagatcagaataaaagaatctaccaagaaaaattaacaaaatcccccttttaatgtataatcttccatctgtcaggctgtaagttaaataacacaaaacaaagctgtatgttttatggatatgtacatatataattgcagggaacatgatttggaaggatatacacttacattgctaagaatagtcacccctaaggagaagactggggtcataagtggaagtcaagggagtcttcagctttctttttgtatttaaattttgat

SEQ ID NO: 95987 - DNA, 258 bp, Homo sapiens
tcaaaacactccagcaaatgagatctgccttcagttttcgtttgtttgttttgagacggagtccggctctgtcacccaggctcgagtgcagtggtgcagtcttagctcattgcagcctcaatctcctgggctcaggcatctgagtagctaggactacaggcatgtaccactgtgcccagaagtttttttttttcctaaagtttaataattctgcttttaggccacatcaaagtcaccccctgaccatgcaggcgccca

SEQ ID NO: 95988 - DNA, 413 bp, Homo sapiens
accaccctaacgtagcaatcccaactgctttttaacagttgccatttttagatagctgaaacctgcctcttctgtagtgtcagtttgttcaaaaggctgaccatctacacctaatggtgacacaaaacacaccttaaatatttagaaagatctataatggtcttacctacaaagccttgtgctaatttttttttaattttcaggctaaataattatcagaacttaattattaaggaataacagtaacagctcagctaatatgtaacattcactgtgtgccaggcattgctcctctaagtgcttatatttaactacattaactattttgcagcaataaaaaacacatctgtcataatatgacaaagctgctgttttcagaacaaaaaaactttcaataaaaagttcatgatttt

SEQ ID NO: 95989 - DNA, 523 bp, Homo sapiens
  misc_feature (340)..(340): n is a, c, g, or t
  misc_feature (342)..(342): n is a, c, g, or t
  misc_feature (354)..(354): n is a, c, g, or t
taaggccacaccacattttacactaagtctcaagaccagacattctaatttaagtcacaccagtaccccatcaaccacacaataagtagtaatgaaaaataaagttaaaaagacaaaccagggtaaaagtcaggctgagaaatgaaagctttactagggacaaaaagtaacagaagtgacatcaattaaaatgatgattctgaactccatattgtactttcaaacagttcctttatgcaaaataactaccatgtagtttatcaatcattttgaattgtgtccctcaacagagtaagagagagagagagagtgtgtgtgtgtattttttttcttggaaaantntgagactttttnattgacaattatacttgtcccggctatgggtattaatatcactttaatcttatcctggatcctgggaatctataaaggaagaacccaggtttcttgctgggaaaagataagcactgctcagttatttgtgactttctttttattaatatattttcccaaatagaacaga

SEQ ID NO: 95990 - DNA, 782 bp, Homo sapiens
gtaaaatagggctttacataaactatcttatttaattgtcacaacatccctatgatatcacttcttttgttgtccttaatttacagatagtgagacagaatgtgaataaactaaccttgcatggtcacacaggtaatagccacagaggggaaggatatagtttactctatctatccatctatctgcttgcatatctatctattcatccctcatctaaatatgtatctctacttatctatctctccaaatacatatattttatttatgcagtgagatctggtggactttaattgcaaaataacttgagagaaaagagaattaattataagaagtacagaaaaagaaacagagcagaagcaattcctggactgtgctgtaccaggcagatgggcaatatagtcagtatgcagtgttggctctttctttgggagaatgaggtcatatctactggcaaggcccccttccctttattcccactatactgcttgggaatttctgatttaaaaaaaatactgttgataacagaaatgaccaattcatcatattgtcttgaccaaagagcagctcatactgtgacacacttgcctctctagtatctctggggaggatgttcgtaagtgagattggaggagtaatcgccccccaggaccgtgggataggttgtgcacgttgtatactgcacagtcccatgggggtgttagtctctctgaatggagtccccagagttatgcagtgcacaacctgtgtataaggcagccctgcctgcccccaccaataagatc

SEQ ID NO: 95991 - DNA, 253 bp, Homo sapiens
ctttggcgatttaattttctgcaatttaacagtaaaaggaaaattattttttatgttggaaccaaattcaatgccctgttttggtcaatgtgctttagatttgaggtctttgaacaaggaacacaatgtaacgggtagaatgtttcattgcttaagaaatggcttgagattaactttgttgctgttatttatgaaattctttttaccatcagtattgtcctttgaaaatattgccttaaaaagacctcatatg

SEQ ID NO: 95992 - DNA, 827 bp, Homo sapiens
  misc_feature (1)..(1): n is a, c, g, or t
  misc_feature (56)..(56): n is a, c, g, or t
  misc_feature (72)..(72): n is a, c, g, or t
  misc_feature (84)..(84): n is a, c, g, or t
naggataggatgccgtccccgtaaaaggaatgccggcgtgtttaagagaagcgagntttaagagcgcagggnccgaagaggacntccattcagtcagaacgtgaagaagtaagttcttggagacgtgctgatgacaggaaagatgaccgggtggaagagcgggaccctcctcgtcgagttcctcccccagctctttcaagagaccgagaaagagaccgagaccgagaaagagaaggtgaaaaagagaaggcctcatggagagctgagaaagatagggaatctctccgtcgtactaaaaatgagactgatgaagatggatggaccacagtacgacgttaagtctcaagataatggatttaaactggtgtcttaaataggtttgatcacattcaaggattattatacttgtgcttcaaccaatctaaattggattctttaatgttgtttcaccataacacaaaaagcatgaacttgtattaatcctatataatagattgatcatgcaccatatccacaggaggttggaaaaaccatgccattttctggaatttaagggtgttgcattatttcatcaatcatttgttgacaaaaaagaaaaactaaaaaataaatttaaaatgtgaaccttcaggtattgagtaacacctttatcttggtatagaactgatacttttttttgattttgaaatatctgataataatttggaatgaagtaaggttctgttaaaatatatttgaagaccctttaaagcagtgaatctgaaacaattttcacacccttaagtggttgatacgtacctatttttaggtattttgaggtatttacc

SEQ ID NO: 95993 - DNA, 386 bp, Homo sapiens
caagattagccagtaggttgcatgaagaatatgagttatgaactggacgtaaagttgactacaagtgtattaacctaagtatcccaaaggagggaatggccatttcctagggtggggaaaatcatgaaagattaggggagacaatcaggcattctgttgcatgcacattaggcttgagatggccaacacaagtgaaataacaaggcaatggatagatgaatctgaatccaaaggccaggagagagatctacactagacacatgaatttgggaagtaccagtgcctacatggtatctaattccatgagacttaatgagaacatcttgggactgagtgtagagagcaagagaagaggtccaaggattgggccctgggatcccaacatg

SEQ ID NO: 95994 - DNA, 313 bp, Homo sapiens
ttggaggccagaaatagaccaagaaggatgaagatctttgctgcttagagccacgactcaactagatttcagagaacggactccctgtctatttcttgtacaaaagaaaccctgtagcatggaaaccccatgttagagacccaatggtcaaaaaggaaagcaaagtatactttgtggacaccctgacttgtgttgcctcgctcctctcctattcactcattcttttttttaaattgtaagttaacttgctagaaaattattttagttgcacacattgctgagagccgtctcctgtgcctcctgagtagctggg

SEQ ID NO: 95995 - DNA, 504 bp, Homo sapiens
cttgcacaccctgcgggagagagctgcgtgtggaagagtcgtatttgggttatgtgactttttgctttgaaatcaagaaacacacattgtcaaaggtcatttagccttcagctggtgacctgtgtagcctggcacgatggccgtgctgtcctgcaggccacagtggggttgctagagccggcagctcctcagaaggggcctctgtccagaagtgccgctgttttcccttggaattcctgcctgcctcggattagtgtcttagctcagtgcgtggcctccaccctcaacaacccctgcgcctcccacaacccctgcgcctcccgcccacggtcccatctgaggcaggggcagccaatcttccaggcgctcggcccccaacacccactgcgtcctcgcctccttgctcctctcatgcccacccccagatgctcttcaacctcaccttcaagaaagatccagaaccaggtggcaccccccacctcctccacttcgactacttcccga

SEQ ID NO: 95996 - DNA, 158 bp, Homo sapiens
caataactccacataaagaatgtaaaaggctggatctttgttcctttcactgacatcttagctgaatctttatgatcttttttaatgcaggaggaggaaggaacacggaagaaaattacaggaacaagaatatccaaaacttaatttttttctaaatt

SEQ ID NO: 95997 - DNA, 531 bp, Homo sapiens
ggcgttcggcgacgttactggggctgcacggtgcttgtagctgggcagtcttatcatcagagtggagcctggtaaccacgacctccccgccaggtcctgtgtgttgctagctggagaagggtagttgaaaactcagaccaagcacagtgtttatatcggtcaaaactggaaaactatgtccgggcgcagccgaggctggaggatcccttcaggccaagagcaacctagcaatatggcgcgaccggatctctgtagtcctacctcaacccccagctacttgaaccccaaggttgaaggctccagtgagctatgatcccaccacagcattgcagcctgccagactgagggcttgaggatcagccaggtttcatgagttcaatgcagacctgaatcataccaagctgagactggggtacacactctcctctactgaaaagtagtgagggattccaacttggtgagagggagagtgggggagagccagaccagacaagagtgctcacctggaaaaagcctgccatcaaaggccat

SEQ ID NO: 95998 - DNA, 191 bp, Homo sapiens
aactgactaacttggaggagctaggccagattataagctcctgagttcctccaactcaatgcccggttaggatgtactgtagccaggccaacgaggtctctagacatccctgagatcataaaaatagaaagtaaggccccactgccaggttgagttgtgcaaagggagctttgagcagtctgcaaagagcc

SEQ ID NO: 95999 - DNA, 454 bp, Homo sapiens
aattcagccttccccataacttaacatgattaaactaatattcaatttaccacaaaagtggaattaatgagaggtaagtctagaaagagtttggcttactctggaggatttttgatgctaagatgagtaatttgtacttttgttagtcagataataaggaatcatcgaagttttgtgcctgtgtgtggcaagatatccggaacgtaaaatttactctctgtttttaaatatacagtttggtggcatccagtacattcacatcactgtgcaaccatcaccaccatctgtcttcagaactttttcatcatccccagctgaaactatagtcattaaacaataactcctctgtcccctcagtccccaacccctggtaactactattttactttttgcctctgtgattttgactattctgggtacctcatataaatagaagcatattttaaagaattat

SEQ ID NO: 96000 - DNA, 1018 bp, Homo sapiens
accacagatgcagggtggctgagggttgagttaatcacattcctcagttcatagcacatcatcatccctgacaaggggatcattgatccccaaaagtgttatcttatttttcccctcatctctgattctatgccttgtccctttctgctacagcttcccacaccaaagcgtttcataaatttcattaaatgtgcatgtgtctttataaaatgtgatggtgcattgtatgcatatgtcactgatttatccatttatttgatttatcagggctgtctttccaattcccctctaacccaaacaagcctatgacaaacaaccctttacaaaccaatgagaaatttccctagtttcatagccagcggtgattttgctgggtcatgggactccacaggcttaattgtctaaatagctgccatattgcttttcaatatggatttacaagtgtacactcgccagtagagtgcaagagtgcccatctgcatgcatctccaacaaaacttagttttctctaatctctgattcccatttttaaaaccatgttcacgggtgtaaaatgacacctcactgttattttcatttgcatttctctggtcactggtgtgagctctttaatttgtgtgctttctcggctttttcttatgtgtattaccgattctttggcctattttttgattgaaccacctatctttttcttgtagattttcaggaaaaaatgcttggtatattcaagatgttaattacttctcagttgcagatattgaagatatgtgtcagtagatattgaagatatgtatcattttgctttgtcgtctcttaccatttgtcagtggggctcttcatttgcggtatagtgattaagagcatatatgctggaaccaacctgcctgggtccaaatcttaactctgcctctgagctatgtgacctcagtgatggtccttaatcttctatctatatgtaaaactgatatattaaaatgaccatctcagcttgagcaacattctgagaccccacctctac

SEQ ID NO: 96001 - DNA, 1348 bp, Homo sapiens
cagggtttcaccttgttagccaggatggtctcgatctcctgacctcatgatccacctgcctcggcctcccagagtgctgggattacaggcgtgagccaccgcgcccggccagccatttttcttaacaccttctgccactttctctcggtgctaatggatggaattcctgcacaagttttaactgaacaagaaatcccagcaaaaggcattttctttctacttctttgattgtggaaaagcagacatttctctgaagcatgaccttattcttcgaaacggtattgctagtaaaatagcatgcaggacttcagacctcagggatcctttccatgcactgaccaagaattgtattaatcctttttatcattatagtttttttacattttctcattctgtcaaccatattggagtgaagtggcatagtcatcactcactgtaatctccaactcctgggctcaagtgatcctctagactcagcctctagagtagctgggactacaggcgcatgccaccatgcctggcaaattgttttatatttaggtagagattgggtcttcctatgttgcgcaggtaataaaactgtgaaaatcctggaatataagctaagaaataccaatgtggacatagggcctggcaaagatttcatgaagaagacactaaaaacaattgtaacaaaaacaaaaattgacaaatgggacctcattaaactaaagagcttctgcacagaaaaagaaactagcaacacggtaaacagacagcgtgtagaatggggaaactatttgcaaactctgcatctgacaaaggtccaatatccagaatctacaaagtacttaaacaattagacaagcaagaaaaaaaaacccaattaaaaaatgtgcaaagacatgaacagacacttttcaaaagaagacatacaagtggccaacaaacgtgaaaaaatgctcaatatcactaatcatcagataagtgcaaatcaaaactgcaatgagttaccatctcttaccagtcacaaagttggagatggtggtgaggctgcagaggaaaagaaacagacactgttggtgggaaagcaaacttgttcagccgctatggaaagcagtttggagatttctccaagaacttaaaatagaatacattaaggtggaatccataatccgggtttattccaggaacgattctttttccaaagaactgcaattgtcttacgggttcttatagagggaagagaactatggcgggagggttgtgaaatgggtcgaccggattggggcaaagaaatgtttgatgggggagtttttccaggggaaattgtggggggggaaacaagaagagagggggtttgggcatg

SEQ ID NO: 96002 - DNA, 303 bp, Homo sapiens
aactgggaacactatgtaaccacattaaagaggtctatagcaggaggaataaaagactcctaaagcctgctgactcactggctcatgactgatttcctacacattcagctggggttgtctgctttgcttgccctgtttcttgagcccaagcgacccacacacactgcctgctgatcagtaggttatgtcagaaggccgtaagggccaaatttaagctatttttcatttaaataggcgtccctagaaatagctacgtggacttacctaatatagtatttaagtccccagcttttgaagtgattc

SEQ ID NO: 96003 - DNA, 202 bp, Homo sapiens
gtccctacacattttgggcccgttctctcgattcctctgtagttctgatgttctgattccagatatgtcattcttggctcggactgttcaggagaatcatttctggatcttgctaaaaaatggactgctggtccccaactcttggtggttctggctcaggagggctgggtaagcctgggcaccccggagtgtttctggggcg

SEQ ID NO: 96004 - DNA, 543 bp, Homo sapiens
gcacacctgggtaaagctctgtaaggttactcttgcccctccatgtattccttaagtgtaccatatcacttaatggtaggtaatgataagtagggcagaaaacatcaaaaggacagcaatattcagttgggcatgtggtccatccataccaaggaccttttcctagtagaagcaccagaggatggtctgtgggaggaagtacctttttctgatttcaatctatatcacctcacatggggacaaattttctaatttttgagcatatattgggatgcagtataccagtgtgtctttgcgtaccatcaggatttcctagactttgatgatattttccatttctcaggaatttttaggataagaactttttaaagttcacttaattgcccagtcctgttgttgaaatgttgtttaatttaaagcataaaatatgctggggagagtggcacacgcctataatctcagctactgcagaggctgaggcaggaagatcacatgagccctggagttccaggccagcctgggcaatgtagggagacccgtctt

SEQ ID NO: 96005 - DNA, 491 bp, Homo sapiens
tcaggaggcctcatgatttggcttgggcagccacattcccgaatgtcaggccttcccctgttgcttgggagtgagaggccgcctccctggccagacagagggtttctggaatgtgtgaggccaggcgtcctgagggtgggcagaggtgttcagagctgcctctttccctcatcaatgttaggggcagagacacaccgagactcgtagccctacctccccgccagactccttctgcaggcctccaccccggcgtgtcctgagtccacgctttcctaacccaaactcagggcttctgcttgcaattcttgctctgtggagccaggttgggtccactctgccatctgatggcccccaggccagaggccctcatttccttctgctaggggctgggtcctcaatatcacagccctggccccaacctgagtcctatcttgccccagtgaatgtggggaccaccgggcccagcctccctgcctcatcccctgcaggag

SEQ ID NO: 96006 - DNA, 280 bp, Homo sapiens
ggatcttagggaaaacggtcagaaactcacttgggtgctcatgttcccaaatattctatatagcgcagtgcagcctagtttatgtattgaaagagcaggctctgaagaaacactgagttggattcaaatcctagttccaccagtttctaatgttataaacttgcacatattacctaatcactttgaacctcagatttccatacctctaaaatggaaatacaaattgaacccgcctcacagtcttgtgaggatgaaatgaagcaatgtgggaagcactggg

SEQ ID NO: 96007 - DNA, 466 bp, Homo sapiens
cggctccttcctggttcatggttgtcaatgttcctgatttgctgcaaggagtgctgttactcagcccctccaggaagccactagggaagcctgatcccctgccctaagcatggtgctttatctgaatgtgaaagtggtggaaagagcctccctcagatcgagttggacccagggggtcagctgctgcagcttgacaggcttgatggggtgtctgcagaaggctagtcctcacccgggggaaactgaggcagctggactagaagaagagccaaagacagcagccgggctcttcattgagcaagaggggacaggtggatcgagtcaatctgggacgatacacgagaccaggcctgtctgattacagaacttacacgcaagaggccaagctaaggctgggaaggtgggcaggggccaaagtccagagggcttattgacagatggaaatatggggctctgtctgcagggt

SEQ ID NO: 96008 - DNA, 318 bp, Homo sapiens
cctcaatattgctgtttacagtggatagcccagtgacatttatttaaagagggcagtcttaagagagtgtgttagggttatgaatctgattaagtgtgatctgataagtgggaaatggaccacttgggagaaatcaggttactttcagatataagcagaccaaactgggccttccacacaagcctgaatagctcgttttctccctatttctgttgccattgaggtacagctgggattcagggcattaggatatgtgaaaacttttagcttcctgaacccaaccagaccccagcaagagtccttttacagtttccccga

SEQ ID NO: 96009 - DNA, 1330 bp, Homo sapiens
cggggcgggggcggggcctcgcggccggcgaggggctgagctgacagggccgcatcggcttaccccaccttactttatcggaacgtgcctaagctgctgcagctggcacccggttgcgctcggcgaagagggctgggggcgggagatgacggtggtcttctccctgcttggcaccctgcgagcaccagctcccttctcctcgccactccaaggttgcagacgaagcagatgtgattataaagacttcagtggaataatcgcaagttcccatgtgagatctggttggagttggagggtgagagaaaatgaattctaatttacctgcagagaacttaaccattgcagtcaatatgaccaagactttgcctacagcagtaacgcatggatttaattccactaatgacccaccttcaatgtcaattacaaggctttttccagccttactggaatgctttggcattgtcctttgtggctacatagcaggaagggccaatgtcataacatcaacccaggccaaaggactaggaaattttgtctccagatttgcacttccagctttattattcaaaaacatggttgtacttaatttttccaatgtggactggtccttcctatatagtatcttaattgccaaagcttctgtatttttcattgtatgtgtattaaccttattggttgccagtcctgatagtcgatttagcaaagctggactattccctattttgctacacaaagtaatgactttgcattgggataccctatagttgaagctttatatcaaactacatacccagaatatctccagtacatttatttggtggcaccaatatctcttatgatgttaaaccctatagggtttattttctgtgaaatccaaaagtggaaagacactcaaaatgcttctcaaaataaaataaaaattgtgggactcggactcctgcgtgtattacagaacccaatagtatttatggtcttcattggcatcgccttcaattttattcttgatcgaaaggtacctgtatatgtcgaaaattttcttgatggacttggaaattctttttctggatcagccctattttatcttggtctcacgatggtgggaaaaataaagagactgaagaagtcggcatttgtagtactaattcttctcatcacagctaaacttctggtgctgccacttctgtgcagagaaatggtggaactcttggacaagggcgacagtgtggtgaaccatacaagtttatcaaattatgcatttctgtatggtgtatttcctgtagcaccaggagtggctatctttgcaacacaattcaacatggaagtagaaatt

SEQ ID NO: 96010 - DNA, 1284 bp, Homo sapiens
cggggcgggggcggggcctcgcggccggcgaggggctgagctgacagggccgcatcggcttaccccaccttactttatcggaacgtgcctaagctgctgcagctggcacccggttgcgctcggcgaagagggctgggggcgggagatgacggtggtcttctccctgcttggcaccctgcgagcaccagctcccttctcctcgccactccaaggttgcagacgaagcagagatctggttggagttggagggtgagagaaaatgaattctaatttacctgcagagaacttaaccattgcagtcaatatgaccaagactttgcctacagcagtaacgcatggatttaattccactaatgacccaccttcaatgtcaattacaaggctttttccagccttactggaatgctttggcattgtcctttgtggctacatagcaggaagggccaatgtcataacatcaacccaggccaaaggactaggaaattttgtctccagatttgcacttccagctttattattcaaaaacatggttgtacttaatttttccaatgtggactggtccttcctatatagtatcttaattgccaaagcttctgtatttttcattgtatgtgtattaaccttattggttgccagtcctgatagtcgatttagcaaagctggactattccctattttgctacacaaagtaatgactttgcattgggataccctatagttgaagctttatatcaaactacatacccagaatatctccagtacatttatttggtggcaccaatatctcttatgatgttaaaccctatagggtttattttctgtgaaatccaaaagtggaaagacactcaaaatgcttctcaaaataaaataaaaattgtgggactcggactcctgcgtgtattacagaacccaatagtatttatggtcttcattggcatcgccttcaattttattcttgatcgaaaggtacctgtatatgtcgaaaattttcttgatggacttggaaattctttttctggatcagccctattttatcttggtctcacgatggtgggaaaaataaagagactgaagaagtcggcatttgtagtactaattcttctcatcacagctaaacttctggtgctgccacttctgtgcagagaaatggtggaactcttggacaagggcgacagtgtggtgaaccatacaagtttatcaaattatgcatttctgtatggtgtatttcctgtagcaccaggagtggctatctttgcaacacaattcaacatggaagtagaaatt

SEQ ID NO: 96011 - DNA, 320 bp, Homo sapiens
cagtggaataatcgcaagttcccatgtggtaggtattactattattgccattttacaggtgaagaaggtgagacacagaaaagttaaagttaattcgttcaggtcgggcacagtggctcatgcctgtaatcccagcactgtgggatgctgaggcaggcagatcacctgaggtcaggagttcaaaaccagcctaagcaacatgtcgctacaaaaatacaaaaattagccgggcgtggtggcacacgaatcgcttgaacccaggagacagaggttgcactgagctgagattgcaccactgcactccagcctgggagacagag

SEQ ID NO: 96012 - DNA, 1433 bp, Homo sapiens
cggggcgggggcggggcctcgcggccggcgaggggctgagctgacagggccgcatcggcttaccccaccttactttatcggaacgtgcctaagctgctgcagctggcacccggttgcgctcggcgaagagggctgggggcgggagatgacggtggtcttctccctgcttggcaccctgcgagcaccagctcccttctcctcgccactccaaggttgcagacgaagcaggtactgtcctagatgttaaggacacaacattgagcaaaaacatgcatagtccctgcttccgtgacacttgagtgaactgaatgtgcaaagtccctgtggcacaaagtccctggggccagtgtgtgtggcgggtgtagaaggagctaaagagatctggttggagttggagggtgagagaaaatgaattctaatttacctgcagagaacttaaccattgcagtcaatatgaccaagactttgcctacagcagtaacgcatggatttaattccactaatgacccaccttcaatgtcaattacaaggctttttccagccttactggaatgctttggcattgtcctttgtggctacatagcaggaagggccaatgtcataacatcaacccaggccaaaggactaggaaattttgtctccagatttgcacttccagctttattattcaaaaacatggttgtacttaatttttccaatgtggactggtccttcctatatagtatcttaattgccaaagcttctgtatttttcattgtatgtgtattaaccttattggttgccagtcctgatagtcgatttagcaaagctggactattccctattttgctacacaaagtaatgactttgcattgggataccctatagttgaagctttatatcaaactacatacccagaatatctccagtacatttatttggtggcaccaatatctcttatgatgttaaaccctatagggtttattttctgtgaaatccaaaagtggaaagacactcaaaatgcttctcaaaataaaataaaaattgtgggactcggactcctgcgtgtattacagaacccaatagtatttatggtcttcattggcatcgccttcaattttattcttgatcgaaaggtacctgtatatgtcgaaaattttcttgatggacttggaaattctttttctggatcagccctattttatcttggtctcacgatggtgggaaaaataaagagactgaagaagtcggcatttgtagtactaattcttctcatcacagctaaacttctggtgctgccacttctgtgcagagaaatggtggaactcttggacaagggcgacagtgtggtgaaccatacaagtttatcaaattatgcatttctgtatggtgtatttcctgtagcaccaggagtggctatctttgcaacacaattcaacatggaagtagaaatt

SEQ ID NO: 96013 - DNA, 687 bp, Homo sapiens
agcggttctgtgcttagcttcactggagtgtcaacacttaatactagttatgtagaattacaactttatatttattacagtaaatacacaggcatgtaaggaaaaattctagaacagtttttcttagtatggtaaaaattttaatcaccatttcacttttgaagatcattctctcttgcacagagcactaaattcagtacgagatctgctatgatgtttctctcttatatgtaaccaagaaatttcccatgctgtcactaagaatcaggtattcctcctgctttctgctaaaggacctaaaattatattggaaatatcatcaaaggataaatcatactggatcttcttttggttacatttataggagctgccactcagtgaccatgtcaagggcacgttggctctcagccccagccactctcccatggccagcacacaaggccaccacagcctggtcctgacgtgatacccaagaccggtgggtacgaggggcatctgcttcactgcttctcaatattggaccagtttcttaaaactattttccaggaatagacaaaccctacctgcaaaccaagaagacagattttggcctatgtttagcaatattctcttgccatgatggagagtatcctctcatgaacaacgattataaatctgtcaatcaccctatgtaacttctcaaatgaa

SEQ ID NO: 96014 - DNA, 968 bp, Homo sapiens
agcggttctgtgcttagcttcactggagtgtcaacacttaatactagttatgtagaattacaactttatatttattacagtaaatacacaggcatgtaaggaaaaattctagaacagtttttcttagtatggtaaaaattttaatcaccatttcacttttgaagatcattctctcttgcacagagcactaaattcagtacgagatctgctatgatgtttctctcttatatgtaaccaagaaatttcccatgctgtcactaagaatcaggacctaaaattatattggaaatatcatcaaaggataaatcatactggatcttcttttggttacatttataggtatgttattcatataaattctataaaaattatatacatttataaaaatataatatcctatcagtcataattttgactatattaaaccttttctaaagttatatttatatagatattaatataaatattttaaagattatgtcaaatgtatggaagtctggtggttctaatgtgatgattctggtttttatcttactgtgctacatataatagaaatagctaaattttattgccaattgaaaattttcaaccaattttaaccatggttattacaagtttctgtcacccacaattcctggagggtaggagctgccactcagtgaccatgtcaagggcacgttggctctcagccccagccactctcccatggccagcacacaaggccaccacagcctggtcctgacgtgatacccaagaccggtgggtacgaggggcatctgcttcactgcttctcaatattggaccagtttcttaaaactattttccaggaatagacaaaccctacctgcaaaccaagaagacagattttggcctatgtttagcaatattctcttgccatgatggagagtatcctctcatgaacaacgattataaatctgtcaatcaccctatgtaacttctcaaatgaa

SEQ ID NO: 96015 - DNA, 731 bp, Homo sapiens
ggagtgtcagagaggggctcagagggcccccaggagcaaatgaagacagagaaataattagtcaagcaaaatagggaagtggtgagagggtccagccagctgaagagagcatgatactcaaggaattaaaataagcccagtgtaaccagatcaaaggagcggggcagctggagatgtggctagaaggtgaggggaacccagatcatgcagtgaatcaggtgagttaatttgtaggctcttagggtctaacacagtttgttacagacaagtatcatagctaagaaaagggtacaaatttcttaatatacaatggaaatgatagcctagtttcctattagcatccccaggttatagagaaaaaagtcattggggacatatcatcatttttaaagaattgaagttgggtagatttaaaattctttttatttcctttgcatgctggaaggtaaaagaaaagtcatatagaacctaaaataactgaaactgtctctgtaatttagcaaaaaaaaaaaaaaaaaaaacttcaaaaaaatggataaccatacacaacatcaaagggagaaaccggatctcttaataactaagtaatccttaaacctattttatagggccaaaattaacctcctgggaaatcgggccttcaacctcttttaccaccaaaccaacccaaattttttttaacaccttagccaagggccaatccctttatgaagggggccgcagggataaag

SEQ ID NO: 96016 - DNA, 254 bp, Homo sapiens
cgtggcagacacgtgagcagctactgcaagcttagagatgctactagacagacaaaaaggagtaaggctatttcgaccttcaagttaaccaaaaaattaggaaataacttatcagtgagaaaaaatgggtacatgtgctagtccctgtgtaccaaggactgggcaggattccatgcttttgccaagttggacataacctacagatgagtaaacctcagacctgccaatagtcaaacatttgaaaaattaatttg

SEQ ID NO: 96017 - DNA, 380 bp, Homo sapiens
agctggtacccccgactagcccgacagtccccgactagcccgacagtccccgactagcccgaagtccccgactagcccgacagtccccgactagcccgacagcctctattcccactctcctctccactcactcggcttcagctacacaagttccctgctgtcccttacacaccaagcactccccagcctcagggcctttgcacaggctgttccctctgcctggaacactcttcccccagatatctgcttggctcccccctcacttcctttgggtctttgctcaagtgtccttctaacatgtaactgcctcacctgcactgtgccaccccactccccgcctctaggcttaatttccctctacacccctgaagagcatctgc

SEQ ID NO: 96018 - DNA, 481 bp, Homo sapiens
tgctacgaatcggcggtcaaatggtttacagtccagaggcctgcatcagctcgagtgggcagtcacttaaaaaagccataccccagtctcacatcccagatgatatcacccagcccaggacctctccatgggagatgactttgcccctgtgattccttcccctgggacactaaaacctccactcaccaggacacaggacattttttggttttcttcctgaacccactgtttccttagcccatgatcctggtatcctccttgttctccactcaaatgtacacccctacacttccatactgcaaggaaaatccggaatgagttactacaattaatggtgactgttgctttcctcaggagacacctgcctcgtatcagtcaaccccttactccctaggggagaggaccacctacccactggtgtctttccctactaccccttccaactttccatcagaatctcctgacttgtgcctccggaatt

SEQ ID NO: 96019 - DNA, 223 bp, Homo sapiens
tgcactttaccagaaaataatgttaataagtcttgagttttcaagtccctctcactgacttggcacttagagaacagccagcacaggctcaggacaccctgctgggcattctatcaaggagaccatcctcatggaaatgcagcagaaagctacatgcagaagatggatggatgctctcctcccagagaccagcaggtgcaagtgtagagggagtgggccaggg

SEQ ID NO: 96020 - DNA, 375 bp, Homo sapiens
aatagagacggggtttcaccgtgttagccaggatggtctcgatctcctgaacttgtgatccgcctgcctcggcctcccaaagtgctgggattacaggcgtgagtcaccgcacccatcctgcacttcttaaaccagcagtaagtatagtcatgagccaaataatgacatctccatccacaaatatgacagttggtcccgtaagattataatagagctgccctataccagtgtgccactttattatatatatttttttaatttttaatttgtgtaggtacatagtaggtttacatatttatggggtagttgagatactttgatacggtataataatcacatcagggtaaatggggtatccatcatctccagcattta

SEQ ID NO: 96021 - DNA, 462 bp, Homo sapiens
tgtcctcattctgttggtttctcagttttacggatgcaggatcatgcacagaaccctgtaaatgagcatagttcgtttaagtatataaagtgctttcggtggataaaatgaattttaacaggcttaagtgatgtgcctaaatgcacacaattaatgcatggctggaattcaaaatcatgtcttttcctctgttctgattgttttataaatatgggttgttttaatgtgtggctggaattcaaaattgtgtcttttcctctgttctgattgttttataaatacaggtgtagtgattgattttctacccaccatgacagggaataggttcaaaacttaaaaccctgtttgttttataattaggtagactcaaatgacaggtcaaggcagggaggggagccagtcatttttactcccatatgggtttgctccttcaaagacaggattggggtagcagtgtcagtt

SEQ ID NO: 96022 - DNA, 437 bp, Homo sapiens
gccattaggttttaacacattttctggaaatttttaaaagtgagctattaaggtaggttgtctggggttagaatagggttcccctatgtataatatggcttaaccttaggaagtgtttcataagtgctttcccattactgtctaacctgactccacaataagttgacccatatgagattgccagtattagacgatttcttactttcaaaaatactaactgcaggccaggcacagtagctcatgcctgcaatctcagcaccttgggaggccaaggtgggtggatcatctgaggtcaggagttcgagactagcctggccaacatggtgaaaccccatctctactaaaaatacaaaaattagtcaggcatggtggtgcacacctgtaatcccagctactagggaggctgaggcaggagaatcacttgaaccagggaggcg

SEQ ID NO: 96023 - DNA, 2365 bp, Homo sapiens
caaacatactttcaatgtgttttacttctgaaatcatttgaaccaaaatgtttcagcaacacagattcatctgcaaccacaaatcagacacatttagaatgacaaagccccaaaagaatgccattttcaaggctgaaactgtattattctgggctaaatggaatccttgttttagtgacactgtaagagtagaaattaaagacactgaaaatcttcccttggggaaccacaattatctgtgaacaatgaaagtttgtctgaataattcatcagcctcaagggtacaggcctccccttattctggaatcccaggagtttaggcaagtgtgtcatttaatgggtctcaactgtgtcctcagttgttattattccagggcctggcatttatgggcacattcctataattttactaattaaaaaaaaataagctatatgggaaaccactgtcaaggtcaaaattttgaagctgcattgattttacctaggaagaaagaagcttataaagtgtccatcatgagaatccacctgggacctacacaacagatcaaatacccagaacaaatcaccacgtcagagccccacagaattctgattcccaaccaacaagcatgagtaatccttttaaatggtcacttacatatcagaacaggtcctttgtgaaatttctaagcaaggcctctggtttctgactgaaacagagatttattgagaaggaggggtaaagtgaaatcaagaactgctgggaaatttccacaagaaacaaggacaaatggtttttgttgtcagagtaaaaccagcctcccctagccatggtttggaaagttatttgctagcccacaggggacaatattctcaactggtttatcagggacccttttgatccaattatagttattgggcagatacagtcagtaccctattatcagaagacctagtttcaaatcctgagtcaactttctaattcactgtgtgaccttgtacaagtcacttaagctctctgatcattggttcaacatctttaatatgaggagagtaatgcctatctcaattacctcataaaattattgcaaagatcaagtgagttgatatgttacaaattatttctaaattataagattctgtataagtggaagggttaaatatactcccatattattaaataccctacgtatcactcaggattctatatgactctgagttctcaatttctagaaatggtcccatttttactttgttccctacaattctacggagtcttttttttttttaaaggaagggtgtaggcaaaggtaaatgggagaaaacatggaatcacataccactctttggtgctgctaggcaagaattttaaactgagtttaggtcaccatcgtggacttaaggtccatatcacctcagggagacaagtagagtgggaggcatccaaaaggtaggtgattcttctcccctctagtgaagaatacaaggtcaatttacaaaaaagcaccagcagcaaataattggaaaattaaattcataaaacatttataatagcgtcaaaaaaaagaaaatactcagaaataaatttgacaaaaattgtataagatctctacattaaaaattatgaaatacatgtaagagaaattaaagaaaacctaaatagagagatataccacattcatggattggaagattcaagattattaaaatactattctccccaaatggctctatagattcaacataatcccaatcaaaatcccagtaggctttggtagaaattgagatgttggttctaaaatgaaataaaatgcagaggacctagaatatataatttccctttaatttgacaaagaagaaaaacatgttgggaagctcacctaatttcagtgtaatatttacatacgaatcaacaaatggatcagtggtatagaatagagaatcctgaaatagatctacatatatatggccaacagatttttaataatggtgccaaggctattcaggggaaagaaaattcttttttaaaaatgggattggaaaaactggataagggaaataagtgaacctcgacccctcccttataccgtgctcaaaaattaattcaaaatcattctagacataaatgtaaaagttgaaactgcaatgactctagaagaaaatatagagaaaatatctctctgaccttggaggaagcaaaaatttctgtagtgacaaagacatatataataatcatataatccattaattataagaaaaataaactagacttcatcaaaatttaaaacttctgctcatcaaaagatactaataagattaaaagtagccaggttcagtggctcatgcccataatcccagcactttgggaggctgaagcagggggatc

SEQ ID NO: 96024 - DNA, 849 bp, Homo sapiens
caaacatactttcaatgtgttttacttctgaaatcatttgaaccaaaatgtttcagcaacacagattcatctgcaaccacaaatcagacacatttagaatgacaaagccccaaaagaatgccattttcaaggctgaaactgtattattctgggctaaatggaatccttgttttagtgacactgtaagagtagaaattaaagacactgaaaatcttcccttggggaaccacaattatctgtgaacaatgaaagtttgtctgaataattcatcagcctcaagggtacaggcctccccttattctggaatcccaggagtttaggcaagtgtgtcatttaatgggtctcaactgtgtcctcagttgttattattccagggcctggcatttatgggcacattcctataattttactaattaaaaaaaaataagctatatgggaaaccactgtcaaggtcaaaattttgaagctgcattgattttacctaggaagaaagaagcttataaagtgtccatcatgagaatccacctgggacctacacaacagatcaaatacccagaacaaatcaccacgtcagagccccacagaattctgattcccaaccaacaagcatgagtaatccttttaaatggtcacttacatatcagaacaggtcctttgtgaaatttctaagcaaggcctctggtttctgactgaaacagagatttattgagaaggaggggtaaagtgaaatcaagaactgctgggaaatttccacaagaaacaaggacaaatggtttttgttgtcagagtagccccaagcacagctccagagaaaggaggagggatcccacaataaaatatttatttata

SEQ ID NO: 96025 - DNA, 905 bp, Homo sapiens
tgcacattctgtttttacctctgtcactgactctgtgggtctagccatgtcatttaaccacacttgaatttcaggtattttgtctgtaaaatgaggataataacgcctgtctactacattaaaccacaagatggtttaaaggttagcataataaattattagagtatgacctaggagttacctaatctgacctctttattttacagatagaagtacagaaaggtaaattgaattgctcaaggtcacccagtgtgtggcaaaatcagaactggaaacttaggtcttctgccagtcccattcaagggctttttccattgtacagttaaattatatgttgtgtgtaagcatagtataaactgtaaaccatcatgcaaatgtcagatgattgttttccctcagtttttccagcgctgtttgttacccttattactatgcagtgtttaaatggatgagagtggtaagaaatgaaaaatacatcactaaccagtggtcatagtaattacattttcagagaaggccatggccattagaaagttcaagctccagggcagtagtcaccttcagctttctccaaagctttagtcccttccctgctggcttccatcccctatgagcctaacctaattctcattattgctgtgtcctgcccatgtggaatgggcagcaggtggtcatcagtctgaatcaattactgtaagacctcagataattagagcattactcaaccaaagcaaagtatattccacttttatgggaaagtaatcaatctcaaaataataataatgataataataacaagaagagaaggaggaagggagggaaaaagaaagaaagagaaaaaagaaaatgtttagggatgaaactgagttaataatattgactaaactgaggtttccgaacattcc

SEQ ID NO: 96026 - DNA, 285 bp, Homo sapiens
cgccagatgccaagccccatgccagggctgcactatctcgtgtcacgcacgcggactaggaaacgcagagggaactggcagccagcgaggcggggaccgggaccccacatctcaccctttgcccactccccttctttcccgactcactctctcgaaggccgcctcctccacccagccctggcctggccccagggtgaaccccctcctcccccaatcccacctcccgaaacttagaccgatttgcagaaggaagaagtctctctggctttcttcttacctctcttt

SEQ ID NO: 96027 - DNA, 459 bp, Homo sapiens
ccactcgttgctctggtggatgggggatgggtgggctgccagggaaggtgactgggggctgcagaggcagtgaggggcaggaacagcacagtccgcccctccaagcctcaactcgcatgcctccagcttgggccaccagacttgctggccctgtccacctctagacttttgcccacacgccctgcctctgcctggaacacgctctccccagctcagtctttggaaaccacactacttctttcagggactaactcaggttgctccttggtgctgggttctccatgcagctttccttaattcccaatccttatttttattttattttattttattttattttattttattatttttttgagacagagtgtcactctgttgcccaggctggagtgcagtggtgcgatcttggctcactgcaagctccgcctcccgagttcacgctattctcctgcctcagcc

SEQ ID NO: 96028 - DNA, 256 bp, Homo sapiens
ctctctggcgctcctgttgttggatattgggccttgtggacaaatccactcgttttatctatttcctattttctatgtatgggcaagtaggtgggcaataagtaaggatatttcttttttttttttttttttttgagacagagtctcgctctgtcgcccaggctggagtgcagtggtgtgatctcggctcactgcaatctccacctcccgggttcacgccattctcctgcctcagcctcccaagtagctgggacta

SEQ ID NO: 96029 - DNA, 784 bp, Homo sapiens
attcttagttctgttctggctctgaaacaaagactaaactttcaatgtttagccatgggtcatagcgcttcaatataactaactacacaacattttttctaactaatgtaactaactacactatatagggctatacatagggcttcaatacaactaactacactacagtttttcaagggcaaacttctgcttgttgtatactgaactctgaagtaacagtcacaacagcattttacagacacctgaatttctgcacaagtcattatagatcttgatttttaaattttgttggagaggaagttagaatctatgacctagagcagctttacccatgacttattcatccagggtacccttttctctatttctacagataaccaagagttagctttcattgctgaattggtagaaaatttaaaatatatcttctaaaagatacaataatccttcttcttttacccagttcgtggccagtaattcaacattatatcatttatgctaaaatggtattgccactccaccttctagaaaggaaatacttgaccaatattcaatgacttgtggactccaatatcccaaacagaactgaaattcaggaagtgagaaaaagatgatgtaattgatgcttctggaaagaatattaattatatccaattttaaaagtagatgagtcaggggtgcccataatgaattgtgtttaccctgagaacaaatccactacattggaattttaggcataaccagtatcattaaaaggagccccttgcaggtgagtaggtagcag

SEQ ID NO: 96030 - DNA, 502 bp, Homo sapiens
tccaaataaaaagttgcacatagccccacaacttcatacttactagaactctataccaattagaaacaggcaaagccacctgaatgccatccacatatgtgtccctgctactcaacagggatcctgttgattggcatggatacagcaagcagaggtgaaggctcacaccagcatcgagggtgtgggacccaacttgcttccccagagcctgcgcggcacagccacccagagaggtcctgcctgggagaaaggtaggttggactgcaagactctactccccacagtgggaggaaacagtatgcagccagggaagtagccctgtggcaaagaacaagttcctaagacaggtttggagtcatgggccgcaggggcaggtcccagtcctgcatcccactacctaatgttacaaagaagacagtgcatcaaacatactgcctactaagtgcctgacagtgccctcatttaattgtcacagtgaccttctaaagtagctactattctc

SEQ ID NO: 96031 - DNA, 195 bp, Homo sapiens
atccacccgctttggtctcccaaagtgctgggattacaggtgtgagccaccacgcctggccccaagggtgtgtattgaagttaggtcaggattaaggggaatcaagaggctgaactacctcctaatgcaggcttgtccaacccacggcctgtagggtgcatgcagcccatggcagctttgaatgaggcccaacac

SEQ ID NO: 96032 - DNA, 280 bp, Homo sapiens
tcaacatagtttctctgtcacctttcttgccggttttttcctcccaaccatggagtctccattttctaagcaattaaattatatattcaacaggaacattccatttaaaatggttcgggacagaagactgatgcacaaggtctgaagctggaagaaaatatttagtgcttgcctacagattctgtcacccatcatctgctcggaatgcgctccgtatctttcagcgtgtccggctcttatgattgcaaatggccctgttttcaaatggaaataagacttg

SEQ ID NO: 96033 - DNA, 510 bp, Homo sapiens
tcacattttggtcctcagaaacccatccgagggggacagagtaggtgttactgttctgattttacacatgaagagactggccactcgcccccacaaatttctggaagctagtcttcctcactgaactggagccagaagccatgtgaagccagcctgctcctgcctacaccctccttcctccaggtcaatgtcatttagaatatattgcatccttttcttggatctgtctgctaggacccgggccaccctcctgctggaggcaaccccgacagcccatattttaagcagctcttttcacagcctgcaaacctcacggattgtctcttacaactgtctgtttactcacttccctccacccagtcaattccgactccaggcccgggaggacaattttaaagtgtttctgcagacagaccctctggccgcgccggaagtgttttatggacctgtgagccgagttaatcccaggaggcgcggctggattagtcccgggtatgggtgggggattca

SEQ ID NO: 96034 - DNA, 192 bp, Homo sapiens
aagaagtaatcgctgacttcgaattctctttccaataagtggccatacgctgttcatttctccttcatgatatgtctggcatctgtctccttcttttcattcctcctgtcactgctaccacatctcaggctcttattaccctgtcctggaattagaggcccagtcttttggaaatagcagcaatattttatc

SEQ ID NO: 96035 - DNA, 683 bp, Homo sapiens
gctaagacatagtatagcatttagagccccaaaatgaaattccggttgaccttctatgtcacgagcaattaagcgactcagaggaagaaaacggtgaaatagatggagttaatcatcaacatttaccagcccgacgagctgaaccacaacgtcacacaatgtagtgtatgtgttgtaagtgtgaagccagaattaagctagtagtagaaagctcagcagacgaccttcgagcattccagcagctgtttctgaacaccctgtcctttgtgtgtccgtggtgtgcatcccagcagtaagcaacaatggctgatccagaaggctgtggcttgccttttcacttcttgtgtcctgtttaagaaatatctgctatcccaagataacactaacaaagttgaccttagaattggagtgcctgggttagaaccctgctggtaccacctgcttactgcatgcttctgatgtgagttcaggagaagacactggcaaggacagcaaagaacaggagaacactctagcttccctgatagcattcaaggtgctgtccaaactgactgtgatggcaccctccagacagacagcgatgccacatgttcaagatggcagaatcactatcagcttcaattcctgaatgactgcagagcaaaatttcttacctgcaacatacactctattttcagcctccc

SEQ ID NO: 96036 - DNA, 268 bp, Homo sapiens
aggaggaagacaataagcaagtaaataaatagaataatttcagataatgacaagtaatatgagaaaagtaaaacataatgatattataaagcacaactaggatgagaagggctgttttagataggaggattaggaaaggcatttctgaggaaggcattttatctgagacctgagatatgaggagactggaattatttatccatttattcagtcattcattcaaaaaatgtttattgagtacttactgtataccacaaattgttttagg

SEQ ID NO: 96037 - DNA, 692 bp, Homo sapiens
acacatggacagggtagatctcagacagacaatccacagtgaggtttctggcacccggggtgtgcagtccacacacaggaacaggatgtttccagcaggaggaggaagcacaaggttacacaggcttcagagtcaggctgccagggatcaaatcccagcacctcctttttcctgtgatggggcttgttcaacttctttgatatctctaaactagggataacaacagcacccgcttgagactattgggtggattgactgaactcatctatgtaaaatgcccagcacacaataagctttgttataattaaggtcagtccttgaaaaggcttagtggagtttgggcaggtggctacacggtgggagaggatccagctgtgcctgtcagtccccagctgccggccacatggatgctccccactcccctagccacctctgcctgtgtacgcttctgacactacgctgcctctgcttccctctccctgttccagcacgtcgggcacacacgtggagttgcactaatgccattccgctgcagctttctgcatggcccacacccatcttttcctgggtgtccactctcagccagtcaggatggtggttgcccatcctgcaggggtccaggacctgtagcctgtgtgatagacaccagcagcagctagtctatcagccacctcagtagaggcaggtgacaa

SEQ ID NO: 96038 - DNA, 439 bp, Homo sapiens
tgactcgttgatccgtccacctggccttcaaagcgctggattacaggcatgagccactaaacccagcacatttggagagggtgagcaaacaagtaaaccaaagaagatccttctgcgagaggctccagatggatgagaccaaccatccaatcctggtgccaaggagcagacactgctgacaacaaagaagtgggtgccttcagaggcatgaagttgacgtaggtcaagcaccttttcaccctgactgggatccacatccgacttcaggtctgagcaaggagtctggtgtgctacgatgtacacagtgacacttctatcagtgacaatgagaaatgacctgcccagcatggtggcatcacacctataaacacagcactttggggctgaggcaggaggatagcttgagcccaggagttcaagaccagcctgggcaacataa

SEQ ID NO: 96039 - DNA, 352 bp, Homo sapiens
gaggtctgtgttcttcggtgtctgtaggtccgtcccatctgaatgcttctgattttctacccccgtatcactttctatttctctgcagcgtgcatcgatcgccctggtgggagcttagaaggcggcaggcgaagaggggtaggaggggggagagccgaggagaagcagagagggtggcaggcgtggggatctgccgagccggcactgcaccgggtcctaggaaggctctcggaggggaggggaggccagggcgacccccgaagcaatggcccagtccgctagaacggcactgcgttaaggcacctgggatcaggaagaaatatctaaacaacaacaacagaaaaccaacaaa

SEQ ID NO: 96040 - DNA, 383 bp, Homo sapiens
gggtaaaggggctcagactcaatagcaagaaagcaaacagcaaaggacccgaacggctgtgcctcagaaggagccacaccgacagccagcaggttaacgaagagctgttcggcattattaaccatcagggagaagcaaatcgaagccacagggaggtgtcatttcatgccgttcagttggctattatcaaaaagacgaatgtaacaggtgttgacgagaacgcagagaaaaggcacctggcacgctgtgagggagagagagcgtcaatcagtgtggccactacacaaaccatctggaggtgcctccaaaagtcaaaaatggaactactggcccagggcggtggctcacacctgtaatcccagcactttgggaggccaaggcgg

SEQ ID NO: 96041 - DNA, 837 bp, Homo sapiens
  misc_feature (37)..(37): n is a, c, g, or t
  misc_feature (43)..(44): n is a, c, g, or t
gggggggtgaggggggccgagagcgtcgcccagcggnacatgnntcgtttagaaaatgcaacaacaagggtccatcttggaagcagagggcagccttcaccagacaatcaaacctgccacctgcctgtgccttgatgttggacttctcagcttctagaacttgccagaatttccagagccttcttgctcagatgccatctttttgtatgccatttcgaagagcttcagtgatgcctgctgaagagaggatgctgtttgtccaatgttttctcccgtttcgctgtcttttctatccagaagccccttcattttggaaatctcttcttttagcttttgcacttatcagcagtgtggtgaggagaaaggaagtgccagatttatcccatgatctgaaattcgaccacgtatgagcaactgtatatgagaaagagctactaaataagacattctgtttcctggtgaggaaggagagagtaatgagcaaatcatgctcctggtgttatatacccagtcattcaacaggatctcccaactagagcaaaatggaaaaaggttgtctgttcactctgactatgcagccataaaaagaaaggagatcatgtcctttggcaggacatggaagagctggaagccattatcctcaacaaattaacacaggaacggaaaaccaaacaccacatgttctcacttataagtgggagttcaacaatgagaacacatggtcacagggagggagagcattaggataaatagctaatgaatgtgggcttaatacctaagtgatggattgataggtgcagcaaaccatcatggcacacgtttacctatgtaacaaac

SEQ ID NO: 96042 - DNA, 324 bp, Homo sapiens
cacctgtacagcgggactaggctggttcatttcaacacagtaatgagtattcatcctctgttgccctaagaacttacacctactggttcataaatggtcataaatgttcaacatttacgaatttatgttgaagtacataaattcttcaacaaggggcctttacattcatatgtagggcatttggttgcttaaatattgaaacaattataaagaagttaaattaggctgggcatgggggttcattcctgtaatcccagcatgttgggaggccaaagtgggaggaccgcttgagaccaggaatttgagaccagtctgggcaacata

SEQ ID NO: 96043 - DNA, 360 bp, Homo sapiens
ctgggagagttttttaaacacagcagagtcttttctgccatcccccatcaggacctttgccattttagcctctctgcctggactgttctttaaacggctacatctgtcttgtcctttaaagattatgttttcagagaagtctttcatgaccaccaccccaagtagaggaaggtcctatttttctttcgaggcctttttgtttttcctttcgtgggacttagcacaatttgaattgtcttctgtatatgatgctctacttggttttgttgaccctgctagaatgagcttcataaaagcaggtacaacatctcttcgtagtcactgttctgtatctagtccctagaacagtgaatgctcaaa

SEQ ID NO: 96044 - DNA, 197 bp, Homo sapiens
gaagcaccgttaagaaaggattggagactttgtcatggtacttattttccagatgtttactttttaaataaggaaaaactacaacatgttaataaccaacttggaaaaaacaatattgtgatctgagaaagaacaaaacacatgccatacttaatatgttagtatccattttttccccttcaaatacaattctgcat

SEQ ID NO: 96045 - DNA, 627 bp, Homo sapiens
accagcgtggtaggtggcagtgtgtcaggaatactaaatggaatattatagaaactgagaacaaaactcaagaaacttgtttctgcaaagaaacccagacatcctgtttataaaaatgacgtggaggctggagcaccacactaaacaaacgaatgttctcttctcagatgtatctttacttgtcattatacttttggctaaacgtttcttttttctttctttcttttgtagagacagggtctctctatgttgcccagggtagtgttgaactgctggcctcaagctgtcctcctgccttagcctctgcatccagccaaaatattcctatgaaatataaatgtttcaaccaggcacggtgactcacaactgtaatcccagcactttgggaggctgaagcaggagcatcacttgaggtcaggagttcaagatcagcatggccaacatggtgaaactctgtctctactaaaaatacaaaaaattagccaggcatgatggcaggtgcctgtagtcccagctactcaggaggatgagcgggagaatcgcttgaatccaggaggtggaggttgcggtgagccgagattgtgcaactgcattccagcctgggtgacagagcaagatcctgtttcc

SEQ ID NO: 96046 - DNA, 493 bp, Homo sapiens
aggcggtttacatacacggatatatgtttagacaacaggcggtttacatacacggatatatgtttagacaacaggcggtttacatacacggatatatgtttagacaacaggcggtttacatacacggatatatgtttagacaacaggcggtttacctagacggatatatgtttagagatttattttaaggcattggatcccgcaatcatgggggttcaaaacctgcagggcaggcggcaggcaggagacacgcagtagggcacgtcaccgtcttgaggcaggtgttctcagtgaaacctcggttttcactcttaagggcttcctttgaagggatgagtccctcccagaaaaatcgaggctaatctccttcagatcatctgattgtggatattgagctcctctgcaggacaccttcccagctacacctgggctcatgtttgagcacttaggtactgtggcctggccaggattacaggtaatgcaaacctcatcc

SEQ ID NO: 96047 - DNA, 444 bp, Homo sapiens
gtatttacattgagtatttctttttctataaagcacttaaaatatatttaatgttgtaattttcagtagttaagcatctcttagtcctttttgagaagtgttttctgagaagtaattaagacttaaagaatagaattaaactttaattgattcttttatgcttacctgtttgtttctttaaaaaggtaccctcaccattagtttattaatccagtacttttccaacatcaatattttatagttactctatgagttgagtggctaaacttggtatttttgagttttctaaagtctacttcttaaaaatgccagtaattatcagcattcttataataatattggggtagttatagaacaacttcacaattcctctgttaacttcagtttttgtttcatttgttttataattttttctatttattaacaatagaactgtcaggaaaa

SEQ ID NO: 96048 - DNA, 388 bp, Homo sapiens
tatagatgcatgtcaccacacctggctaattttttgtatttttggtagagatggggtttcgccatgttgcccaggctggcctcgaactcctgagctcaagtgatgtgcctgcctcagcttcccaaagtctaggattacaggtgtgagtcactgcacccggccatagatcctatttttattgatcctttgttcactttaaggcaggggtccccaacccccaggccacatatacctactgggctgtggcctgttaggaaacaggccatacagcaggaggtgagtagggcaagtgagcattaccacctgagctccacctcctgtcagatcagtggtggcattagtttccataggagtgcgaactctattatggactgcacatgcgagggat

SEQ ID NO: 96049 - DNA, 580 bp, Homo sapiens
aagcatatgagtctttctaagtctccttttctacagacccatctgacctctcccctcctccccaggccgagctaggtcccaattcttcctcagcctccactcctccaccctataatcctttatcacctcccctcctcacacctggtccagtttaatttttttttatcaattactaacttgaggctttcattttacaacattattttggtcagttataaaaataatttaactgccaaatgggttttcccatttgacatttcaaatgttggtttaatacttatcacttagacctctatgaaggttgactcaggtttactgggggatattgcatagatcatgtcttttggtccaacagtttgggctgtgaatagtctaaatttgcatggaagctcccaactaccaagctatccaaaaactacagggacagggcggggtgaatgattctcagcaggtggcactcttccttctaattaggtcttgaatgaatgcaccagcattctgctatctcttgggtggagtgtgagactgaatcattcaataatgcttatagcgcttaagaaccaaattcaagggaactgtg

SEQ ID NO: 96050 - DNA, 199 bp, Homo sapiens
gcctgcctactcacgggctggattcgccaggcccactgtcccctctgtcctttgcacagaaggcaaatgaggtgagcacctgcatcccaaacaccctggcccattttcagagggccctttctcaccgtggcctccagctggcacccattcttgttctttttcttttctttctttcttttttttttttttttttttcctg

SEQ ID NO: 96051 - DNA, 117 bp, Homo sapiens
ctcggcctcccaaagtgctgggattacaggcatgagctcccgcacccagctggacaagcctcttgctgtcttaattctttaaaggacctgctgaagatggagatgtgggagtccagt

SEQ ID NO: 96052 - DNA, 137 bp, Homo sapiens
tgctgggtttacaggtgtgagccaccatgcccagcctaaattctgaagtttttaaagcatgttttcagaacataaagtttaatatagtgataaacttctaacaaaaaactttatgcagaactttatcttctttttct

SEQ ID NO: 96053 - DNA, 787 bp, Homo sapiens
agcgggggggcagagaagagatgcccaaggaggaggcggttggctttgtctgggtgcccaagcccagacccagatatccaggcctctgctcccttccctgaaagggtgctgtgcttcataaaaaatgagattagaaaacgagagaggaaaatatttttaatggaatcagggaatgtgaaaagcggtacatgcgaagaggaaaagatactgcagtcctggagttcgacctctgcagaggacatctggaatgctctggtccaacacgaaaaagaagaaataagcgatgaagccaggcacccagtcagtggcagaaccgacattagagcccaggcctcttcgtaatcagtcgtcttcaccccctttccaaggagagaggtgcttagaggcctagaccaggccctacagctttggagccagggcaccagaaccgctactaccctcaccttctctgtgccagacttggagttgaaaaaggtagcaacctggaaatgccaacaggagtagtcgaaaaagcccaaccaaagcctgctgtctttagccaaagaaccatggaagaggcagcctagcaagatagagaagttttaaacatcactatggattgcattgtgtctccccaaaattcatgtcgaagccttaactcccagtgtaattgtatttggagatggggcctttgggagataattagggttagatgaagtaatgagaataaggccctcatgatggaatcagcagctttataagaagaatgatggggttgggtgcagtggctcacatctgtaatcccagc

SEQ ID NO: 96054 - DNA, 297 bp, Homo sapiens
tgagattgtgccactgtactccagcctgggtaacagagcagactctgtctcaaaaaaaaaaaaatagaccaggcatggtggctcacacctgtaatcctggcactttgggagcacttcctagcactccaaaattggagaatcacttgaggccaggagttcaagaccagcctggtcaacatagtgagacccccccacctctaatatttaaaaaaaagaagatgaaatagaaaataaaagaggaacctcactcagaaattttttacaaaacagaaataaataaaaatttaaaataggccc

SEQ ID NO: 96055 - DNA, 773 bp, Homo sapiens
gctttcctaaactgggatgcccaaagggttacttgcacacaagtctcataggaacaagacacatgtcacaccaagtcagaacaaccaaccaatcattctgaggcttgtctctgacaatgacattaaaggctattttgtaaaaaactcattcattttacctatatctctcatgactggtcatatcctttacaatcctttccatccagaagagttcttcatctgtatgactttagttgtcactactggaatatctgagtagagcagagaatcatgggaatctgcagatacacataatctgcctatttagagtaagcaatttacctccctgggagatcattccagagaatgagctcactcacatttcgaaaatggaatgcaagaaagtggtttcaactcaacattttgattaaacttccgattatatgtaaacctcagaagcttgtgtataataacatgagtaaatgtactaaaattccttctatctttggcctttaaaaagaatataccatttttcgagaggctttcccagaagtagattaaagctctactctaggctggtgaagtatctaatatctatctgaaaggcaatcagtggttttatttttaatgtgttgagtcatgtgaagattacaaacatgtatacacatctgtgtagtctttgcaaataaaaaaatattttattcttaattgacactgaaccctggattattttttgtaattacatgttaacatgggaaatttgggatatttccaaaactatcttataaaaccca

SEQ ID NO: 96056 - DNA, 366 bp, Homo sapiens
tctttaagcttatgagacatggggaatcctctgtgtaaacaaaacaaaaagcttagtgaggtttgaaatggttttaaaaatctcctgatttaaaatctgcaaagagtgtaagcaagtctttactgattaatttcaatatatttaaacatatttcagtcccatatttggccaacaactagaaggcaatatatttagaggaaaaagtaatagaaggaaagagggggccgggtttaagaagagttctaaactgtttaaacacaccctgatgttgtcttgaacataggattatttgtcctaaactttcgatatagttggctgtctatatgcatttggtttttatagaatgtgatttttattcctattatt

SEQ ID NO: 96057 - DNA, 407 bp, Homo sapiens
cctgcctgacagttgagtccgcaacctccactctgacctaacaaaaagtgtgtttcttgcagtattccacttccaggacccaaattctctatcagttagatatgctttcagctataaaccattaaaactcaatgaactacagatgaaacaaataaaaatatttttctctaacagaaatctaggtgtgagtagtagcattggttccaaggcatcaaggccctaagtcagcatctctgtgattctcgtggcctcctgctcatagtcacgagatggttgcagcacatcatcacatcaccttggaaggcaggaagcaggtggtagtgtgatgcagagcttttcttctcagcctctgtctcttatatcaagaagtaaaatttttcccaaagcccctcaacagccttttactt

SEQ ID NO: 96058 - DNA, 520 bp, Homo sapiens
tcctgcctgcacataaacagtccctgccctttgttcacaaaatatcagtaactgtatgataaaataaatgtttttgtgaagcagatgattgctcatgaaaacgttatagctaggggatgagtcactgcataagctcaggatcaaataaattttatatacaatcaaggaaatcttagcaaagtttaaacatctataaactttcctttagcatttaaaataaaattgtactccatataacacaaaatggatagatttattatatgtattgcttttgcaagggattatgaagtccataaaatgtgcatgtaatataacttgattgtatcacaaatatgatttaaacaaatatgcttgctgggctcagtggctcacgcctgtaatcccaacactttgggaggtcaaggtgggaggatcatttgaggtcaggaattggagaccagtctggccaacatgatgaaaccctgtctctactaaaaatacaaaaaatttaaaaaaattagctgggcatggtggtgcatgc

SEQ ID NO: 96059 - DNA, 344 bp, Homo sapiens
gacattggttgcttagtctaagtttaatgaggcttttggctaggcattaaattttggcacaggctgtctaatctattatagtatatcttggtaagttaacatctattaattaattttcacaatagccaaatgcttcctcagcttctcttttgtgagaacataacgaaaattacaaagcaaggacaaaactatttaaaaactcttaacccagtattcgtaggcaaaagatggggaaggtaggtatcaaaatattaacactaatgattttgagccataagattatatttgatttcaattttctttaaatatgcattttccatattgttagtgttttctttataacc

SEQ ID NO: 96060 - DNA, 737 bp, Homo sapiens
tgcccacagttctgcagccactcggtacggcgctaacgccgcgaggtagctcggtgcgtctcgcagtaccagtgcgaacctttgggctctccaggtccgagatcctagtctcctgtcggctctgaggaggatggatccttctgcggatacatgggacctctcctcacctttaatatcattatggataaacaggttttacatttatctgggctttgctgttagcattagcctttggatttgtgtccagattgtcatcgagatgcagggatttgcaacagttcttgctgaagcagttacgtccctggatctgcctgtggccattattaatctaaaagaatatgatccagatgatcatctgatagaagaggtgactagtaaaaatgtctgtgtcttcctggttgcgacatacactgacggcctaccaaccgaaagtgcagagtggttctgcaaatggttagaggaagcatccattgattttcgatttggcaaaacttacctgaagggtatgagagatgcggtatttggcctgggaaattctgcctatgctagccacttcaacaaggttggcaaaaatgttgacaagtggctctggatgcttggcgtgcatcgtgtgatgagtcgaggggagggcgactgcgacgtggttaaaagcaagcacggcagcattgaggccaacttcagagcatggaagaccaagttcatctcccagctgcaggcacttcagaaaggggagagaa

SEQ ID NO: 96061 - DNA, 1088 bp, Homo sapiens
agctgctgcctggaaccagtgttttgactgagtcacctctggacgtgggcccacaagatctgagagtgcccagacgagaagttgaatgccttgtgttgacctgagtgtttggaaaaaagccccaaactttgaaacaattttcataattttgagcttcaggatgtggaatcacttctcaagtattctggagttctgtccattagagcgggtcctgccaatgctgccctgtgcagcgcttcaggctgcatccctcccactagggggcgcctttcacatagtggcgcctgccttctagaggagcaacatttcctgaactgcagggttccctcggggctttgtgtaaaacacatccactgcatagaatttgtgttatttccattttgttttcttgacaatatttaattaattacaaaatgatgtatgttatgatagtttaagcaatacagagagtaaccaaacaaaagcttggtcttttattctcgcactctgaatttacagtcctgaaaactctaaactcatcatataatctatattgtaaagactttgataatcccttcccttgcctttcctttccccattcccccttccccttccttcttctacattgtatgatgtttttcatatttacattctaaccaattgtgtcatgtgatactaatttgcagaataaagcatgttttgcacatatttccaagtcatataacatgcagacatacttcattttgtaaatatcttccttctcttactataagattgagaataggtaaagagcaactctccaatgcaggtgatgagtgtgatttgcactatcactttggacagccaattggaatatttattgaagtcatagatgcccagcaattctgttactggatgtgtctcatagacaaactcttggacattcttatagaacactgagcccaaagaagacacatcatataatgtaagaagctaggacagcttaaaaaaaaaaggcctagatctgtgtaattgtgtgagtgttctcggacatactgtttgtaaaaaatcgagttattgagtagtttgataatatgataatcatgaaaataaaggataaagcagcgagt

SEQ ID NO: 96062 - DNA, 301 bp, Homo sapiens
attaggtgttttgagagtggcaaaaagcccagaacttaaatacccaaagatgtttaagacaagtcatgtaattactttagatcacaaggaaaacacatctgctgtacttggggatcaaatcagtgcttgggatatgaagatgtctcttggcacataagaactggataatatttgtggaaccagtatttccttattaggtatgaaagttacccccattaaacagtaccaaaaatctcttaaaacttttcattgcatacattattagagccaaacctatttagtcttttctctttttttttga

SEQ ID NO: 96063 - DNA, 578 bp, Homo sapiens
caccctcacagatcttccttgacttgtccccactgcctgaaacagagcaacacctttgatcctttcctgtgtgtgtccctacctatccccttgcgccagacgaggttcttgagtgtcaccttggtcttcccctctaagagccagcggttcctgcgggttggcctggccgtgccgatcctcagcacagtggcagccctgaggaagatggttgcagaggaaggaggcgtccctgcagatgaggtgatcttggttgaactgtatcccagtggattccagcggtctttctttgatgaagaggacctgaataccatcgcagagggagataatgtgtatgcctttcaagttcctccctcacccagccaggggactctctcagctcatccactgggtctgtcggcctccccacgcctggcagcccgtgagggccagcgattctccctctctctccacagtgagagcaaggtgctaatcctcttctgtaacttggtggggtcagggcagcaggctagcaggtttgggccacccttcctgataagggaagacagagctgtttcctgggcccagctccagcagtctat

SEQ ID NO: 96064 - DNA, 462 bp, Homo sapiens
tgcatctgaaactatcttatttttttctctacttgtctgtctctctcactaaagtctatgatctttgaggagagggacttcactatatacattccagaattcccagcgtttagaacagtacttggcatgtacaggaaactcaaatacttgttgagtaactgagcaaggtccttggcacatggtcaatgctgaattaacgtcagctatcactccttcattttacaagacaattcctctttgactctgtttagtgtctagattagcaggtatttgttgagataaaaatgataatgggattttagaactggaaaaggccttgaagattatctagcccattaatttccaattacccatctcaacacactttaagataacacatgcccatcagcagccgtggctctgtaacagcagcatctcaactggcttggtgtgaaggtagtattattcccatccatctctctt

SEQ ID NO: 96065 - DNA, 369 bp, Homo sapiens
agtattcaattggcagtggttcctaagcagttcagctctgcatgtcagtaaaatatatcaaactacagtttaaatgtattaaatgattccaaaatgcatccttttagtgttaaaatggtttataaacatctcaagtaaattatcttttaaaacacaatggttctcgagcctgtatgtgcatgacaacaaacactaggggagatgcttaaaatgtagagatgcttgggtcatcccttgcccacagattctaactgcataggcatgggttaagtagagcctaggaagctttattatttcttaaaaggtctacaggagatcctcatgctggcggaggcagatctagttttgtgggtcctgaaacctacacac

SEQ ID NO: 96066 - DNA, 338 bp, Homo sapiens
tggccaaggaatcttacttttaagaatgtgaaggaatcttaagaccaaaaagtataagaaccactgacctaaatcatgattcaattcttcacttctctattctgacctataaccgcattctgttgtccattcacttttcatctctagccacttatattcatctctagacactagtctcctatagctaggctttgcatgttagaattgctttagaagtttcagaagttctcctaaatttaatatataaggtttgaacaagttctaacaccatcctaggttctcaggggtttttttgttgttttttgttttgagtcagggtttcactctgttgcctaggc

SEQ ID NO: 96067 - DNA, 438 bp, Homo sapiens
gaagacttgagtgatacaattctgtggctaccacagcaaagacagagagagtaattctcttacatatggggagattatatggatatgtgttatatatgttaacaggaataaaatataaataaaggtctccattactttagtgaagtagaaaacaggcaacctaaataaatatgttaaatgctattgacagaaatgcacaactggcaacattttgatgaaagaaaggtataataagtttctcaaaagcagccatgggagaatttttgcttgtcagattgaaccaaaattcactttgtaatcaattttcttctacctaattatgcattcacatactggcactttcgggttcttgcactggatcaaaaactattttaaaacttgcttgtatagagtacattctttttttcaatgactattcccctgtcacatactgttcag

SEQ ID NO: 96068 - DNA, 489 bp, Homo sapiens
ccaattgctctatgtttagaattgcctctttttcaagatggatttccttcacaggaatggagtgctcataattcagcatttgcagaaggactaccgagcttactacacttttctaaattttatgtccaatgttggagaccccaggaatatctttttcatttattttccactttgttttcaatttaatcagacagttggaaccaagatgatatgggtagcagtcattggggattggttaaatcttatatttaaatggtaagatttctgttttatttcattttttcctaagatttatccttaaatttgtgacttcggcataatgatcacatttcagatgtatatcgttttacttggaaaatctttcaaaaataccaggtaacttgaaacaccagattcataagtagaacttttaaaaggcacagaaatgtatatatatgtttttgtttttttttttttttgagacagagttttgcccttgttgcccaggat

SEQ ID NO: 96069 - DNA, 234 bp, Homo sapiens
atacaaatacccaaaatgaaacataaccaaacaaaatccagtaccagattaaaaacataatatacaacagacaaataggacttattccaataatatagactagtttaatacttggaaatctattaatatgataagccactataacacagcaaagaagaaaaatcttgtatccatgaagatacttgaaaaagcttgacagaaaaagctgatttaaaaaaacaaactaaagaaaat

SEQ ID NO: 96070 - DNA, 663 bp, Homo sapiens
agatggcttggaattagaaacagtcacatggtttgcaatctgcttaaaagactgcaaattgcaaatggtattgtttagtagttggctgagaaccttaacagaggttgtagagtctgaaaattatcgctggcatctctaattcttaagaaaaatgtcttggaatttcaggagtttctaagcagtatatttgtaagaaaacaaaataatttctgtcctctggggaatctcaaagtgctgagagctgacctgttaacaaagtggtaggagtggacagtgctttatgaagacggacattttatgttcagctgtggcaaccagcctggccctaagagatgctctgtagcaattaattctctttgtggtggctgatggcttcatactctgtgtgttgtagggatttagaaaggttttcctataaaatagagttgtctgtattccaaatcattgtgggttactttatgtaaattattccatttattttcttgaataacttttggtattgtttgcatgttgtattgatgttattttccatgattaaaaacaactcaatttcaggccaggtgcaatggctcacacctgtaatcccagcactttgggaagctgaagtgggtggatcacttgaggccaggagtttgagaccagcctgagcaacatggtgaaacc

SEQ ID NO: 96071 - DNA, 528 bp, Homo sapiens
aaaatactaacaaaccaaatccagcagcacatcaaaaggttaattcaccacaatcaagtaggctttattcctgggatgcaagtttgattcaacatacacaaatcaataaatatgatgtaccacataaacagaattaagaacaaaaaaccatatgatcatctcaatagataaaataaaagcttttgatcaaaatccaacatcccttcataataaaaagtctcaaaaaactaggcatcaaagaaacatacctcaaaataactagcgccatttatgacaaacccacaagccaacatcatgctgaacagacaaaagctggaagcattccccttgagaaatggaacaagacaagcctgcccactctcacctctacaaaagcactgtacaaaaatcagtagcatttctacacaccaataatgtacaagctgagagccaaatcaagaacataatcccatttacaatagccatacgcaaaaataaaacacctaagaatacatataaccaagaaggtgaaagatttctacaaggaga

SEQ ID NO: 96072 - DNA, 1818 bp, Homo sapiens
tttgttttgagcttctggaaacagtgtctcatttataagaagatggctttaaaagaaagagactccttcaaatccagtggccacagtgaaagcgggagaacgacaatggtgtgatgtgggaatttttaaaaataatacagctttggtgagccagttttatttgctgccaaaagggaagcaaagcatctcaaaggtaggaaatgcagatgtacctgactacagcttgcttaagaaacaagatcttgttccaggcacaggatacagattcagggttgctgcaatcaatggttgtgggataggtcctttcagcaaaatcagtgaatttaaaacttgtattcctggttttcctggagctccttctgcagtcagaatttcaaagaatgttgaaggtatccacctttcctgggaacctccaacctcaccttctggaaatattttggaatattcagcctacttggctatccgcacagcacagatacaagataatccaagtcaacttgtgttcatgaggatttattgtggtcttaagacatcatgtatagtaactgctgggcaacttgcaaatgcacatattgattatacatccaggcctgccattgtgttcaggatatcagcaaagaatgaaaagggatatggaccagctacacaagttcggtggcttcaaggtaacaataagaaagcacctttaaattgaattggtttttttactgaagctattgtgatgatgattatttattagtaactggttatgaagatttgtcatttaaaagagtattctctggctgtatttccagcagttatgaacttgagtttgtaaattgttcttaaaatgtatttgctgaattatagatccaaataaaagaaaagaagcaaagactctctgaaaattagtatatgagttcttccttacagatatagctcttttataaagaaaaacagtgaaattaagataaaagctagaaagctttattaccccaatatcttttataagggctgtgtaacccagtcatcctagagttattgagatgattctggtaactggctgttgtatactatgctgtcttatatagtaaatgttctctacattgtaaatgtcctacctttgagtactccttctatctttattctatatgagcagtgttcctctaacaactgtcttctattggataatatgtgtgatactataataattctaatagttatttgattcctttctttgtttacagttagcacagagcttaagaaattaaaaaagaggcaagtttagaaactgcttttgaacttttattattttccaagaatcatggtaaaatacaacaagaacaatgagttttcttgattcttaccaggccaatatatttgaatatatttttggccaaagcacttaacttatctggccctcattttcctcataacagatgagggagttaaagcagtttatcttttaggtccctttcagcactaaggttttgtgtttttagtagaagtgaagtatgtccctgaacattttcatctgtcttaatggctctaattttgcttttgctaaaattaaaatcttcataattgaattcaaaattaaagtatatgtcctcctattggagaaaaaaacaagcaccttaacaggacacaagttttaaaatagtgttttaaacatttgtaagatttttgtaaatgctctaaatgttttatttttgcattgtttttaccttgaaattgtataaacttttttactatgaaaatataagcattagacagctaactcaggttccattacaaccttaaagatacagataggcattataaacactctgctacagg

SEQ ID NO: 96073 - DNA, 2178 bp, Homo sapiens
ggatctagaaatgagccagcttggaatgaatttttctgtatttgctcctttggagcaagttgtaatgttacgctaaaggaattacattttctgagagagtctctgaaatgacaatgttctataaaatagctggcattttaacatatcactgattggaaagcatgctaactccagctaggttgatagtacagagctactgacttggagaatgcctgtcactcctgtgtttgaattggcatccctgtttcactgtcagttgacctaatctgttaagactttatttacttatgagttgttaatgttgtggtgtttatccaaatacctacttgtagatcactgcatggacttattaaatcttgaaatttttcgtatattcaataagagtcttcataaatttttttttctctgaaattagaaagagactccttcaaatccagtggccacagtgaaagcgggagaacgacaatggtgtgatgtgggaatttttaaaaataatacagctttggtgagccagttttatttgctgccaaaagggaagcaaagcatctcaaaggtaggaaatgcagatgtacctgactacagcttgcttaagaaacaagatcttgttccaggcacaggatacagattcagggttgctgcaatcaatggttgtgggataggtcctttcagcaaaatcagtgaatttaaaacttgtattcctggttttcctggagctccttctgcagtcagaatttcaaagaatgttgaaggtatccacctttcctgggaacctccaacctcaccttctggaaatattttggaatattcagcctacttggctatccgcacagcacagatacaagataatccaagtcaacttgtgttcatgaggatttattgtggtcttaagacatcatgtatagtaactgctgggcaacttgcaaatgcacatattgattatacatccaggcctgccattgtgttcaggatatcagcaaagaatgaaaagggatatggaccagctacacaagttcggtggcttcaaggtaacaataagaaagcacctttaaattgaattggtttttttactgaagctattgtgatgatgattatttattagtaactggttatgaagatttgtcatttaaaagagtattctctggctgtatttccagcagttatgaacttgagtttgtaaattgttcttaaaatgtatttgctgaattatagatccaaataaaagaaaagaagcaaagactctctgaaaattagtatatgagttcttccttacagatatagctcttttataaagaaaaacagtgaaattaagataaaagctagaaagctttattaccccaatatcttttataagggctgtgtaacccagtcatcctagagttattgagatgattctggtaactggctgttgtatactatgctgtcttatatagtaaatgttctctacattgtaaatgtcctacctttgagtactccttctatctttattctatatgagcagtgttcctctaacaactgtcttctattggataatatgtgtgatactataataattctaatagttatttgattcctttctttgtttacagttagcacagagcttaagaaattaaaaaagaggcaagtttagaaactgcttttgaacttttattattttccaagaatcatggtaaaatacaacaagaacaatgagttttcttgattcttaccaggccaatatatttgaatatatttttggccaaagcacttaacttatctggccctcattttcctcataacagatgagggagttaaagcagtttatcttttaggtccctttcagcactaaggttttgtgtttttagtagaagtgaagtatgtccctgaacattttcatctgtcttaatggctctaattttgcttttgctaaaattaaaatcttcataattgaattcaaaattaaagtatatgtcctcctattggagaaaaaaacaagcaccttaacaggacacaagttttaaaatagtgttttaaacatttgtaagatttttgtaaatgctctaaatgttttatttttgcattgtttttaccttgaaattgtataaacttttttactatgaaaatataagcattagacagctaactcaggttccattacaaccttaaagatacagataggcattataaacactctgctacagg

SEQ ID NO: 96074 - DNA, 3405 bp, Homo sapiens
agctggaggcgggtccccgccctccccagggagcagccggttgaggcgggagcggtgcattgtgggcagaggggcgggggttgggaagatggcggctcccagcctcctcaactggaggcgagtttcttccttcacggggccggtcccccgcgcccggcacggacaccgagcggtggccatccgggagctgatgatcatctttggagggggaaatgagggcatcgcggatgagctgcacgtctacaacacggctacgaatcagtggtttctgccagctgttagaggagatatccctccaggctgtgctgcccatggatttgtctgtgatggtaccagaatattagtatttgggggaatggttgaatatggaagatacagcaatgagttatatgagttacaagcaagtcgttggttatggaaaaaagtgaaaccccatccccctccttctggtttacctccttgtcctcggcttggacatagcttctctttatatggtaacaaatgctatttgtttggtggcctggcaaacgaaagcgaagattcaaacaataatgttcccagatatttaaatgatttttatgagttggagctacagcatggctctggtgttgtgggttggagcattccagtgactaaaggggttgtgccttctccaagagaatcccacacagctgttatatattgcaaaaaagattctggaagtcctaaaatgtatgtttttggtggaatgtgtggtgctcgcctggatgacctatggcagcttgacttagaaactatgtcatggtcaaaaccagaaactaaagggacagtgccacttccacgaagccttcatacagccagtgttataggaaacaagatgtacatttttggtggatgggtcccacataagggggaaaatactgagacttcacctcatgattgtgaatggagatgtaccagttcattttcttacctaaatctggatacaacagagtggaccaccctagtatcagattctcaggaagataaaaaaaattcaagaccaagaccaagagctggccactgtgctgttgcaatcggcactcgattgtatttttggagtggaagagatggctacaaaaaagcactgaatagtcaagtttgctgcaaggatctttggtatcttgatactgagaaaccaccggcaccatctcaagtacagctgatcaaagccactaccaactcctttcatgtcaagtgggatgaagtgtctacagttgagggctatcttttgcagttgagtacagacttgccataccaagctgcatcatcagattcttcagcagcaccaaatatgcaaggagtcaggatggaccctcacagacaaggcagtaataacatcgttcctaacagtatcaatgatacaataaacagcacaaaaactgaacagccagccacaaaagaaacttcaatgaaaaacaaaccagactttaaagcactgacggattctaatgccattttatatccatctttggcatcaaatgcttctaatcataatagtcatgtggtggatatgctaaggaaaaatgaaggtcctcacacttcagcaaatgtaggtgttctaagtagttgcctggatgtaagaacagtaattcctgaaacatctgtatccagtactgtttccagcacacaaactatggtaacccagcagaccattaaaactgaatcatccagtacaaatggggcagttgttaaagatgaaacttcactaacaacattcagtaccaaatctgaagttgatgaaacatatgcactgcctgcaacgaagatcagccgtgtagagacacatgctacagcaacgccgttttctaaagagactccttcaaatccagtggccacagtgaaagcgggagaacgacaatggtgtgatgtgggaatttttaaaaataatacagctttggtgagccagttttatttgctgccaaaagggaagcaaagcatctcaaagaatgttgaaggtatccacctttcctgggaacctccaacctcaccttctggaaatattttggaatattcagcctacttggctatccgcacagcacagatacaagataatccaagtcaacttgtgttcatgaggatttattgtggtcttaagacatcatgtatagtaactgctgggcaacttgcaaatgcacatattgattatacatccaggcctgccattgtgttcaggatatcagcaaagaatgaaaagggatatggaccagctacacaagttcggtggcttcaaggtaacaataagaaagcacctttaaattgaattggtttttttactgaagctattgtgatgatgattatttattagtaactggttatgaagatttgtcatttaaaagagtattctctggctgtatttccagcagttatgaacttgagtttgtaaattgttcttaaaatgtatttgctgaattatagatccaaataaaagaaaagaagcaaagactctctgaaaattagtatatgagttcttccttacagatatagctcttttataaagaaaaacagtgaaattaagataaaagctagaaagctttattaccccaatatcttttataagggctgtgtaacccagtcatcctagagttattgagatgattctggtaactggctgttgtatactatgctgtcttatatagtaaatgttctctacattgtaaatgtcctacctttgagtactccttctatctttattctatatgagcagtgttcctctaacaactgtcttctattggataatatgtgtgatactataataattctaatagttatttgattcctttctttgtttacagttagcacagagcttaagaaattaaaaaagaggcaagtttagaaactgcttttgaacttttattattttccaagaatcatggtaaaatacaacaagaacaatgagttttcttgattcttaccaggccaatatatttgaatatatttttggccaaagcacttaacttatctggccctcattttcctcataacagatgagggagttaaagcagtttatcttttaggtccctttcagcactaaggttttgtgtttttagtagaagtgaagtatgtccctgaacattttcatctgtcttaatggctctaattttgcttttgctaaaattaaaatcttcataattgaattcaaaattaaagtatatgtcctcctattggagaaaaaaacaagcaccttaacaggacacaagttttaaaatagtgttttaaacatttgtaagatttttgtaaatgctctaaatgttttatttttgcattgtttttaccttgaaattgtataaacttttttactatgaaaatataagcattagacagctaactcaggttccattacaaccttaaagatacagataggcattataaacactctgctacagg

SEQ ID NO: 96075 - DNA, 452 bp, Homo sapiens
gtatgtattgtatgaatgaggtttggggtttctgctctcctaatgcctttctgtactatatgaacttttcacagtaagcacattttatctttataaatagaaataaaatgcaaataaagggtatatattatctgaatgttttaattttttctatgatatcctagatatttaaatgatttttatgagttggagctacagcatggctctggtgttgtgggttggagcattccagtgactaaaggggttgtgccttctccaagagaatcccacacagctgttatatattgcaaaaaagattctggaagtcctaaaatgtatgtttttggtggaatgtgtggtgctcgcctggatgacctatggcagcttgacttaggtaagtttaacttgattcaggctcaggaatagggcaaattaaaaaatgctttgaaaaatattattgattgcagtattta

SEQ ID NO: 96076 - DNA, 543 bp, Homo sapiens
tgtatccagtactgtttccagcacacaaactatggtaacccagcagaccattaaaactgaatcatccagtacaaatggggcagttgttaaagatgaaacttcactaacaacattcagtaccaaatctgaaggtttgaaatgtgtttcacatactgtattttgaaccatttatgtatataaattcatcaaacttacttgtcttagatgggagttgcatttcatcttggaattttgttattagtcattttaacttaatttctgtgagcaagagttttcatttgacctaaatttaacttttagaatctttaagaattctttttagtttttgttttctttctatcatgactttatggattttgaccatatatttacctttatcagctttcatctttccagaatgtaatgtaaacagataaagcatttcatttaaaattattttataaaatattctctgcataaaatatttagattagcacacactattgaaatacaatcagaatgtgtctttcctaccatgaataaatttagcaaacttttttttag

SEQ ID NO: 96077 - DNA, 3591 bp, Homo sapiens
agctggaggcgggtccccgccctccccagggagcagccggttgaggcgggagcggtgcattgtgggcagaggggcgggggttgggaagatggcggctcccagcctcctcaactggaggcgagtttcttccttcacggggccggtcccccgcgcccggcacggacaccgagcggtggccatccgggagctgatgatcatctttggagggggaaatgagggcatcgcggatgagctgcacgtctacaacacggctacgaatcagtggtttctgccagctgttagaggagatatccctccaggctgtgctgcccatggatttgtctgtgatggtaccagaatattagtatttgggggaatggttgaatatggaagatacagcaatgagttatatgagttacaagcaagtcgttggttatggaaaaaagtgaaaccccatccccctccttctggtttacctccttgtcctcggcttggacatagcttctctttatatggtaacaaatgctatttgtttggtggcctggcaaacgaaagcgaagattcaaacaataatgttcccagatatttaaatgatttttatgagttggagctacagcatggctctggtgttgtgggttggagcattccagtgactaaaggggttgtgccttctccaagagaatcccacacagctgttatatattgcaaaaaagattctggaagtcctaaaatgtatgtttttggtggaatgtgtggtgctcgcctggatgacctatggcagcttgacttagaaactatgtcatggtcaaaaccagaaactaaagggacagtgccacttccacgaagccttcatacagccagtgttataggaaacaagatgtacatttttggtggatgggtcccacataagggggaaaatactgagacttcacctcatgattgtgaatggagatgtaccagttcattttcttacctaaatctggatacaacagagtggaccaccctagtatcagattctcaggaagataaaaaaaattcaagaccaagaccaagagctggccactgtgctgttgcaatcggcactcgattgtatttttggagtggaagagatggctacaaaaaagcactgaatagtcaagtttgctgcaaggatctttggtatcttgatactgagaaaccaccggcaccatctcaagtacagctgatcaaagccactaccaactcctttcatgtcaagtgggatgaagtgtctacagttgagggctatcttttgcagttgagtacagacttgccataccaagctgcatcatcagattcttcagcagcaccaaatatgcaaggagtcaggatggaccctcacagacaaggcagtaataacatcgttcctaacagtatcaatgatacaataaacagcacaaaaactgaacagccagccacaaaagaaacttcaatgaaaaacaaaccagactttaaagcactgacggattctaatgccattttatatccatctttggcatcaaatgcttctaatcataatagtcatgtggtggatatgctaaggaaaaatgaaggtcctcacacttcagcaaatgtaggtgttctaagtagttgcctggatgtaagaacagtaattcctgaaacatctgtatccagtactgtttccagcacacaaactatggtaacccagcagaccattaaaactgaatcatccagtacaaatggggcagttgttaaagatgaaacttcactaacaacattcagtaccaaatctgaagttgatgaaacatatgcactgcctgcaacgaagatcagccgtgtagagacacatgctacagcaacgccgttttctaaagagactccttcaaatccagtggccacagtgaaagcgggagaacgacaatggtgtgatgtgggaatttttaaaaataatacagctttggtgagccagttttatttgctgccaaaagggaagcaaagcatctcaaaggtaggaaatgcagatgtacctgactacagcttgcttaagaaacaagatcttgttccaggcacaggatacagattcagggttgctgcaatcaatggttgtgggataggtcctttcagcaaaatcagtgaatttaaaacttgtattcctggttttcctggagctccttctgcagtcagaatttcaaagaatgttgaaggtatccacctttcctgggaacctccaacctcaccttctggaaatattttggaatattcagcctacttggctatccgcacagcacagatacaagataatccaagtcaacttgtgttcatgaggatttattgtggtcttaagacatcatgtatagtaactgctgggcaacttgcaaatgcacatattgattatacatccaggcctgccattgtgttcaggatatcagcaaagaatgaaaagggatatggaccagctacacaagttcggtggcttcaaggtaacaataagaaagcacctttaaattgaattggtttttttactgaagctattgtgatgatgattatttattagtaactggttatgaagatttgtcatttaaaagagtattctctggctgtatttccagcagttatgaacttgagtttgtaaattgttcttaaaatgtatttgctgaattatagatccaaataaaagaaaagaagcaaagactctctgaaaattagtatatgagttcttccttacagatatagctcttttataaagaaaaacagtgaaattaagataaaagctagaaagctttattaccccaatatcttttataagggctgtgtaacccagtcatcctagagttattgagatgattctggtaactggctgttgtatactatgctgtcttatatagtaaatgttctctacattgtaaatgtcctacctttgagtactccttctatctttattctatatgagcagtgttcctctaacaactgtcttctattggataatatgtgtgatactataataattctaatagttatttgattcctttctttgtttacagttagcacagagcttaagaaattaaaaaagaggcaagtttagaaactgcttttgaacttttattattttccaagaatcatggtaaaatacaacaagaacaatgagttttcttgattcttaccaggccaatatatttgaatatatttttggccaaagcacttaacttatctggccctcattttcctcataacagatgagggagttaaagcagtttatcttttaggtccctttcagcactaaggttttgtgtttttagtagaagtgaagtatgtccctgaacattttcatctgtcttaatggctctaattttgcttttgctaaaattaaaatcttcataattgaattcaaaattaaagtatatgtcctcctattggagaaaaaaacaagcaccttaacaggacacaagttttaaaatagtgttttaaacatttgtaagatttttgtaaatgctctaaatgttttatttttgcattgtttttaccttgaaattgtataaacttttttactatgaaaatataagcattagacagctaactcaggttccattacaaccttaaagatacagataggcattataaacactctgctacagg

SEQ ID NO: 96078 - DNA, 3134 bp, Homo sapiens
gggaataatgacaaaaagaagacatgtgcagtgcagccaaagattttgtgaatattttcagtctgtggttagttgaatccatggatgcagcacccatagatatggagggctaactgtactaacattaagtgtaaataaatttctgattggcagtttatgtaagctggaaatgtttaagataatgttcaaataactgttctaaaatactttgtttcattttggtaagtccttgttttattttttaaaattatggaagttgaggtaatttactcttgttagatcaagttgctaatataattatttttacttttagaaactatgtcatggtcaaaaccagaaactaaagggacagtgccacttccacgaagccttcatacagccagtgttataggaaacaagatgtacatttttggtggatgggtcccacataagggggaaaatactgagacttcacctcatgattgtgaatggagatgtaccagttcattttcttacctaaatctggatacaacagagtggaccaccctagtatcagattctcaggaagataaaaaaaattcaagaccaagaccaagagctggccactgtgctgttgcaatcggcactcgattgtatttttggagtggaagagatggctacaaaaaagcactgaatagtcaagtttgctgcaaggatctttggtatcttgatactgagaaaccaccggcaccatctcaagtacagctgatcaaagccactaccaactcctttcatgtcaagtgggatgaagtgtctacagttgagggctatcttttgcagttgagtacagacttgccataccaagctgcatcatcagattcttcagcagcaccaaatatgcaaggagtcaggatggaccctcacagacaaggcagtaataacatcgttcctaacagtatcaatgatacaataaacagcacaaaaactgaacagccagccacaaaagaaacttcaatgaaaaacaaaccagactttaaagcactgacggattctaatgccattttatatccatctttggcatcaaatgcttctaatcataatagtcatgtggtggatatgctaaggaaaaatgaaggtcctcacacttcagcaaatgtaggtgttctaagtagttgcctggatgtaagaacagtaattcctgaaacatctgtatccagtactgtttccagcacacaaactatggtaacccagcagaccattaaaactgaatcatccagtacaaatggggcagttgttaaagatgaaacttcactaacaacattcagtaccaaatctgaagttgatgaaacatatgcactgcctgcaacgaagatcagccgtgtagagacacatgctacagcaacgccgttttctaaagagactccttcaaatccagtggccacagtgaaagcgggagaacgacaatggtgtgatgtgggaatttttaaaaataatacagctttggtgagccagttttatttgctgccaaaagggaagcaaagcatctcaaaggtaggaaatgcagatgtacctgactacagcttgcttaagaaacaagatcttgttccaggcacaggatacagattcagggttgctgcaatcaatggttgtgggataggtcctttcagcaaaatcagtgaatttaaaacttgtattcctggttttcctggagctccttctgcagtcagaatttcaaagaatgttgaaggtatccacctttcctgggaacctccaacctcaccttctggaaatattttggaatattcagcctacttggctatccgcacagcacagatacaagataatccaagtcaacttgtgttcatgaggatttattgtggtcttaagacatcatgtatagtaactgctgggcaacttgcaaatgcacatattgattatacatccaggcctgccattgtgttcaggatatcagcaaagaatgaaaagggatatggaccagctacacaagttcggtggcttcaaggtaacaataagaaagcacctttaaattgaattggtttttttactgaagctattgtgatgatgattatttattagtaactggttatgaagatttgtcatttaaaagagtattctctggctgtatttccagcagttatgaacttgagtttgtaaattgttcttaaaatgtatttgctgaattatagatccaaataaaagaaaagaagcaaagactctctgaaaattagtatatgagttcttccttacagatatagctcttttataaagaaaaacagtgaaattaagataaaagctagaaagctttattaccccaatatcttttataagggctgtgtaacccagtcatcctagagttattgagatgattctggtaactggctgttgtatactatgctgtcttatatagtaaatgttctctacattgtaaatgtcctacctttgagtactccttctatctttattctatatgagcagtgttcctctaacaactgtcttctattggataatatgtgtgatactataataattctaatagttatttgattcctttctttgtttacagttagcacagagcttaagaaattaaaaaagaggcaagtttagaaactgcttttgaacttttattattttccaagaatcatggtaaaatacaacaagaacaatgagttttcttgattcttaccaggccaatatatttgaatatatttttggccaaagcacttaacttatctggccctcattttcctcataacagatgagggagttaaagcagtttatcttttaggtccctttcagcactaaggttttgtgtttttagtagaagtgaagtatgtccctgaacattttcatctgtcttaatggctctaattttgcttttgctaaaattaaaatcttcataattgaattcaaaattaaagtatatgtcctcctattggagaaaaaaacaagcaccttaacaggacacaagttttaaaatagtgttttaaacatttgtaagatttttgtaaatgctctaaatgttttatttttgcattgtttttaccttgaaattgtataaacttttttactatgaaaatataagcattagacagctaactcaggttccattacaaccttaaagatacagataggcattataaacactctgctacagg

SEQ ID NO: 96079 - DNA, 2395 bp, Homo sapiens
ttggtcaggctgttcttgaactcctggcctcaggtgatctgctcgtcttggcctcccaaagtgctgggattacaggtgtgagccaccacgcccatccaggagcagctctttttttaaaagtgagtttcagcaaacagtattgaataaaagcatccttttcatatcttcatatactactttatgatgcaataatttactgttcctatacatattataaggtagaaaaaagtttttaaatccttataaagaggatgcagtttagaaggttaatatgtcagcttacccagacatattctatcaaggaaaacctagtggtagcaataaatctttggaaaggacttcttatactcatgtacctttaaaacatctaagcaatttaaaataatccctgttgagtttaaattcgagatgcatttaggtaaattggataaattcaacatttgaataaatccgtcaggttttagatggtgggattgatgaactttggtactttctcaatccaaaactaatttatttggaactagtacgttatggcttctcagtcatgaaaagctcagttatttggggtctacattttctcactgagagccttgatattttgccttctttgttatgcattataacttgactgtatcaccactgagtatctgctgtatcagaagttcagaagaaaaggtaaaactgaaatcagaatgggggtagaggaagttaaaaacaagttatttaaaaagaactcttggtttttggatgacttgaattctgttaaatctgtgttcttggccttgcacttccgttcctcttccatctctatccctgctagtcacaatggcattttagaactagaatgccactctgtagaggttttcccttttgctctgttgtgcctatttgtctaattcatatctttctgtggagtttcatatgtccttaatctaaagtaacttaaaattggaatggaagaacaagtttcagaattatttacagtcttatacatagaacttctagtgtaatgtttggttgtaaggagaatgtgaatttgcaggtaaatgaattgtatggcaaccagacagatccctggggtttgggagaaatagagcttgagatttgaaaaaaaggtacaaggtacaaaacaactctaactgccagtgccaaagggctaatttttaagcatgtaagctttaccacagtcttgaaaaaaatattaaccataggttcattcagctgttttatttaacccttagttccctggtggttgattttttttttaaatgggtctccagctttccagtgaaatgtgacactctcaatagaatgcataatgttggtttctaaagttacactccataattattgttattctgtagaaaactgtacagaaggtaaatagaatagcttcaatgggaatataatttaaatttttttaattttataaaaatttatttccattgcattaaaagaaatgggtagcatgtgtctttcagagaaaggagctatttggttattcactttgtcaatcttaggtttttttaaatctttaaacaatttcttctttgtgatgataaaaataatataaatttactgtttctgatcatgactgagtctattacttgtcatggcttttgtacgcaactgtgttttaaaaataccggttttgcctctttggttacatgtggtgagcatggatgtcaagattatttttcaactagattattcaatttgttttatatttcttatacttaatacttatgactacagtccaaatcagtcttttagaaggtgctcttgctaactgtggaatatttgacgacatgaaagtcctttttctttgctttcagtggttggctttcactgaaagaaagtgtaaaaaaagtcagaatttatagctttcactatgtccaagactaggactgggttataaagattttcttttgtgaaggaaaataaaagaaaatttgccactactgcatttactttactattgtaaacttaagattcattccttagtctttggaattttgatgtctcaaaaccagatgagtggaagtgctgaatttgcaaaataaagctaagaatgcttaactctgcactttaagttctactctgaccaaattgaagatgagcagagcagccctgaacagcattttgtttatacagtcttgtttaagaatagaatttttttaactcttcattttttgtctctgtggaagctgtgtaactctttttaaaatgcaatttaaaacattttgttattctaacaattctctcaaaaaacagcatttccaatggtaatcggtattgttacgctgtacttatgtattccctgtacctgaacacttgttgctgcctcacaagaaaatagaacttttatgttaaaaataaagtctgttcttcttga

SEQ ID NO: 96080 - DNA, 2713 bp, Homo sapiens
ttggtcaggctgttcttgaactcctggcctcaggtgatctgctcgtcttggcctcccaaagtgctgggattacaggtgtgagccaccacgcccatccaggagcagctctttttttaaaagtgagtttcagcaaacagtattgaataaaagcatccttttcatatcttcatatactactttatgatgcaataatttactgttcctatacatattataaggtagaaaaaagtttttaaatccttataaagaggatgcagtttagaaggttaatatgtcagcttacccagacatattctatcaaggaaaacctagtggtagcaataaatctttggaaaggacttcttatactcatgtacctttaaaacatctaagcaatttaaaataatccctgttgagtttaaattcgagatgcatttaggtaaattggataaattcaacatttgaataaatccgtcaggttttagatggtgggattgatgaactttggtactttctcaatccaaaactaatttatttggaactagtacgttatggcttctcagtcatgaaaagctcagttatttggggtctacattttctcactgagagccttgatattttgccttctttgttatgcattataacttgactgtatcaccactgagtatctgctgtatcagaagttcagaagaaaaggtaaaactgaaatcagaatgggggtagaggaagttaaaaacaagttatttaaaaagaactcttggtttttggatgacttgaattctgttaaatctgtgttcttggccttgcacttccgttcctcttccatctctatccctgctagtcacaatggcattttagaactagaatgccactctgtagaggttttcccttttgctctgttgtgcctatttgtctaattcatatctttctgtggagtttcatatgtccttaatctaaagtaacttaaaattggaatggaagaacaagtttcagaattatttacagtcttatacatagaacttctagtgtaatgtttggttgtaaggagaatgtgaatttgcaggtaaatgaattgtatggcaaccagacagatccctggggtttgggagaaatagagcttgagatttgaaaaaaaggtacaaggtacaaaacaactctaactgccagtgccaaagggctaatttttaagcatgtaagctttaccacagtcttgaaaaaaatattaaccataggttcattcagctgttttatttaacccttagttccctggtggttgattttttttttaaatgggtctccagctttccagtgaaatgtgacactctcaatagaatgcataatgttggtttctaaagttacactccataattattgttattctgtagaaaactgtacagaaggtaaatagaatagcttcaatgggaatataatttaaatttttttaattttataaaaatttatttccattgcattaaaagaaatgggtagcatgtgtctttcagagaaaggagctatttggttattcactttgtcaatcttaggtttttttaaatctttaaacaatttcttctttgtgatgataaaaataatataaatttactgtttctgatcatgactgagtctattacttgtcatggcttttgtacgcaactgtgttttaaaaataccggttttgcctctttggttacatgtggtgagcatggatgtcaagattatttttcaactagattattcaatttgttttatatttcttatacttaatacttatgactacagtccaaatcagtcttttagaaggtgctcttgctaactgtggaatatttgacgacatgaaagtcctttttctttgctttcagtggttggctttcactgaaagaaagtgtaaaaaaagtcagaatttatagctttcactatgtccaagactaggactgggttataaagattttcttttgtgaaggaaaataaaagaaaatttgccactactgcatttactttactattgtaaacttaagattcattccttagtctttggaattttgatgtctcaaaaccagatgagtggaagtgctgaatttgcaaaataaagctaagaatgcttaactctgcactttaagttctactctgaccaaattgaagatgagcagagcagccctgaacagcattttgtttatacagtcttgtttaagaatagaatttttttaactcttcattttttgtctctgtggaagctgtgtaactctttttaaaatgcaatttaaaacattttgttattctaacaattctctcaaaaaacagcatttccaatggtaatcggtattgttacgctgtacttatgtattccctgtacctgaacacttgttgctgcctcacaagaaaatagaacttttatgttaaaaataaagtctgttcttcttgagtttttttctgtgaatttttatgaatattgtccaaattcaagttacatttctttttggactggttatttatctagcttttaagcggtacattgtttttctcagactaatagaaaaatttgtttgtgttcagcagcaagttccttgctacccctcacctgccctagaactgaaagtacctgctctttggggtaagtgctaggcacacattaaaatataagcagcacagagagatacccacgcgtgaggaattcactgcttcagagttttgttagaggtaacttagctggggcagtcacttacattcattataaagtaca

SEQ ID NO: 96081 - DNA, 513 bp, Homo sapiens
gttcaatacaagtctcaaagggtgtttttggcttccatcccaacagcttctgttagaacaaatggaaaccatatagacataatgatacagtgagatgaagagatttatattgatcacaaagtagttcttagtacaagttctcaaaatctacttgttttgggataactccacgttgaggacctgtgtccccaagaaaaatataaaagaggctgggtgcggtgactcacacctgtaatcccagcaaattgggaagccaaagcaggagaatcgcttgagcccaggagttcgagaccagtctgggcaagatggcaagaccctgcctctaaaaaaatttaaaaaatttaaaaaattaggtgcacatggtggtgcatggtggtggatgcctgtagttccagctacttggtaggctgaggtcagaggcttgcctgagctcaggagttcaaggctgcagtgagctttgatcacttcactgcactccagcctgggtgacagagcaagaccctgtctctattt

SEQ ID NO: 96082 - DNA, 426 bp, Homo sapiens
tggtcccagctacttgggaggctgaggcaggaggattgcttgagcctgagaggtggaggctgcagtgaactatgatcgtgccactgcactccagcctaggtgacagagcaagaccctgtctaaaatagaaaaaggaatattcatccaggagccacccctctctcctgcatcatcttcccgggttgtatgtcatgaccatcagaatctaaatgggctctaatatattaaaccctccccacctacagccctccagctactgctccattatcttattgtcctctgcagcaagggcccatgaaaggactggctgcaccatcagcctccaaaattctcttttcttctctcttgaagccactccagtcaggcctttgactatgccactccttgaaacacctccagtgagttgtgcactgtgaaatccagcag

SEQ ID NO: 96083 - DNA, 427 bp, Homo sapiens
cagatttggaagttgactcaggaggccacgtgtagatcagagacagacagactcaaagcagggaggccattctggaaatgttgctgtagtccaggaagagaagatgcggcacaaaccttacagaaggaatagcagagcaagatcacatctccaccactgtcctcagttacccttcagccctgcagccgttttgcgcttacagaccaagctcagtctcacctcaggacctgtgtctagctgttgcctctgcttggaatgcccaaggttttaatgcaagtggctcatgccagtccttccctgacctctaaattagcccttccctctacatttagactgtcctgacctcacttccagtattgttacatcaccatatcgtccctggaccaccgtcacttgagattttctggtttggttttgtttgtttgtt

SEQ ID NO: 96084 - DNA, 575 bp, Homo sapiens
aaataagaacacctaggagtgaggcctggggcatgtccttttaaacaaactgccccttgtgattcttaggcactgtcaggtttgaggacggctgcctaaatggtgtcattgaggaactgaatgaaggccctcccgcttcgggctctctgttgccagaaatctctccttgctttggcttgctgcttgtttattcattgcagcaaacatttcttgagtcggtgtagagcctgtgaggcctgtgtaggatcagctatgcagactccaccctaaaaggagcctgaaaatggtcatgggtaaatcctgagaagggctgagaaaccccagactctgaccgggccactgggtaccaactacccgtgaacagattgtctggcttggggtagggggtggttagagagaggaagttcctctgactgaggaccaagatcccaaggcagcaggcacactgatcctgaccctgaccctcatctccagccctcagcagccagggtaaacaaatactcccctcactgggtatttgtagattacacaaagtaacctaggtgctgactgctgaaaatatacactcccttccc

SEQ ID NO: 96085 - DNA, 315 bp, Homo sapiens
caagagaaaaatcttcaaagctgtagcacagatgcttgataaaagcataatgcttcaaaggacaagttttaaggggcatccctgaatgttttgtggcctttcttcccaatgaagatgaaataaaaacattccacagctggatttttttctgaacagaatgccctgaagccaatggaaaaccagttaacccaaaagttcaggaatgggatgattctgatcattggaatagtcattaaattaatcaaccagaacttcctttttgattcaactctgattggttgattaactttattagagatctttttattttttttg

SEQ ID NO: 96086 - DNA, 544 bp, Homo sapiens
agccaaaagatgaaaacaacccaggtgttcatcaaaagatgaacggataaatgaattgtggtattacatataatagaatattattcaggcataaaaagcaataaagttctgatatatactacaacatgcatgaactgagaagacattaggctaaatgaaaaaagccatgcacaaaaggagaattattgtgtggctgcacttacatgaaatatttacaataggaaaatttataaagatagaaagtagattaaaggttaccagggattatgggaaggaagaaatggggagttattgcttaaaggttacagagtttctggggtgatgaaaaagttttaaaaacaggtagtagtgataattgtacaacattgtgaatataattaataccaatgaactgtacacttaaaaatggctaaattagggccaggcacggtggctcatgcctataatcccaacacttagggaggctgcggtgggcagatcacctaaggtcaggagttggaggccagcttggctaacatggtgaaaccctgtctctactacaata

SEQ ID NO: 96087 - DNA, 573 bp, Homo sapiens
ctccacctcctgggttcaagcaattctcctgcctcagcctgccaagtagctgggattatgggaatgagccaccatgcccggctaagttttgtagttttagtagagataggatttcaccatgttggccaggctggtcttgaactcctgacctcaggtgatctgcccgcctcggcctcccaaagtgcttggattacaggcgtgaactactgcacctggcctgttttatcttttatatatagatgggatctcactttgttgcccaggatagtctcaaactctggagctcaagcagtcctcctgccttggcctcccgaagtgctgagattacaggcatgagctaccacacccagccagaaatgtactttataaattccttaatgttattgaccaaattaggcaattttacacgaccttaatgccaaagtcacttatttacagtaccaaatcatgatatagcagccaagccctgttagaatttgtcagtttaaattcttctgaaatacgtagttcagatgttttccttctcttcattgttctcttcactggtcatggaaacgtcattgctaattcccc

SEQ ID NO: 96088 - DNA, 4458 bp, Homo sapiens
  misc_feature (353)..(353): n is a, c, g, or t
  misc_feature (1830)..(1830): n is a, c, g, or t
  misc_feature (1925)..(1925): n is a, c, g, or t
ctagtctataccagcaacgactcctacatcgtccactctggggatcttagaaagatccataaagctgcctcccggggacaagtccggaagctggagaagatgacaaagaggaagaagaccatcaaccttaatatacaagacgcccagaagaggactgctctacactgggcctgtgtcaatggccatgaggaagtagtaacatttctggtagacagaaagtgccagcttgacgtccttgatggcgaacacaggacacctctgatgaaggctctacaatgccatcaggaggcttgtgcaaatattctgatagattctggtgccgatataaatctcgtagatgtgtatggcaacanggctctccattatgctgtttatagtgagattttgtcagtggtggcaaaactgctgtcccatggtgcagtcatcgaagtgcacaacaaggctagcctcacaccacttttactatccataacgaaaagaagtgagcaaattgtggaatttttgctgataaaaaatgcaaatgcgaatgcagttaataagtataaatgcacagccctcatgcttgctgtatgtcatggatcatcagagatagttggcatgcttcttcagcaaaatgttgacgtctttgctgcagatatatgtggagtaactgcagaacattatgctgttacttgtggatttcatcacattcatgaacaaattatggaatatatacgaaaattatctaaaaatcatcaaaataccaatccagaaggaacatctgcaggaacacctgatgaggctgcacccttggcggaaagaacacctgacacagctgaaagcttggtggaaaaaacacctgatgaggctgcacccttggtggaaagaacacctgacacggctgaaagcttggtggaaaaaacacctgatgaggctgcatccttggtggagggaacatctgacaaaattcaatgtttggagaaagcgacatctggaaagttcgaacagtcagcagaagaaacacctagggaaattacgagtcctgcaaaagaaacatctgagaaatttacgtggccagcaaaaggaagacctaggaagatcgcatgggagaaaaaagaagacacacctagggaaattatgagtcccgcaaaagaaacatctgagaaatttacgtgggcagcaaaaggaagacctaggaagatcgcatgggagaaaaaagaaacacctgtaaagactggatgcgtggcaagagtaacatctaataaaactaaagttttggaaaaaggaagatctaagatgattgcatgtcctacaaaagaatcatctacaaaagcaagtgccaatgatcagaggttcccatcagaatccaaacaagaggaagatgaagaatattcttgtgattctcggagtctctttgagagttctgcaaagattcaagtgtgtatacctgagtctatatatcaaaaagtaatggagataaatagagaagtagaagagcctcctaagaagccatctgccttcaagcctgccattgaaatgcaaaactctgttccaaataaagcctttgaattgaagaatgaacaaacattgagagcagatccgatgttcccaccagaatccaaacaaaaggactatgaagaaaattcttgggattctgagagtctctgtgagactgtttcacagaaggatgtgtgtttacccaaggctacacatcaaaaagaaatagataaaataaatggaaaattagaagagtctcctaataaagatggtcttctgaaggctacctgcggaatgaaagtttctattccaactaaagccttagaattgaaggacatgcaaactttcaaagcngagcctccggggaagccatctgccttcgagcctgccactgaaatgcaaaagtctgtcccaaataaagccttggaattgaaaaatgaacaaacatngagagcagatgagatactcccatcagaatccaaacaaaaggactatgaagaaaattcttgggatactgagagtctctgtgagactgtttcacagaaggatgtgtgtttacccaaggctgcgcatcaaaaagaaatagataaaataaatggaaaattagaagggtctcctgttaaagatggtcttctgaaggctaactgcggaatgaaagtttctattccaactaaagccttagaattgatggacatgcaaactttcaaagcagagcctcccgagaagccatctgccttcgagcctgccattgaaatgcaaaagtctgttccaaataaagccttggaattgaagaatgaacaaacattgagagcagatgagatactcccatcagaatccaaacaaaaggactatgaagaaagttcttgggattctgagagtctctgtgagactgtttcacagaaggatgtgtgtttacccaaggctacacatcaaaaagaaatagataaaataaatggaaaattagaagagtctcctgataatgatggttttctgaaggctccctgcagaatgaaagtttctattccaactaaagccttagaattgatggacatgcaaactttcaaagcagagcctcccgagaagccatctgccttcgagcctgccattgaaatgcaaaagtctgttccaaataaagccttggaattgaagaatgaacaaacattgagagcagatcagatgttcccttcagaatcaaaacaaaagaaggttgaagaaaattcttgggattctgagagtctccgtgagactgtttcacagaaggatgtgtgtgtacccaaggctacacatcaaaaagaaatggataaaataagtggaaaattagaagattcaactagcctatcaaaaatcttggatacagttcattcttgtgaaagagcaagggaacttcaaaaagatcactgtgaacaacgtacaggaaaaatggaacaaatgaaaaagaagttttgtgtactgaaaaagaaactgtcagaagcaaaagaaataaaatcacagttagagaaccaaaaagttaaatgggaacaagagctctgcagtgtgagattgactttaaaccaagaagaagagaagagaagaaatgccgatatattaaatgaaaaaattagggaagaattaggaagaatcgaagagcagcataggaaagagttagaagtgaaacaacaacttgaacaggctctcagaatacaagatatagaattgaagagtgtagaaagtaatttgaatcaggtttctcacactcatgaaaatgaaaattatctcttacatgaaaattgcatgttgaaaaaggaaattgccatgctaaaactggaaatagccacactgaaacaccaataccaggaaaaggaaaataaatactttgaggacattaagattttaaaagaaaagaatgctgaacttcagatgaccctaaaactgaaagaggaatcattaactaaaagggcatctcaatatagtgggcagcttaaagttctgatagctgagaacacaatgctcacttctaaattgaaggaaaaacaagacaaagaaatactagaggcagaaattgaatcacaccatcctagactggcttctgctgtacaagaccatgatcaaattgtgacatcaagaaaaagtcaagaacctgctttccacattgcaggagatgcttgtttgcaaagaaaaatgaatgttgatgtgagtagtacgatatataacaatgaggtgctccatcaaccactttctgaagctcaaaggaaatccaaaagcctaaaaattaatctcaattatgcaggagatgctctaagagaaaatacattggtttcagaacatgcacaaagagaccaacgtgaaacacagtgtcaaatgaaggaagctgaacacatgtatcaaaacgaacaagataatgtgaacaaacacactgaacagcaggagtctctagatcagaaattatttcaactacaaagcaaaaatatgtggcttcaacagcaattagttcatgcacataagaaagctgacaacaaaagcaagataacaattgatattcattttcttgagaggaaaatgcaacatcatctcctaaaagagaaaaatgaggagatatttaattacaataaccatttaaaaaaccgtatatatcaatatgaaaaagagaaagcagaaacagaaaactcatgagagacaagcagtaagaaacttcttttggagaaacaacagaccagatctttactcacaactcatgctaggaggccagtcctagcatcaccttatgttgaaaatcttaccaatagtctgtgtcaacagaatacttattttagaagaaaaattcatgatttcttcctgaagcctacagacataaaataacagtgtgaagaattacttgttcacgaattgcataaagctgcacaggattcccatctaccctgatgatgcagcagacatcattcaatccaaccagaatctcgctctgcactccagcctaggtgacagagtgagactccacctcggaaa

SEQ ID NO: 96089 - DNA, 2560 bp, Homo sapiens
caggaaggagtagagtgaactcacttcagatgcatgtagattatttgcactccagaagtgtagacggtgggcactccagagactaccagaagtgggggaaccacagtgactcattaggtttctctgttacaatcagagcctcccgagaagccatctgccttcgagcctgccattgaaatgcaaaagtctgttccaaataaagccttggaattgaagaatgaacaaacattgagagcagatgagatactcccatcagaatccaaacaaaaggactatgaagaaagttcttgggattctgagagtctctgtgagactgtttcacagaaggatgtgtgtttacccaaggctacacatcaaaaagaaatagataaaataaatggaaaattagaagagtctcctgataatgatggttttctgaaggctccctgcagaatgaaagtttctattccaactaaagccttagaattgatggacatgcaaactttcaaagcagagcctcccgagaagccatctgccttcgagcctgccattgaaatgcaaaagtctgttccaaataaagccttggaattgaagaatgaacaaacattgagagcagatcagatgttcccttcagaatcaaaacaaaagaaggttgaagaaaattcttgggattctgagagtctccgtgagactgtttcacagaaggatgtgtgtgtacccaaggctacacatcaaaaagaaatggataaaataagtggaaaattagaagattcaactagcctatcaaaaatcttggatacagttcattcttgtgaaagagcaagggaacttcaaaaagatcactgtgaacaacgtacaggaaaaatggaacaaatgaaaaagaagttttgtgtactgaaaaagaaactgtcagaagcaaaagaaataaaatcacagttagagaaccaaaaagttaaatgggaacaagagctctgcagtgtgagattgactttaaaccaagaagaagagaagagaagaaatgccgatatattaaatgaaaaaattagggaagaattaggaagaatcgaagagcagcataggaaagagttagaagtgaaacaacaacttgaacaggctctcagaatacaagatatagaattgaagagtgtagaaagtaatttgaatcaggtttctcacactcatgaaaatgaaaattatctcttacatgaaaattgcatgttgaaaaaggaaattgccatgctaaaactggaaatagccacactgaaacaccaataccaggaaaaggaaaataaatactttgaggacattaagattttaaaagaaaagaatgctgaacttcagatgaccctaaaactgaaagaggaatcattaactaaaagggcatctcaatatagtgggcagcttaaagttctgatagctgagaacacaatgctcacttctaaattgaaggaaaaacaagacaaagaaatactagaggcagaaattgaatcacaccatcctagactggcttctgctgtacaagaccatgatcaaattgtgacatcaagaaaaagtcaagaacctgctttccacattgcaggagatgcttgtttgcaaagaaaaatgaatgttgatgtgagtagtacgatatataacaatgaggtgctccatcaaccactttctgaagctcaaaggaaatccaaaagcctaaaaattaatctcaattatgcaggagatgctctaagagaaaatacattggtttcagaacatgcacaaagagaccaacgtgaaacacagtgtcaaatgaaggaagctgaacacatgtatcaaaacgaacaagataatgtgaacaaacacactgaacagcaggagtctctagatcagaaattatttcaactacaaagcaaaaatatgtggcttcaacagcaattagttcatgcacataagaaagctgacaacaaaagcaagataacaattgatattcattttcttgagaggaaaatgcaacatcatctcctaaaagagaaaaatgaggagatatttaattacaataaccatttaaaaaaccgtatatatcaatatgaaaaagagaaagcagaaacagaaaactcatgagagacaagcagtaagaaacttcttttggagaaacaacagaccagatctttactcacaactcatgctaggaggccagtcctagcatcaccttatgttgaaaatcttaccaatagtctgtgtcaacagaatacttattttagaagaaaaattcatgatttcttcctgaagcctacagacataaaataacagtgtgaagaattacttgttcacgaattgcataaagctgcacaggattcccatctaccctgatgatgcagcagacatcattcaatccaaccagatggcacgagcccgggaggcagagcttgcagtgatccgagatcacaccactgcactccaggctgggcgaaagagcgagactccgtctcataaattaaaaccaaaaccaaaaaccaaaaaataaacccttatctggctttccattgcacttaaaataaaaactacactcatctaacatggcctaccagggcctgcctgatctcttcct

SEQ ID NO: 96090 - DNA, 384 bp, Homo sapiens
tataaagtccagaggctttgacttggttttcttaccactgcctatgctcagaagaaattctgatatttctaaaaacatacttggctgggcacggtgactcatgcctgtaatcccagcacttcggaaggcccgaggtgggaggatcacctgagttcaggagtttgagaccagcctggctaatatggtgaaaccctgtctgtactaaaaatacaaaattagttgggtgtggtggcatacccctgtaatcccagctactgaggaggctgaggcaggagaatcacttgaacccgggaggtggaggttgcagtgagctgagatcgtgccattgcactcagatcgggccattgcactccagtctgggtgacagagtgagactctgtctcc

SEQ ID NO: 96091 - DNA, 307 bp, Homo sapiens
attgcagctctaaccatttgactatagaagtggttgtggttatctaccaatagaatatacaggctatagaagtaagtccacagattcatgaatgaaaatagatttgtatatgttttaaaaatttataataagaaatgttatcatgaatatatctgtgattaactttttatagatcagaggttcccatcagaatccaaacaagaggaagatgaagaatattcttgtgattctcgggtattgtgtattattgatgttattctctaaaaatattaatattgagtgatgtgaaaatataaagtccagaggc

SEQ ID NO: 96092 - DNA, 2368 bp, Homo sapiens
gctcgctctagaggatccactcgcgttttgataggattgagagcagatgagatactcccatcagaatccaaacaaaaggactatgaagaaagttcttgggattctgagagtctctgtgagactgtttcacagaaggatgtgtgtttacccaaggctacacatcaaaaagaaatagataaaataaatggaaaattagaagagtctcctgataatgatggttttctgaaggctccctgcagaatgaaagtttctattccaactaaagccttagaattgatggacatgcaaactttcaaagcagagcctcccgagaagccatctgccttcgagcctgccattgaaatgcaaaagtctgttccaaataaagccttggaattgaagaatgaacaaacattgagagcagatcagatgttcccttcagaatcaaaacaaaagaaggttgaagaaaattcttgggattctgagagtctccgtgagactgtttcacagaaggatgtgtgtgtacccaaggctacacatcaaaaagaaatggataaaataagtggaaaattagaagattcaactagcctatcaaaaatcttggatacagttcattcttgtgaaagagcaagggaacttcaaaaagatcactgtgaacaacgtacaggaaaaatggaacaaatgaaaaagaagttttgtgtactgaaaaagaaactgtcagaagcaaaagaaataaaatcacagttagagaaccaaaaagttaaatgggaacaagagctctgcagtgtgagattgactttaaaccaagaagaagagaagagaagaaatgccgatatattaaatgaaaaaattagggaagaattaggaagaatcgaagagcagcataggaaagagttagaagtgaaacaacaacttgaacaggctctcagaatacaagatatagaattgaagagtgtagaaagtaatttgaatcaggtttctcacactcatgaaaatgaaaattatctcttacatgaaaattgcatgttgaaaaaggaaattgccatgctaaaactggaaatagccacactgaaacaccaataccaggaaaaggaaaataaatactttgaggacattaagattttaaaagaaaagaatgctgaacttcagatgaccctaaaactgaaagaggaatcattaactaaaagggcatctcaatatagtgggcagcttaaagttctgatagctgagaacacaatgctcacttctaaattgaaggaaaaacaagacaaagaaatactagaggcagaaattgaatcacaccatcctagactggcttctgctgtacaagaccatgatcaaattgtgacatcaagaaaaagtcaagaacctgctttccacattgcaggagatgcttgtttgcaaagaaaaatgaatgttgatgtgagtagtacgatatataacaatgaggtgctccatcaaccactttctgaagctcaaaggaaatccaaaagcctaaaaattaatctcaattatgcaggagatgctctaagagaaaatacattggtttcagaacatgcacaaagagaccaacgtgaaacacagtgtcaaatgaaggaagctgaacacatgtatcaaaacgaacaagataatgtgaacaaacacactgaacagcaggagtctctagatcagaaattatttcaactacaaagcaaaaatatgtggcttcaacagcaattagttcatgcacataagaaagctgacaacaaaagcaagataacaattgatattcattttcttgagaggaaaatgcaacatcatctcctaaaagagaaaaatgaggagatatttaattacaataaccatttaaaaaaccgtatatatcaatatgaaaaagagaaagcagaaacagaaaactcatgagagacaagcagtaagaaacttcttttggagaaacaacagaccagatctttactcacaactcatgctaggaggccagtcctagcatcaccttatgttgaaaatcttaccaatagtctgtgtcaacagaatacttattttagaagaaaaattcatgatttcttcctgaagcctacagacataaaataacagtgtgaagaattacttgttcacgaattgcataaagctgcacaggattcccatctaccctgatgatgcagcagacatcattcaatccaaccagatggcacgagcccgggaggcagagcttgcagtgatccgagatcacaccactgcactccaggctgggcgaaagagcgagactccgtctcataaattaaaaccaaaaccaaaaaccaaaaaataaacccttatctggctttccattgcacttaaaataaaaactacactcatctaacatggcctaccagggcctgcctgatctcttcct

SEQ ID NO: 96093 - DNA, 532 bp, Homo sapiens
ctgctttcagctcaccttggacaccttgtaaaatgaggggtggtaaaataatagctatgtcacagggtatagagagaattacataattagatgtatatgaaagcatcattaaaaaaaaatcaggcacaggcattgttagcgccctctgcttgtctgcttgtcatctacaaataactgaatttaacagggaaggctcctctttgcagtttttgcagggagaatgtttcaaggtcattagccctcaatgaccagaacctgaggtcttttgatggctttttggcttaccacagtctgctcatcagggttgagtttcctccttacggtgcaaattcccagcatatcctctgttcctctttgtagaaacactatatgggtcattctctccctgttcgggtatttctgcctagtgagtggagggaggcaggtgtacatggagcagggactactgaagcagggccagaggtgtgtgcctaacacagccctcataacagccatgggtcatgcagaaaggagaaaaaaaggaaaagaaaaa

SEQ ID NO: 96094 - DNA, 119 bp, Homo sapiens
aaaatgttttagtgataataatgcatttgaccatatgaataaagcaatttcctgatagtaactgcattcttaaattttaccttgctcttaaaactggaaggacacagtttattgtgagg

SEQ ID NO: 96095 - DNA, 308 bp, Homo sapiens
ggcccaaggcacagcaggtcaggtgggcagggatgaggctctaggagaacaagagagcggggacactgagcaaggccagaagtggcgggaagtggctgtgggaacatttgggcagaaaattatccctggtgtggagtgactgtggccacaccacctgtctgttcactggacttttctgaagctgggtcccccagggcttcaggggcttgggggagcacctgactcagctgctggatgcaaagtggattcctgagcagcgaggtgtgggctggagtttggatctggctgggtggagatctttgggactt

SEQ ID NO: 96096 - DNA, 532 bp, Homo sapiens
gcagtcaggagaggaaacctctctctttctcttcctgctagtacccatacactcacttttcttttggtgagagcctacctcggtttttttctaggggccccctcctcccgctccccagctccagcgtcaggccatggctgagttaaatcatgtatcaccctgtggcgtggcttcagtgagcaagaccctcctgaggcagtgaggctgggcggctatttgctgggccttctgggaaaccagaaacgtgctcttcctttggagaagctaccgggagggaattcctttctcctcggaaagggatgctgagctgccactgccatcacatcaggcctctcgacctcagctctactgacatttggactgggccattctttcttctgacatttggactgggccactcttcgtcacagcagctgtcctgtgcactgctggatgttgagcagcacgtctgcctctagccactggatgccagtagcgccccctcctcagttgggacaaccaaaaatgctccaaacgttgccacatgttccct

SEQ ID NO: 96097 - DNA, 1050 bp, Homo sapiens
tttgtgtgcagtttgctaccgtgataagaaaataactaatacaataagctaatcgcagtctatattccatttgctatcagctattcccaaatacacaaccaggatgcattaaaatgcatttcgaatacgctgacaatgtatcataatgcaaagtacttttacatggtataatactattgcagacactgtataatgaacaacagtggttttcctgtaaaggaaataatggcagcaacttccaagaaatgtatttaacggagcttcagagaatcagtagtgtgtatgtgtagcatggcccgggtatcagcccgtggtgtaggtttttaatcccatgtcatcataactttgcttttgtaacagttctggaaaaatacagaaaagcagtacgaagtcctctgtgtgtcccattagtaactatgcacaatcattttgtaatgagaatatatgagtatattaaacatgcttttactttcctaaaagaagttgcttagaatggggggaaaaactctctccaagtgtaactctccattgataaattcccctcatttcctcatttccctctcctgccagcacccggttaactctctaataaaaattgaccagatttaaaaaactccatttagtggttcctgcgtaaagagatggtattttggtcactttaatttgcatgagatgttatctgaaatcgaccactaattcttccttctcacagccccccatcccattcctctctttacaaaccgcgtaactacatactatccaggacaatataaaagtgacctcaatactcctattgcaatcaatgaaatatggtgaacagtacaggtttgtctttcattgctccctgccttgaaaggtgtgggtagaggaagaaaaatctcccttacaaactatttctccagttacaagtctttgtccagaagcaaaagaaggttttaacgttacagtacttattctaatagaattttaattgccctaatcctgctaaagtgtgaagctgagtgtgtgtgtgtgtgtgtctgtgcatgtattcctaatagggaggggagt

SEQ ID NO: 96098 - DNA, 401 bp, Homo sapiens
atgagggggaagagctggccccaaaggggtgctcagtgggctcacttcacatcctctccgattttgtctaagtcttggttccctttccaataagggagaaacagagaacaaagagtgtatcagctgccccaaacctctcagcagccatccattacccatatgtgtgtattatttatgccttttctattccaaaaatgactcaaggctgtaattgagcagcttggttctctgttgcagtattccttttccctggcttctgacaccttagagacatatatattcctttggatattcaattatgtctctcaggttggattcttttaattatagaagagatgacttaagcccaaataaggtgctctaatcagtgctggaacacttagcagaccttcctctggttc

SEQ ID NO: 96099 - DNA, 7448 bp, Homo sapiens
ctgtctacggcagctattccagaggcaacaactgcttccctctgttctcatctccccattggtggctggcgacccgaatttgggaatggggagattgcccacctgttatctttgagcagactaatctcttgtaagcagaagtgccattcggagtctccagagccctgtggcttggggctgggaatgtccccctgacttcaggctttcctaagtgtattgcttttctctgagaatggtctaggtttttaattttttaattgtaagaatctgtaatacagcatttttatttcggtcttattcgttgtgctcaaaggcaggaaacaactattaatttgccttctcgaatcttaatagttataagattcattctctttcattgctctgctaggcataaaacacacttcgaacatgggtaactcattcgactgtggagttcttttaattcttatgaaagatttcaaatcctctggaagccaaaatgggacacagtaaacagattcgaattttacttctgaacgaaatggagaaactggaaaagaccctcttcagacttgaacaagggtatgagctacagttccgattaggcccaactttacagggaaaagcagttaccgtgtatacaaattacccatttcctggagaaacatttaatagagaaaaattccgttctctggattgggaaaatccaacagaaagagaagatgattctgataaatactgtaaacttaatctgcaacaatctggttcatttcagtattatttccttcaaggaaatgagaaaagtggtggaggttacatagttgtggaccccattttacgtgttggtgctgataatcatgtgctacccttggactgtgttactcttcagacatttttagctaagtgtttgggaccttttgatgaatgggaaagcagacttagggttgcaaaagaatcaggctacaacatgattcattttaccccattgcagactcttggactatctaggtcatgctactcccttgccaatcagttagaattaaatcctgacttttcaagacctaatagaaagtatacctggaatgatgttggacagctagtggaaaaattaaaaaaggaatggaatgttatttgtattactgatgttgtctacaatcatactgctgctaatagtaaatggatccaggaacatccagaatgtgcctataatcttgtgaattctccacacttaaaacctgcctgggtcttagacagagcactttggcgtttctcctgtgatgttgcagaagggaaatacaaagaaaagggaatacctgctttgattgaaaatgatcaccatatgaattccatccgaaaaataatttgggaggatatttttccaaagcttaaactctgggaatttttccaagtagatgtcaacaaagcggttgagcaatttagaagacttcttacacaagaaaataggcgagtaaccaagtctgatccaaaccaacaccttacgattattcaagatcctgaatacagacggtttggctgtactgtagatatgaacattgcactaacgactttcataccacatgacaaggggccagcagcaattgaagaatgctgtaattggtttcataaaagaatggaggaattaaattcagagaagcatcgactcattaactatcatcaggaacaggcagttaattgccttttgggaaatgtgttttatgaacgactggctggccatggtccaaaactaggacctgtcactagaaagcatcctttagttaccaggtattttactttcccatttgaagagatagacttctccatggaagaatctatgattcatctgccaaataaagcttgttttctgatggcacacaatggatgggtaatgggagatgatcctcttcgaaactttgctgaaccgggttcagaagtttacctaaggagagaacttatttgctggggagacagtgttaaattacgctatgggaataaaccagaggactgtccttatctctgggcacacatgaaaaaatacactgaaataactgcaacttatttccagggagtacgtcttgataactgccactcaacacctcttcacgtagctgagtacatgttggatgctgctaggaatttgcaacccaatttatatgtagtagctgaactgttcacaggaagtgaagatctggacaatgtctttgttactagactgggcattagttccttaataagagaggcaatgagtgcatataatagtcatgaagagggcagattagtttaccgatatggaggagaacctgttggatcctttgttcagccctgtttgaggcctttaatgccagctattgcacatgccctgtttatggatattacgcatgataatgagtgtcctattgtgcatagatcagcgtatgatgctcttccaagtactacaattgtttctatggcatgttgtgctagtggaagtacaagaggctatgatgaattagtgcctcatcagatttcagtggtttctgaagaacggttttacactaagtggaatcctgaagcattgccttcaaacacaggtgaagttaatttccaaagcggcattattgcagccaggtgtgctatcagtaaacttcatcaggagcttggagccaagggttttattcaggtgtatgtggatcaagttgatgaagacatagtggcagtaacaagacactcacctagcatccatcagtctgttgtggctgtatctagaactgctttcaggaatcccaagacttcattttacagcaaggaagtgcctcaaatgtgcatccctggcaaaattgaagaagtagttcttgaagctagaactattgagagaaacacgaaaccttataggaaggatgagaattcaatcaatggaacaccagatatcacagtagaaattagagaacatattcagcttaatgaaagtaaaattgttaaacaagctggagttgccacaaaagggcccaatgaatatattcaagaaatagaatttgaaaacttgtctccaggaagtgttattatattcagagttagtcttgatccacatgcacaagtcgctgttggaattcttcgaaatcatctgacacaattcagtcctcactttaaatctggcagcctagctgttgacaatgcagatcctatattaaaaattccttttgcttctcttgcctccagattaactttggctgagctaaatcagatcctttaccgatgtgaatcagaagaaaaggaagatggtggagggtgctatgacataccaaactggtcagcccttaaatatgcaggtcttcaaggtttaatgtctgtattggcagaaataagaccaaagaatgacttggggcatcctttttgtaataatttgagatctggagattggatgattgactatgtcagtaaccggcttatttcacgatcaggaactattgctgaagttggtaaatggttgcaggctatgttcttctacctgaagcagatcccacgttaccttatcccatgttactttgatgctatattaattggtgcatataccactcttctggatacagcatggaagcagatgtcaagctttgttcagaatggttcaacctttgtgaaacacctttcattgggttcagttcaactgtgtggagtaggaaaattcccttccctgccaattctttcacctgccctaatggatgtaccttataggttaaatgagatcacaaaagaaaaggagcaatgttgtgtttctctagctgcaggcttacctcatttttcttctggtattttccgctgctggggaagggatacttttattgcacttagaggtatactgctgattactggacgctatgtagaagccaggaatattattttagcatttgcgggtaccctgaggcatggtctcattcctaatctactgggtgaagggatttatgccagatacaattgtcgggatgctgtgtggtggtggctgcagtgtatccaggattactgtaaaatggttccaaatggtctagacattctcaagtgcccagtttccagaatgtatcctacagatgattctgctcctttgcctgctggcacactggatcagccattgtttgaagtcatacaggaagcaatgcaaaaacacatgcagggcatacagttccgagaaaggaatgctggtccccagatagatcgaaacatgaaggacgaaggttttaatataactgcaggagttgatgaagaaacaggatttgtttatggaggaaatcgtttcaattgtggcacatggatggataaaatgggagaaagtgacagagctagaaacagaggaatcccagccacaccaagagatgggtctgctgtggaaattgtgggcctgagtaaatctgctgttcgctggttgctggaattatccaaaaaaaatattttcccttatcatgaagtcacagtaaaaagacatggaaaggctataaaggtctcatatgatgagtggaacagaaaaatacaagacaactttgaaaagctatttcatgtttccgaagacccttcagatttaaatgaaaagcatccaaatctggttcacaaacgtggcatatacaaagatagttatggagcttcaagtccttggtgtgactatcagctcaggcctaattttaccatagcaatggttgtggcccctgagctctttactacagaaaaagcagggaaagctttggagattgcagaaaaaaaattgcttggtccccttggcatgaaaactttagatccagatgatatggtttactgtggaatttatgacaatgcattagacaatgacaactacaatcttgctaaaggtttcaattatcaccaaggacctgagtggctgtggcctattgggtattttcttcgtgcaaaattatatttttccagattgatgggcccggagactactgcaaagactatagttttggttaaaaatgttctttcccgacattatgttcatcttgagagatccccttggaaaggacttccagaactgaccaatgagaatgcccagtactgtcctttcagctgtgaaacacaagcctggtcaattgctactattcttgagacactttatgatttatagtttattacagatattaagtatgcaattacttgtattataggatgcaaggtcatcatatgtaaatgccttatatgcacaggctcaagttgttttaaaaatctcatttattataatattgatgctcaattaggtaagattgtaaaagcattgattttttttaatgtacagaggtagatttcaatttgaatcagaaagaaatatcattaccaatgaaatgtgtttgagttcagtaagaattattcaaatgcctagaaatccatagtttggaaaataaaaatcatgtcatcttctatttgtacagaaatgaaaataaaatatgaaaataatgaaagaaatgaaaagatagcttttaattgtggtatatataatcttcagtaacaatacatactgaatacgctgtggttcattaatattaacaccacgtactatagtattcttagaatacagtgctcactgcatttaataaatatttaataaatgatgaatgatagaagtttccatctacaatatatgttcctaaatggagcacagatgttcaaactatgctttcattttttcactgatatattaatttttgtgtaatgaatgccaacagtatattttatatgatttacttatgtgaggaaacatgcaaagcattaggaaatttatttcctaaaaacagttttgtaaaattagtattgagttctattgagtattataagatagcttacattttcaaaatggaaattgtcggtcatatttctagaactttaaagaaaaaagaatgttatattagttttctaaaactcaactatctttagtcatgttcaaaaatctattgctagatcatagtagatactggttttctattaactcaaaacctacattgacaagtttaacattgagaagaatcttaacaaaaatatggatatgaattcagtagatatcttaaattcaataaaatcactggaagtttttcatgataacttattttaagatgccttaaaaatcttaaagtcacaaaaggaaaaaggtttttaacatttacatgagttaacattttttcatagaacttatttcctagatagaattttttactgttttttactgttttcttaagaaaacagttaaatcattatgcattcagttggaagaaagtagtggcaagaattctttcattgctatataatattcagtggctcatttatacctaataaaataatggtattttaaaataatgctactttcaaagtagcatttttttagttagtttacaggttacatacccaaaaccttaactatgactaagaaattaaagaagaaaaccagcaaactaaaacttctgggcagcaaaaatatataaatgcttcagatgtcaaatacccatgcttgaaagctcgtgtaatttactttaagattatctgcctgctcttcttcaaagctgaccttgctttagaaatagttttaactagcttagttttctggtttccaaaactaaaatagattaaatcctacaaatttaaggacagttgtgacagtaatctgaccactatctataaatacattggacattggtttccaaatctccctttcttcttcagttccttccttgttcaatatatacccttctctaaactgtgcgggtaaaaggaatgactgtccttgagagaaccattagtttatcaaaggtttatgtagttttgttgctgtaccctaactttgatattcagggaggtaggaaaggtaacagaaaaccagcatatttaatcaaagcaagaagtaatcgctgacagttaaatgtgaccaaaaaaattaaaagttcacaatttttttaatgtagccatttggggttatctctagtaaggcagatacccacgttggtaaatttttaggatattgtgttgcactagaaaactaagtggttcatatttctaatgaggaagattaatgaaagaacattgttatattctgcgtggtatattttaaagtttaagaaggcatgttaaacattatttcctctatggtagttaaaatacagaattagatttttaacaggtgtcatttgactaaacgtttcggtagaatgcttcatacttgagtgatgctggataaggtattgtatttcaacaatggactatgccttggtttttcactaatcaaaatcaaaattactctttaacatgataaatgaatttaccagtttagtatgctgtggtattttaataagttttcaaagataattgggaaaacatgagactggtcatattgatgaatattgtaacatgtgaattgtgatccatttctgatatgtcttgaactactgtgtctagtgggcaaatgtcattgttacctctgtgtgttaagaaaataaaaatattttctaaaggtc

SEQ ID NO: 96100 - DNA, 7370 bp, Homo sapiens
cccggaagtgggccagaggtacggtccgctcccacctggggcgagtgcgcgcacggccaggttgggtaccgggtgcgcccaggaacccgcgcgaggcgaagtcgctgagactctgcctgcttctcacccagctgcctcggcgctgccccggtcgctcgccgcccctccctttgcccttcacggcgcccggccctccttgggctgcggcttctgtgcgaggctgggcagccagcccttccccttctgtttctccccgtcccctccccccgaccgtagcaccagagtcgcgggtcctgcagtgccccagaagccgcacgtataactccctcggcgggtaactcattcgactgtggagttcttttaattcttatgaaagatttcaaatcctctggaagccaaaatgggacacagtaaacagattcgaattttacttctgaacgaaatggagaaactggaaaagaccctcttcagacttgaacaagggtatgagctacagttccgattaggcccaactttacagggaaaagcagttaccgtgtatacaaattacccatttcctggagaaacatttaatagagaaaaattccgttctctggattgggaaaatccaacagaaagagaagatgattctgataaatactgtaaacttaatctgcaacaatctggttcatttcagtattatttccttcaaggaaatgagaaaagtggtggaggttacatagttgtggaccccattttacgtgttggtgctgataatcatgtgctacccttggactgtgttactcttcagacatttttagctaagtgtttgggaccttttgatgaatgggaaagcagacttagggttgcaaaagaatcaggctacaacatgattcattttaccccattgcagactcttggactatctaggtcatgctactcccttgccaatcagttagaattaaatcctgacttttcaagacctaatagaaagtatacctggaatgatgttggacagctagtggaaaaattaaaaaaggaatggaatgttatttgtattactgatgttgtctacaatcatactgctgctaatagtaaatggatccaggaacatccagaatgtgcctataatcttgtgaattctccacacttaaaacctgcctgggtcttagacagagcactttggcgtttctcctgtgatgttgcagaagggaaatacaaagaaaagggaatacctgctttgattgaaaatgatcaccatatgaattccatccgaaaaataatttgggaggatatttttccaaagcttaaactctgggaatttttccaagtagatgtcaacaaagcggttgagcaatttagaagacttcttacacaagaaaataggcgagtaaccaagtctgatccaaaccaacaccttacgattattcaagatcctgaatacagacggtttggctgtactgtagatatgaacattgcactaacgactttcataccacatgacaaggggccagcagcaattgaagaatgctgtaattggtttcataaaagaatggaggaattaaattcagagaagcatcgactcattaactatcatcaggaacaggcagttaattgccttttgggaaatgtgttttatgaacgactggctggccatggtccaaaactaggacctgtcactagaaagcatcctttagttaccaggtattttactttcccatttgaagagatagacttctccatggaagaatctatgattcatctgccaaataaagcttgttttctgatggcacacaatggatgggtaatgggagatgatcctcttcgaaactttgctgaaccgggttcagaagtttacctaaggagagaacttatttgctggggagacagtgttaaattacgctatgggaataaaccagaggactgtccttatctctgggcacacatgaaaaaatacactgaaataactgcaacttatttccagggagtacgtcttgataactgccactcaacacctcttcacgtagctgagtacatgttggatgctgctaggaatttgcaacccaatttatatgtagtagctgaactgttcacaggaagtgaagatctggacaatgtctttgttactagactgggcattagttccttaataagagaggcaatgagtgcatataatagtcatgaagagggcagattagtttaccgatatggaggagaacctgttggatcctttgttcagccctgtttgaggcctttaatgccagctattgcacatgccctgtttatggatattacgcatgataatgagtgtcctattgtgcatagatcagcgtatgatgctcttccaagtactacaattgtttctatggcatgttgtgctagtggaagtacaagaggctatgatgaattagtgcctcatcagatttcagtggtttctgaagaacggttttacactaagtggaatcctgaagcattgccttcaaacacaggtgaagttaatttccaaagcggcattattgcagccaggtgtgctatcagtaaacttcatcaggagcttggagccaagggttttattcaggtgtatgtggatcaagttgatgaagacatagtggcagtaacaagacactcacctagcatccatcagtctgttgtggctgtatctagaactgctttcaggaatcccaagacttcattttacagcaaggaagtgcctcaaatgtgcatccctggcaaaattgaagaagtagttcttgaagctagaactattgagagaaacacgaaaccttataggaaggatgagaattcaatcaatggaacaccagatatcacagtagaaattagagaacatattcagcttaatgaaagtaaaattgttaaacaagctggagttgccacaaaagggcccaatgaatatattcaagaaatagaatttgaaaacttgtctccaggaagtgttattatattcagagttagtcttgatccacatgcacaagtcgctgttggaattcttcgaaatcatctgacacaattcagtcctcactttaaatctggcagcctagctgttgacaatgcagatcctatattaaaaattccttttgcttctcttgcctccagattaactttggctgagctaaatcagatcctttaccgatgtgaatcagaagaaaaggaagatggtggagggtgctatgacataccaaactggtcagcccttaaatatgcaggtcttcaaggtttaatgtctgtattggcagaaataagaccaaagaatgacttggggcatcctttttgtaataatttgagatctggagattggatgattgactatgtcagtaaccggcttatttcacgatcaggaactattgctgaagttggtaaatggttgcaggctatgttcttctacctgaagcagatcccacgttaccttatcccatgttactttgatgctatattaattggtgcatataccactcttctggatacagcatggaagcagatgtcaagctttgttcagaatggttcaacctttgtgaaacacctttcattgggttcagttcaactgtgtggagtaggaaaattcccttccctgccaattctttcacctgccctaatggatgtaccttataggttaaatgagatcacaaaagaaaaggagcaatgttgtgtttctctagctgcaggcttacctcatttttcttctggtattttccgctgctggggaagggatacttttattgcacttagaggtatactgctgattactggacgctatgtagaagccaggaatattattttagcatttgcgggtaccctgaggcatggtctcattcctaatctactgggtgaagggatttatgccagatacaattgtcgggatgctgtgtggtggtggctgcagtgtatccaggattactgtaaaatggttccaaatggtctagacattctcaagtgcccagtttccagaatgtatcctacagatgattctgctcctttgcctgctggcacactggatcagccattgtttgaagtcatacaggaagcaatgcaaaaacacatgcagggcatacagttccgagaaaggaatgctggtccccagatagatcgaaacatgaaggacgaaggttttaatataactgcaggagttgatgaagaaacaggatttgtttatggaggaaatcgtttcaattgtggcacatggatggataaaatgggagaaagtgacagagctagaaacagaggaatcccagccacaccaagagatgggtctgctgtggaaattgtgggcctgagtaaatctgctgttcgctggttgctggaattatccaaaaaaaatattttcccttatcatgaagtcacagtaaaaagacatggaaaggctataaaggtctcatatgatgagtggaacagaaaaatacaagacaactttgaaaagctatttcatgtttccgaagacccttcagatttaaatgaaaagcatccaaatctggttcacaaacgtggcatatacaaagatagttatggagcttcaagtccttggtgtgactatcagctcaggcctaattttaccatagcaatggttgtggcccctgagctctttactacagaaaaagcagggaaagctttggagattgcagaaaaaaaattgcttggtccccttggcatgaaaactttagatccagatgatatggtttactgtggaatttatgacaatgcattagacaatgacaactacaatcttgctaaaggtttcaattatcaccaaggacctgagtggctgtggcctattgggtattttcttcgtgcaaaattatatttttccagattgatgggcccggagactactgcaaagactatagttttggttaaaaatgttctttcccgacattatgttcatcttgagagatccccttggaaaggacttccagaactgaccaatgagaatgcccagtactgtcctttcagctgtgaaacacaagcctggtcaattgctactattcttgagacactttatgatttatagtttattacagatattaagtatgcaattacttgtattataggatgcaaggtcatcatatgtaaatgccttatatgcacaggctcaagttgttttaaaaatctcatttattataatattgatgctcaattaggtaagattgtaaaagcattgattttttttaatgtacagaggtagatttcaatttgaatcagaaagaaatatcattaccaatgaaatgtgtttgagttcagtaagaattattcaaatgcctagaaatccatagtttggaaaataaaaatcatgtcatcttctatttgtacagaaatgaaaataaaatatgaaaataatgaaagaaatgaaaagatagcttttaattgtggtatatataatcttcagtaacaatacatactgaatacgctgtggttcattaatattaacaccacgtactatagtattcttagaatacagtgctcactgcatttaataaatatttaataaatgatgaatgatagaagtttccatctacaatatatgttcctaaatggagcacagatgttcaaactatgctttcattttttcactgatatattaatttttgtgtaatgaatgccaacagtatattttatatgatttacttatgtgaggaaacatgcaaagcattaggaaatttatttcctaaaaacagttttgtaaaattagtattgagttctattgagtattataagatagcttacattttcaaaatggaaattgtcggtcatatttctagaactttaaagaaaaaagaatgttatattagttttctaaaactcaactatctttagtcatgttcaaaaatctattgctagatcatagtagatactggttttctattaactcaaaacctacattgacaagtttaacattgagaagaatcttaacaaaaatatggatatgaattcagtagatatcttaaattcaataaaatcactggaagtttttcatgataacttattttaagatgccttaaaaatcttaaagtcacaaaaggaaaaaggtttttaacatttacatgagttaacattttttcatagaacttatttcctagatagaattttttactgttttttactgttttcttaagaaaacagttaaatcattatgcattcagttggaagaaagtagtggcaagaattctttcattgctatataatattcagtggctcatttatacctaataaaataatggtattttaaaataatgctactttcaaagtagcatttttttagttagtttacaggttacatacccaaaaccttaactatgactaagaaattaaagaagaaaaccagcaaactaaaacttctgggcagcaaaaatatataaatgcttcagatgtcaaatacccatgcttgaaagctcgtgtaatttactttaagattatctgcctgctcttcttcaaagctgaccttgctttagaaatagttttaactagcttagttttctggtttccaaaactaaaatagattaaatcctacaaatttaaggacagttgtgacagtaatctgaccactatctataaatacattggacattggtttccaaatctccctttcttcttcagttccttccttgttcaatatatacccttctctaaactgtgcgggtaaaaggaatgactgtccttgagagaaccattagtttatcaaaggtttatgtagttttgttgctgtaccctaactttgatattcagggaggtaggaaaggtaacagaaaaccagcatatttaatcaaagcaagaagtaatcgctgacagttaaatgtgaccaaaaaaattaaaagttcacaatttttttaatgtagccatttggggttatctctagtaaggcagatacccacgttggtaaatttttaggatattgtgttgcactagaaaactaagtggttcatatttctaatgaggaagattaatgaaagaacattgttatattctgcgtggtatattttaaagtttaagaaggcatgttaaacattatttcctctatggtagttaaaatacagaattagatttttaacaggtgtcatttgactaaacgtttcggtagaatgcttcatacttgagtgatgctggataaggtattgtatttcaacaatggactatgccttggtttttcactaatcaaaatcaaaattactctttaacatgataaatgaatttaccagtttagtatgctgtggtattttaataagttttcaaagataattgggaaaacatgagactggtcatattgatgaatattgtaacatgtgaattgtgatccatttctgatatgtcttgaactactgtgtctagtgggcaaatgtcattgttacctctgtgtgttaagaaaataaaaatattttctaaaggtc

SEQ ID NO: 96101 - DNA, 7168 bp, Homo sapiens
ctgtctacggcagctattccagaggcaacaactgcttccctctgttctcatctccccattggtggctggcgacccgaatttgggaatggggagattgcccacctgttatctttgagcagactaatctcttgggtaactcattcgactgtggagttcttttaattcttatgaaagatttcaaatcctctggaagccaaaatgggacacagtaaacagattcgaattttacttctgaacgaaatggagaaactggaaaagaccctcttcagacttgaacaagggtatgagctacagttccgattaggcccaactttacagggaaaagcagttaccgtgtatacaaattacccatttcctggagaaacatttaatagagaaaaattccgttctctggattgggaaaatccaacagaaagagaagatgattctgataaatactgtaaacttaatctgcaacaatctggttcatttcagtattatttccttcaaggaaatgagaaaagtggtggaggttacatagttgtggaccccattttacgtgttggtgctgataatcatgtgctacccttggactgtgttactcttcagacatttttagctaagtgtttgggaccttttgatgaatgggaaagcagacttagggttgcaaaagaatcaggctacaacatgattcattttaccccattgcagactcttggactatctaggtcatgctactcccttgccaatcagttagaattaaatcctgacttttcaagacctaatagaaagtatacctggaatgatgttggacagctagtggaaaaattaaaaaaggaatggaatgttatttgtattactgatgttgtctacaatcatactgctgctaatagtaaatggatccaggaacatccagaatgtgcctataatcttgtgaattctccacacttaaaacctgcctgggtcttagacagagcactttggcgtttctcctgtgatgttgcagaagggaaatacaaagaaaagggaatacctgctttgattgaaaatgatcaccatatgaattccatccgaaaaataatttgggaggatatttttccaaagcttaaactctgggaatttttccaagtagatgtcaacaaagcggttgagcaatttagaagacttcttacacaagaaaataggcgagtaaccaagtctgatccaaaccaacaccttacgattattcaagatcctgaatacagacggtttggctgtactgtagatatgaacattgcactaacgactttcataccacatgacaaggggccagcagcaattgaagaatgctgtaattggtttcataaaagaatggaggaattaaattcagagaagcatcgactcattaactatcatcaggaacaggcagttaattgccttttgggaaatgtgttttatgaacgactggctggccatggtccaaaactaggacctgtcactagaaagcatcctttagttaccaggtattttactttcccatttgaagagatagacttctccatggaagaatctatgattcatctgccaaataaagcttgttttctgatggcacacaatggatgggtaatgggagatgatcctcttcgaaactttgctgaaccgggttcagaagtttacctaaggagagaacttatttgctggggagacagtgttaaattacgctatgggaataaaccagaggactgtccttatctctgggcacacatgaaaaaatacactgaaataactgcaacttatttccagggagtacgtcttgataactgccactcaacacctcttcacgtagctgagtacatgttggatgctgctaggaatttgcaacccaatttatatgtagtagctgaactgttcacaggaagtgaagatctggacaatgtctttgttactagactgggcattagttccttaataagagaggcaatgagtgcatataatagtcatgaagagggcagattagtttaccgatatggaggagaacctgttggatcctttgttcagccctgtttgaggcctttaatgccagctattgcacatgccctgtttatggatattacgcatgataatgagtgtcctattgtgcatagatcagcgtatgatgctcttccaagtactacaattgtttctatggcatgttgtgctagtggaagtacaagaggctatgatgaattagtgcctcatcagatttcagtggtttctgaagaacggttttacactaagtggaatcctgaagcattgccttcaaacacaggtgaagttaatttccaaagcggcattattgcagccaggtgtgctatcagtaaacttcatcaggagcttggagccaagggttttattcaggtgtatgtggatcaagttgatgaagacatagtggcagtaacaagacactcacctagcatccatcagtctgttgtggctgtatctagaactgctttcaggaatcccaagacttcattttacagcaaggaagtgcctcaaatgtgcatccctggcaaaattgaagaagtagttcttgaagctagaactattgagagaaacacgaaaccttataggaaggatgagaattcaatcaatggaacaccagatatcacagtagaaattagagaacatattcagcttaatgaaagtaaaattgttaaacaagctggagttgccacaaaagggcccaatgaatatattcaagaaatagaatttgaaaacttgtctccaggaagtgttattatattcagagttagtcttgatccacatgcacaagtcgctgttggaattcttcgaaatcatctgacacaattcagtcctcactttaaatctggcagcctagctgttgacaatgcagatcctatattaaaaattccttttgcttctcttgcctccagattaactttggctgagctaaatcagatcctttaccgatgtgaatcagaagaaaaggaagatggtggagggtgctatgacataccaaactggtcagcccttaaatatgcaggtcttcaaggtttaatgtctgtattggcagaaataagaccaaagaatgacttggggcatcctttttgtaataatttgagatctggagattggatgattgactatgtcagtaaccggcttatttcacgatcaggaactattgctgaagttggtaaatggttgcaggctatgttcttctacctgaagcagatcccacgttaccttatcccatgttactttgatgctatattaattggtgcatataccactcttctggatacagcatggaagcagatgtcaagctttgttcagaatggttcaacctttgtgaaacacctttcattgggttcagttcaactgtgtggagtaggaaaattcccttccctgccaattctttcacctgccctaatggatgtaccttataggttaaatgagatcacaaaagaaaaggagcaatgttgtgtttctctagctgcaggcttacctcatttttcttctggtattttccgctgctggggaagggatacttttattgcacttagaggtatactgctgattactggacgctatgtagaagccaggaatattattttagcatttgcgggtaccctgaggcatggtctcattcctaatctactgggtgaagggatttatgccagatacaattgtcgggatgctgtgtggtggtggctgcagtgtatccaggattactgtaaaatggttccaaatggtctagacattctcaagtgcccagtttccagaatgtatcctacagatgattctgctcctttgcctgctggcacactggatcagccattgtttgaagtcatacaggaagcaatgcaaaaacacatgcagggcatacagttccgagaaaggaatgctggtccccagatagatcgaaacatgaaggacgaaggttttaatataactgcaggagttgatgaagaaacaggatttgtttatggaggaaatcgtttcaattgtggcacatggatggataaaatgggagaaagtgacagagctagaaacagaggaatcccagccacaccaagagatgggtctgctgtggaaattgtgggcctgagtaaatctgctgttcgctggttgctggaattatccaaaaaaaatattttcccttatcatgaagtcacagtaaaaagacatggaaaggctataaaggtctcatatgatgagtggaacagaaaaatacaagacaactttgaaaagctatttcatgtttccgaagacccttcagatttaaatgaaaagcatccaaatctggttcacaaacgtggcatatacaaagatagttatggagcttcaagtccttggtgtgactatcagctcaggcctaattttaccatagcaatggttgtggcccctgagctctttactacagaaaaagcagggaaagctttggagattgcagaaaaaaaattgcttggtccccttggcatgaaaactttagatccagatgatatggtttactgtggaatttatgacaatgcattagacaatgacaactacaatcttgctaaaggtttcaattatcaccaaggacctgagtggctgtggcctattgggtattttcttcgtgcaaaattatatttttccagattgatgggcccggagactactgcaaagactatagttttggttaaaaatgttctttcccgacattatgttcatcttgagagatccccttggaaaggacttccagaactgaccaatgagaatgcccagtactgtcctttcagctgtgaaacacaagcctggtcaattgctactattcttgagacactttatgatttatagtttattacagatattaagtatgcaattacttgtattataggatgcaaggtcatcatatgtaaatgccttatatgcacaggctcaagttgttttaaaaatctcatttattataatattgatgctcaattaggtaagattgtaaaagcattgattttttttaatgtacagaggtagatttcaatttgaatcagaaagaaatatcattaccaatgaaatgtgtttgagttcagtaagaattattcaaatgcctagaaatccatagtttggaaaataaaaatcatgtcatcttctatttgtacagaaatgaaaataaaatatgaaaataatgaaagaaatgaaaagatagcttttaattgtggtatatataatcttcagtaacaatacatactgaatacgctgtggttcattaatattaacaccacgtactatagtattcttagaatacagtgctcactgcatttaataaatatttaataaatgatgaatgatagaagtttccatctacaatatatgttcctaaatggagcacagatgttcaaactatgctttcattttttcactgatatattaatttttgtgtaatgaatgccaacagtatattttatatgatttacttatgtgaggaaacatgcaaagcattaggaaatttatttcctaaaaacagttttgtaaaattagtattgagttctattgagtattataagatagcttacattttcaaaatggaaattgtcggtcatatttctagaactttaaagaaaaaagaatgttatattagttttctaaaactcaactatctttagtcatgttcaaaaatctattgctagatcatagtagatactggttttctattaactcaaaacctacattgacaagtttaacattgagaagaatcttaacaaaaatatggatatgaattcagtagatatcttaaattcaataaaatcactggaagtttttcatgataacttattttaagatgccttaaaaatcttaaagtcacaaaaggaaaaaggtttttaacatttacatgagttaacattttttcatagaacttatttcctagatagaattttttactgttttttactgttttcttaagaaaacagttaaatcattatgcattcagttggaagaaagtagtggcaagaattctttcattgctatataatattcagtggctcatttatacctaataaaataatggtattttaaaataatgctactttcaaagtagcatttttttagttagtttacaggttacatacccaaaaccttaactatgactaagaaattaaagaagaaaaccagcaaactaaaacttctgggcagcaaaaatatataaatgcttcagatgtcaaatacccatgcttgaaagctcgtgtaatttactttaagattatctgcctgctcttcttcaaagctgaccttgctttagaaatagttttaactagcttagttttctggtttccaaaactaaaatagattaaatcctacaaatttaaggacagttgtgacagtaatctgaccactatctataaatacattggacattggtttccaaatctccctttcttcttcagttccttccttgttcaatatatacccttctctaaactgtgcgggtaaaaggaatgactgtccttgagagaaccattagtttatcaaaggtttatgtagttttgttgctgtaccctaactttgatattcagggaggtaggaaaggtaacagaaaaccagcatatttaatcaaagcaagaagtaatcgctgacagttaaatgtgaccaaaaaaattaaaagttcacaatttttttaatgtagccatttggggttatctctagtaaggcagatacccacgttggtaaatttttaggatattgtgttgcactagaaaactaagtggttcatatttctaatgaggaagattaatgaaagaacattgttatattctgcgtggtatattttaaagtttaagaaggcatgttaaacattatttcctctatggtagttaaaatacagaattagatttttaacaggtgtcatttgactaaacgtttcggtagaatgcttcatacttgagtgatgctggataaggtattgtatttcaacaatggactatgccttggtttttcactaatcaaaatcaaaattactctttaacatgataaatgaatttaccagtttagtatgctgtggtattttaataagttttcaaagataattgggaaaacatgagactggtcatattgatgaatattgtaacatgtgaattgtgatccatttctgatatgtcttgaactactgtgtctagtgggcaaatgtcattgttacctctgtgtgttaagaaaataaaaatattttctaaaggtc

SEQ ID NO: 96102 - DNA, 7108 bp, Homo sapiens
ctgtctacggcagctattccagaggcaacaactgcttccctctgttctcatctccccattggtggctggcgacccgaatttgggaatggggagattgcccacctgttatctttgagcagactaatctcttaagccaaaatgggacacagtaaacagattcgaattttacttctgaacgaaatggagaaactggaaaagaccctcttcagacttgaacaagggtatgagctacagttccgattaggcccaactttacagggaaaagcagttaccgtgtatacaaattacccatttcctggagaaacatttaatagagaaaaattccgttctctggattgggaaaatccaacagaaagagaagatgattctgataaatactgtaaacttaatctgcaacaatctggttcatttcagtattatttccttcaaggaaatgagaaaagtggtggaggttacatagttgtggaccccattttacgtgttggtgctgataatcatgtgctacccttggactgtgttactcttcagacatttttagctaagtgtttgggaccttttgatgaatgggaaagcagacttagggttgcaaaagaatcaggctacaacatgattcattttaccccattgcagactcttggactatctaggtcatgctactcccttgccaatcagttagaattaaatcctgacttttcaagacctaatagaaagtatacctggaatgatgttggacagctagtggaaaaattaaaaaaggaatggaatgttatttgtattactgatgttgtctacaatcatactgctgctaatagtaaatggatccaggaacatccagaatgtgcctataatcttgtgaattctccacacttaaaacctgcctgggtcttagacagagcactttggcgtttctcctgtgatgttgcagaagggaaatacaaagaaaagggaatacctgctttgattgaaaatgatcaccatatgaattccatccgaaaaataatttgggaggatatttttccaaagcttaaactctgggaatttttccaagtagatgtcaacaaagcggttgagcaatttagaagacttcttacacaagaaaataggcgagtaaccaagtctgatccaaaccaacaccttacgattattcaagatcctgaatacagacggtttggctgtactgtagatatgaacattgcactaacgactttcataccacatgacaaggggccagcagcaattgaagaatgctgtaattggtttcataaaagaatggaggaattaaattcagagaagcatcgactcattaactatcatcaggaacaggcagttaattgccttttgggaaatgtgttttatgaacgactggctggccatggtccaaaactaggacctgtcactagaaagcatcctttagttaccaggtattttactttcccatttgaagagatagacttctccatggaagaatctatgattcatctgccaaataaagcttgttttctgatggcacacaatggatgggtaatgggagatgatcctcttcgaaactttgctgaaccgggttcagaagtttacctaaggagagaacttatttgctggggagacagtgttaaattacgctatgggaataaaccagaggactgtccttatctctgggcacacatgaaaaaatacactgaaataactgcaacttatttccagggagtacgtcttgataactgccactcaacacctcttcacgtagctgagtacatgttggatgctgctaggaatttgcaacccaatttatatgtagtagctgaactgttcacaggaagtgaagatctggacaatgtctttgttactagactgggcattagttccttaataagagaggcaatgagtgcatataatagtcatgaagagggcagattagtttaccgatatggaggagaacctgttggatcctttgttcagccctgtttgaggcctttaatgccagctattgcacatgccctgtttatggatattacgcatgataatgagtgtcctattgtgcatagatcagcgtatgatgctcttccaagtactacaattgtttctatggcatgttgtgctagtggaagtacaagaggctatgatgaattagtgcctcatcagatttcagtggtttctgaagaacggttttacactaagtggaatcctgaagcattgccttcaaacacaggtgaagttaatttccaaagcggcattattgcagccaggtgtgctatcagtaaacttcatcaggagcttggagccaagggttttattcaggtgtatgtggatcaagttgatgaagacatagtggcagtaacaagacactcacctagcatccatcagtctgttgtggctgtatctagaactgctttcaggaatcccaagacttcattttacagcaaggaagtgcctcaaatgtgcatccctggcaaaattgaagaagtagttcttgaagctagaactattgagagaaacacgaaaccttataggaaggatgagaattcaatcaatggaacaccagatatcacagtagaaattagagaacatattcagcttaatgaaagtaaaattgttaaacaagctggagttgccacaaaagggcccaatgaatatattcaagaaatagaatttgaaaacttgtctccaggaagtgttattatattcagagttagtcttgatccacatgcacaagtcgctgttggaattcttcgaaatcatctgacacaattcagtcctcactttaaatctggcagcctagctgttgacaatgcagatcctatattaaaaattccttttgcttctcttgcctccagattaactttggctgagctaaatcagatcctttaccgatgtgaatcagaagaaaaggaagatggtggagggtgctatgacataccaaactggtcagcccttaaatatgcaggtcttcaaggtttaatgtctgtattggcagaaataagaccaaagaatgacttggggcatcctttttgtaataatttgagatctggagattggatgattgactatgtcagtaaccggcttatttcacgatcaggaactattgctgaagttggtaaatggttgcaggctatgttcttctacctgaagcagatcccacgttaccttatcccatgttactttgatgctatattaattggtgcatataccactcttctggatacagcatggaagcagatgtcaagctttgttcagaatggttcaacctttgtgaaacacctttcattgggttcagttcaactgtgtggagtaggaaaattcccttccctgccaattctttcacctgccctaatggatgtaccttataggttaaatgagatcacaaaagaaaaggagcaatgttgtgtttctctagctgcaggcttacctcatttttcttctggtattttccgctgctggggaagggatacttttattgcacttagaggtatactgctgattactggacgctatgtagaagccaggaatattattttagcatttgcgggtaccctgaggcatggtctcattcctaatctactgggtgaagggatttatgccagatacaattgtcgggatgctgtgtggtggtggctgcagtgtatccaggattactgtaaaatggttccaaatggtctagacattctcaagtgcccagtttccagaatgtatcctacagatgattctgctcctttgcctgctggcacactggatcagccattgtttgaagtcatacaggaagcaatgcaaaaacacatgcagggcatacagttccgagaaaggaatgctggtccccagatagatcgaaacatgaaggacgaaggttttaatataactgcaggagttgatgaagaaacaggatttgtttatggaggaaatcgtttcaattgtggcacatggatggataaaatgggagaaagtgacagagctagaaacagaggaatcccagccacaccaagagatgggtctgctgtggaaattgtgggcctgagtaaatctgctgttcgctggttgctggaattatccaaaaaaaatattttcccttatcatgaagtcacagtaaaaagacatggaaaggctataaaggtctcatatgatgagtggaacagaaaaatacaagacaactttgaaaagctatttcatgtttccgaagacccttcagatttaaatgaaaagcatccaaatctggttcacaaacgtggcatatacaaagatagttatggagcttcaagtccttggtgtgactatcagctcaggcctaattttaccatagcaatggttgtggcccctgagctctttactacagaaaaagcagggaaagctttggagattgcagaaaaaaaattgcttggtccccttggcatgaaaactttagatccagatgatatggtttactgtggaatttatgacaatgcattagacaatgacaactacaatcttgctaaaggtttcaattatcaccaaggacctgagtggctgtggcctattgggtattttcttcgtgcaaaattatatttttccagattgatgggcccggagactactgcaaagactatagttttggttaaaaatgttctttcccgacattatgttcatcttgagagatccccttggaaaggacttccagaactgaccaatgagaatgcccagtactgtcctttcagctgtgaaacacaagcctggtcaattgctactattcttgagacactttatgatttatagtttattacagatattaagtatgcaattacttgtattataggatgcaaggtcatcatatgtaaatgccttatatgcacaggctcaagttgttttaaaaatctcatttattataatattgatgctcaattaggtaagattgtaaaagcattgattttttttaatgtacagaggtagatttcaatttgaatcagaaagaaatatcattaccaatgaaatgtgtttgagttcagtaagaattattcaaatgcctagaaatccatagtttggaaaataaaaatcatgtcatcttctatttgtacagaaatgaaaataaaatatgaaaataatgaaagaaatgaaaagatagcttttaattgtggtatatataatcttcagtaacaatacatactgaatacgctgtggttcattaatattaacaccacgtactatagtattcttagaatacagtgctcactgcatttaataaatatttaataaatgatgaatgatagaagtttccatctacaatatatgttcctaaatggagcacagatgttcaaactatgctttcattttttcactgatatattaatttttgtgtaatgaatgccaacagtatattttatatgatttacttatgtgaggaaacatgcaaagcattaggaaatttatttcctaaaaacagttttgtaaaattagtattgagttctattgagtattataagatagcttacattttcaaaatggaaattgtcggtcatatttctagaactttaaagaaaaaagaatgttatattagttttctaaaactcaactatctttagtcatgttcaaaaatctattgctagatcatagtagatactggttttctattaactcaaaacctacattgacaagtttaacattgagaagaatcttaacaaaaatatggatatgaattcagtagatatcttaaattcaataaaatcactggaagtttttcatgataacttattttaagatgccttaaaaatcttaaagtcacaaaaggaaaaaggtttttaacatttacatgagttaacattttttcatagaacttatttcctagatagaattttttactgttttttactgttttcttaagaaaacagttaaatcattatgcattcagttggaagaaagtagtggcaagaattctttcattgctatataatattcagtggctcatttatacctaataaaataatggtattttaaaataatgctactttcaaagtagcatttttttagttagtttacaggttacatacccaaaaccttaactatgactaagaaattaaagaagaaaaccagcaaactaaaacttctgggcagcaaaaatatataaatgcttcagatgtcaaatacccatgcttgaaagctcgtgtaatttactttaagattatctgcctgctcttcttcaaagctgaccttgctttagaaatagttttaactagcttagttttctggtttccaaaactaaaatagattaaatcctacaaatttaaggacagttgtgacagtaatctgaccactatctataaatacattggacattggtttccaaatctccctttcttcttcagttccttccttgttcaatatatacccttctctaaactgtgcgggtaaaaggaatgactgtccttgagagaaccattagtttatcaaaggtttatgtagttttgttgctgtaccctaactttgatattcagggaggtaggaaaggtaacagaaaaccagcatatttaatcaaagcaagaagtaatcgctgacagttaaatgtgaccaaaaaaattaaaagttcacaatttttttaatgtagccatttggggttatctctagtaaggcagatacccacgttggtaaatttttaggatattgtgttgcactagaaaactaagtggttcatatttctaatgaggaagattaatgaaagaacattgttatattctgcgtggtatattttaaagtttaagaaggcatgttaaacattatttcctctatggtagttaaaatacagaattagatttttaacaggtgtcatttgactaaacgtttcggtagaatgcttcatacttgagtgatgctggataaggtattgtatttcaacaatggactatgccttggtttttcactaatcaaaatcaaaattactctttaacatgataaatgaatttaccagtttagtatgctgtggtattttaataagttttcaaagataattgggaaaacatgagactggtcatattgatgaatattgtaacatgtgaattgtgatccatttctgatatgtcttgaactactgtgtctagtgggcaaatgtcattgttacctctgtgtgttaagaaaataaaaatattttctaaaggtc

SEQ ID NO: 96103 - DNA, 7183 bp, Homo sapiens
tgtataagaatttgcacatcccaagttgctatgtgaataggaatgtacgtttccaggggaaggagaaagagacattacagagcagacagctctatgatgtttactatacttgctaaaatgtgaaattcagctaaattggaatacaaagtagtgccaaaacagcattaggtttgcggagttattttaaacataattgaaaaatcaaggttttttaatactttaaataaaacatctgtttttcaatgtggtaatttaagtcctacgatgagtttattaacatgtgctttttatttagggtatgagctacagttccgattaggcccaactttacagggaaaagcagttaccgtgtatacaaattacccatttcctggagaaacatttaatagagaaaaattccgttctctggattgggaaaatccaacagaaagagaagatgattctgataaatactgtaaacttaatctgcaacaatctggttcatttcagtattatttccttcaaggaaatgagaaaagtggtggaggttacatagttgtggaccccattttacgtgttggtgctgataatcatgtgctacccttggactgtgttactcttcagacatttttagctaagtgtttgggaccttttgatgaatgggaaagcagacttagggttgcaaaagaatcaggctacaacatgattcattttaccccattgcagactcttggactatctaggtcatgctactcccttgccaatcagttagaattaaatcctgacttttcaagacctaatagaaagtatacctggaatgatgttggacagctagtggaaaaattaaaaaaggaatggaatgttatttgtattactgatgttgtctacaatcatactgctgctaatagtaaatggatccaggaacatccagaatgtgcctataatcttgtgaattctccacacttaaaacctgcctgggtcttagacagagcactttggcgtttctcctgtgatgttgcagaagggaaatacaaagaaaagggaatacctgctttgattgaaaatgatcaccatatgaattccatccgaaaaataatttgggaggatatttttccaaagcttaaactctgggaatttttccaagtagatgtcaacaaagcggttgagcaatttagaagacttcttacacaagaaaataggcgagtaaccaagtctgatccaaaccaacaccttacgattattcaagatcctgaatacagacggtttggctgtactgtagatatgaacattgcactaacgactttcataccacatgacaaggggccagcagcaattgaagaatgctgtaattggtttcataaaagaatggaggaattaaattcagagaagcatcgactcattaactatcatcaggaacaggcagttaattgccttttgggaaatgtgttttatgaacgactggctggccatggtccaaaactaggacctgtcactagaaagcatcctttagttaccaggtattttactttcccatttgaagagatagacttctccatggaagaatctatgattcatctgccaaataaagcttgttttctgatggcacacaatggatgggtaatgggagatgatcctcttcgaaactttgctgaaccgggttcagaagtttacctaaggagagaacttatttgctggggagacagtgttaaattacgctatgggaataaaccagaggactgtccttatctctgggcacacatgaaaaaatacactgaaataactgcaacttatttccagggagtacgtcttgataactgccactcaacacctcttcacgtagctgagtacatgttggatgctgctaggaatttgcaacccaatttatatgtagtagctgaactgttcacaggaagtgaagatctggacaatgtctttgttactagactgggcattagttccttaataagagaggcaatgagtgcatataatagtcatgaagagggcagattagtttaccgatatggaggagaacctgttggatcctttgttcagccctgtttgaggcctttaatgccagctattgcacatgccctgtttatggatattacgcatgataatgagtgtcctattgtgcatagatcagcgtatgatgctcttccaagtactacaattgtttctatggcatgttgtgctagtggaagtacaagaggctatgatgaattagtgcctcatcagatttcagtggtttctgaagaacggttttacactaagtggaatcctgaagcattgccttcaaacacaggtgaagttaatttccaaagcggcattattgcagccaggtgtgctatcagtaaacttcatcaggagcttggagccaagggttttattcaggtgtatgtggatcaagttgatgaagacatagtggcagtaacaagacactcacctagcatccatcagtctgttgtggctgtatctagaactgctttcaggaatcccaagacttcattttacagcaaggaagtgcctcaaatgtgcatccctggcaaaattgaagaagtagttcttgaagctagaactattgagagaaacacgaaaccttataggaaggatgagaattcaatcaatggaacaccagatatcacagtagaaattagagaacatattcagcttaatgaaagtaaaattgttaaacaagctggagttgccacaaaagggcccaatgaatatattcaagaaatagaatttgaaaacttgtctccaggaagtgttattatattcagagttagtcttgatccacatgcacaagtcgctgttggaattcttcgaaatcatctgacacaattcagtcctcactttaaatctggcagcctagctgttgacaatgcagatcctatattaaaaattccttttgcttctcttgcctccagattaactttggctgagctaaatcagatcctttaccgatgtgaatcagaagaaaaggaagatggtggagggtgctatgacataccaaactggtcagcccttaaatatgcaggtcttcaaggtttaatgtctgtattggcagaaataagaccaaagaatgacttggggcatcctttttgtaataatttgagatctggagattggatgattgactatgtcagtaaccggcttatttcacgatcaggaactattgctgaagttggtaaatggttgcaggctatgttcttctacctgaagcagatcccacgttaccttatcccatgttactttgatgctatattaattggtgcatataccactcttctggatacagcatggaagcagatgtcaagctttgttcagaatggttcaacctttgtgaaacacctttcattgggttcagttcaactgtgtggagtaggaaaattcccttccctgccaattctttcacctgccctaatggatgtaccttataggttaaatgagatcacaaaagaaaaggagcaatgttgtgtttctctagctgcaggcttacctcatttttcttctggtattttccgctgctggggaagggatacttttattgcacttagaggtatactgctgattactggacgctatgtagaagccaggaatattattttagcatttgcgggtaccctgaggcatggtctcattcctaatctactgggtgaagggatttatgccagatacaattgtcgggatgctgtgtggtggtggctgcagtgtatccaggattactgtaaaatggttccaaatggtctagacattctcaagtgcccagtttccagaatgtatcctacagatgattctgctcctttgcctgctggcacactggatcagccattgtttgaagtcatacaggaagcaatgcaaaaacacatgcagggcatacagttccgagaaaggaatgctggtccccagatagatcgaaacatgaaggacgaaggttttaatataactgcaggagttgatgaagaaacaggatttgtttatggaggaaatcgtttcaattgtggcacatggatggataaaatgggagaaagtgacagagctagaaacagaggaatcccagccacaccaagagatgggtctgctgtggaaattgtgggcctgagtaaatctgctgttcgctggttgctggaattatccaaaaaaaatattttcccttatcatgaagtcacagtaaaaagacatggaaaggctataaaggtctcatatgatgagtggaacagaaaaatacaagacaactttgaaaagctatttcatgtttccgaagacccttcagatttaaatgaaaagcatccaaatctggttcacaaacgtggcatatacaaagatagttatggagcttcaagtccttggtgtgactatcagctcaggcctaattttaccatagcaatggttgtggcccctgagctctttactacagaaaaagcagggaaagctttggagattgcagaaaaaaaattgcttggtccccttggcatgaaaactttagatccagatgatatggtttactgtggaatttatgacaatgcattagacaatgacaactacaatcttgctaaaggtttcaattatcaccaaggacctgagtggctgtggcctattgggtattttcttcgtgcaaaattatatttttccagattgatgggcccggagactactgcaaagactatagttttggttaaaaatgttctttcccgacattatgttcatcttgagagatccccttggaaaggacttccagaactgaccaatgagaatgcccagtactgtcctttcagctgtgaaacacaagcctggtcaattgctactattcttgagacactttatgatttatagtttattacagatattaagtatgcaattacttgtattataggatgcaaggtcatcatatgtaaatgccttatatgcacaggctcaagttgttttaaaaatctcatttattataatattgatgctcaattaggtaagattgtaaaagcattgattttttttaatgtacagaggtagatttcaatttgaatcagaaagaaatatcattaccaatgaaatgtgtttgagttcagtaagaattattcaaatgcctagaaatccatagtttggaaaataaaaatcatgtcatcttctatttgtacagaaatgaaaataaaatatgaaaataatgaaagaaatgaaaagatagcttttaattgtggtatatataatcttcagtaacaatacatactgaatacgctgtggttcattaatattaacaccacgtactatagtattcttagaatacagtgctcactgcatttaataaatatttaataaatgatgaatgatagaagtttccatctacaatatatgttcctaaatggagcacagatgttcaaactatgctttcattttttcactgatatattaatttttgtgtaatgaatgccaacagtatattttatatgatttacttatgtgaggaaacatgcaaagcattaggaaatttatttcctaaaaacagttttgtaaaattagtattgagttctattgagtattataagatagcttacattttcaaaatggaaattgtcggtcatatttctagaactttaaagaaaaaagaatgttatattagttttctaaaactcaactatctttagtcatgttcaaaaatctattgctagatcatagtagatactggttttctattaactcaaaacctacattgacaagtttaacattgagaagaatcttaacaaaaatatggatatgaattcagtagatatcttaaattcaataaaatcactggaagtttttcatgataacttattttaagatgccttaaaaatcttaaagtcacaaaaggaaaaaggtttttaacatttacatgagttaacattttttcatagaacttatttcctagatagaattttttactgttttttactgttttcttaagaaaacagttaaatcattatgcattcagttggaagaaagtagtggcaagaattctttcattgctatataatattcagtggctcatttatacctaataaaataatggtattttaaaataatgctactttcaaagtagcatttttttagttagtttacaggttacatacccaaaaccttaactatgactaagaaattaaagaagaaaaccagcaaactaaaacttctgggcagcaaaaatatataaatgcttcagatgtcaaatacccatgcttgaaagctcgtgtaatttactttaagattatctgcctgctcttcttcaaagctgaccttgctttagaaatagttttaactagcttagttttctggtttccaaaactaaaatagattaaatcctacaaatttaaggacagttgtgacagtaatctgaccactatctataaatacattggacattggtttccaaatctccctttcttcttcagttccttccttgttcaatatatacccttctctaaactgtgcgggtaaaaggaatgactgtccttgagagaaccattagtttatcaaaggtttatgtagttttgttgctgtaccctaactttgatattcagggaggtaggaaaggtaacagaaaaccagcatatttaatcaaagcaagaagtaatcgctgacagttaaatgtgaccaaaaaaattaaaagttcacaatttttttaatgtagccatttggggttatctctagtaaggcagatacccacgttggtaaatttttaggatattgtgttgcactagaaaactaagtggttcatatttctaatgaggaagattaatgaaagaacattgttatattctgcgtggtatattttaaagtttaagaaggcatgttaaacattatttcctctatggtagttaaaatacagaattagatttttaacaggtgtcatttgactaaacgtttcggtagaatgcttcatacttgagtgatgctggataaggtattgtatttcaacaatggactatgccttggtttttcactaatcaaaatcaaaattactctttaacatgataaatgaatttaccagtttagtatgctgtggtattttaataagttttcaaagataattgggaaaacatgagactggtcatattgatgaatattgtaacatgtgaattgtgatccatttctgatatgtcttgaactactgtgtctagtgggcaaatgtcattgttacctctgtgtgttaagaaaataaaaatattttctaaaggtc

SEQ ID NO: 96104 - DNA, 794 bp, Homo sapiens
  misc_feature (17)..(17): n is a, c, g, or t
  misc_feature (24)..(25): n is a, c, g, or t
ggcgcactagaactagnggatccnncgggctgtaggaattcggcattagctcgtgccgttactgtccttgagagaaccattagtttatcaaaggtttatgtagttttgttgctgtaccctaactttgatattcagggaggtaggaaaggtaacagaaaaccagcatatttaatcaaagcaagaagtaatcgctgacagttaaatgtgaccaaaaaaattaaaagttcacaatttttttaatgtagccatttggggttatctctagtaaggcagatacccacgttggtaaatttttaggatattgtgttgcactagaaaactaagtggttcatatttctaatgaggaagattaatgaaagaacattgttatattctgcgtggtatattttaaagtttaagaaggcatgttaaacattatttcctctatggtagttaaaatacagaattagatttttaacaggtgtcatttgactaaacgtttcggtagaatgcttcatacttgagtgatgctggataaggtattgtatttcaacaatggactatgccttggtttttcactaatcaaaatcaaaattactctttaacatgataaatgaatttaccagtttagtatgctgtggtattttaataagttttcaaagataattgggaaaacatgagactggtcatattgatgaatattgtaacatgtgaattgtgatccatttctgatatgtcttgaactactgtgtctagtgggcaaatgtcattgttacctctgtgtgttaagaaaataaaaatattttctaaaggtc

SEQ ID NO: 96105 - DNA, 7591 bp, Homo sapiens
ctgtctacggcagctattccagaggcaacaactgcttccctctgttctcatctccccattggtggctggcgacccgaatttgggaatggggagattgcccacctgttatctttgagcagactaatctcttgtaagcagaagtgccattcggagtctccagagccctgtggcttggggctgggaatgtccccctgacttcaggctttcctaagtgtattgcttttctctgagaatggtctaggtttttaattttttaattgtaagaatctgtaatacagcatttttatttcggtcttattcgttgtgctcaaaggcaggaaacaactattaatttgccttctcgaatcttaatagttataagattcattctctttcattgctctgctaggcataaaacacacttcgaacatgggtaactcattcgactgtggagttcttttaattcttatgaaagatttcaaatcctctggaagccaaaatgggacacagtaaacagattcgaattttacttctgaacgaaatggagaaactggaaaagaccctcttcagacttgaacaagaaactgggtctcactatgttgcccaggttgatattgaactcctggactcaagcaaccctccctctttggcctctgaaagtactgggattacaagcataagccaccgggcatggccccacttctgagcattaatttatttattgggtatgagctacagttccgattaggcccaactttacagggaaaagcagttaccgtgtatacaaattacccatttcctggagaaacatttaatagagaaaaattccgttctctggattgggaaaatccaacagaaagagaagatgattctgataaatactgtaaacttaatctgcaacaatctggttcatttcagtattatttccttcaaggaaatgagaaaagtggtggaggttacatagttgtggaccccattttacgtgttggtgctgataatcatgtgctacccttggactgtgttactcttcagacatttttagctaagtgtttgggaccttttgatgaatgggaaagcagacttagggttgcaaaagaatcaggctacaacatgattcattttaccccattgcagactcttggactatctaggtcatgctactcccttgccaatcagttagaattaaatcctgacttttcaagacctaatagaaagtatacctggaatgatgttggacagctagtggaaaaattaaaaaaggaatggaatgttatttgtattactgatgttgtctacaatcatactgctgctaatagtaaatggatccaggaacatccagaatgtgcctataatcttgtgaattctccacacttaaaacctgcctgggtcttagacagagcactttggcgtttctcctgtgatgttgcagaagggaaatacaaagaaaagggaatacctgctttgattgaaaatgatcaccatatgaattccatccgaaaaataatttgggaggatatttttccaaagcttaaactctgggaatttttccaagtagatgtcaacaaagcggttgagcaatttagaagacttcttacacaagaaaataggcgagtaaccaagtctgatccaaaccaacaccttacgattattcaagatcctgaatacagacggtttggctgtactgtagatatgaacattgcactaacgactttcataccacatgacaaggggccagcagcaattgaagaatgctgtaattggtttcataaaagaatggaggaattaaattcagagaagcatcgactcattaactatcatcaggaacaggcagttaattgccttttgggaaatgtgttttatgaacgactggctggccatggtccaaaactaggacctgtcactagaaagcatcctttagttaccaggtattttactttcccatttgaagagatagacttctccatggaagaatctatgattcatctgccaaataaagcttgttttctgatggcacacaatggatgggtaatgggagatgatcctcttcgaaactttgctgaaccgggttcagaagtttacctaaggagagaacttatttgctggggagacagtgttaaattacgctatgggaataaaccagaggactgtccttatctctgggcacacatgaaaaaatacactgaaataactgcaacttatttccagggagtacgtcttgataactgccactcaacacctcttcacgtagctgagtacatgttggatgctgctaggaatttgcaacccaatttatatgtagtagctgaactgttcacaggaagtgaagatctggacaatgtctttgttactagactgggcattagttccttaataagagaggcaatgagtgcatataatagtcatgaagagggcagattagtttaccgatatggaggagaacctgttggatcctttgttcagccctgtttgaggcctttaatgccagctattgcacatgccctgtttatggatattacgcatgataatgagtgtcctattgtgcatagatcagcgtatgatgctcttccaagtactacaattgtttctatggcatgttgtgctagtggaagtacaagaggctatgatgaattagtgcctcatcagatttcagtggtttctgaagaacggttttacactaagtggaatcctgaagcattgccttcaaacacaggtgaagttaatttccaaagcggcattattgcagccaggtgtgctatcagtaaacttcatcaggagcttggagccaagggttttattcaggtgtatgtggatcaagttgatgaagacatagtggcagtaacaagacactcacctagcatccatcagtctgttgtggctgtatctagaactgctttcaggaatcccaagacttcattttacagcaaggaagtgcctcaaatgtgcatccctggcaaaattgaagaagtagttcttgaagctagaactattgagagaaacacgaaaccttataggaaggatgagaattcaatcaatggaacaccagatatcacagtagaaattagagaacatattcagcttaatgaaagtaaaattgttaaacaagctggagttgccacaaaagggcccaatgaatatattcaagaaatagaatttgaaaacttgtctccaggaagtgttattatattcagagttagtcttgatccacatgcacaagtcgctgttggaattcttcgaaatcatctgacacaattcagtcctcactttaaatctggcagcctagctgttgacaatgcagatcctatattaaaaattccttttgcttctcttgcctccagattaactttggctgagctaaatcagatcctttaccgatgtgaatcagaagaaaaggaagatggtggagggtgctatgacataccaaactggtcagcccttaaatatgcaggtcttcaaggtttaatgtctgtattggcagaaataagaccaaagaatgacttggggcatcctttttgtaataatttgagatctggagattggatgattgactatgtcagtaaccggcttatttcacgatcaggaactattgctgaagttggtaaatggttgcaggctatgttcttctacctgaagcagatcccacgttaccttatcccatgttactttgatgctatattaattggtgcatataccactcttctggatacagcatggaagcagatgtcaagctttgttcagaatggttcaacctttgtgaaacacctttcattgggttcagttcaactgtgtggagtaggaaaattcccttccctgccaattctttcacctgccctaatggatgtaccttataggttaaatgagatcacaaaagaaaaggagcaatgttgtgtttctctagctgcaggcttacctcatttttcttctggtattttccgctgctggggaagggatacttttattgcacttagaggtatactgctgattactggacgctatgtagaagccaggaatattattttagcatttgcgggtaccctgaggcatggtctcattcctaatctactgggtgaagggatttatgccagatacaattgtcgggatgctgtgtggtggtggctgcagtgtatccaggattactgtaaaatggttccaaatggtctagacattctcaagtgcccagtttccagaatgtatcctacagatgattctgctcctttgcctgctggcacactggatcagccattgtttgaagtcatacaggaagcaatgcaaaaacacatgcagggcatacagttccgagaaaggaatgctggtccccagatagatcgaaacatgaaggacgaaggttttaatataactgcaggagttgatgaagaaacaggatttgtttatggaggaaatcgtttcaattgtggcacatggatggataaaatgggagaaagtgacagagctagaaacagaggaatcccagccacaccaagagatgggtctgctgtggaaattgtgggcctgagtaaatctgctgttcgctggttgctggaattatccaaaaaaaatattttcccttatcatgaagtcacagtaaaaagacatggaaaggctataaaggtctcatatgatgagtggaacagaaaaatacaagacaactttgaaaagctatttcatgtttccgaagacccttcagatttaaatgaaaagcatccaaatctggttcacaaacgtggcatatacaaagatagttatggagcttcaagtccttggtgtgactatcagctcaggcctaattttaccatagcaatggttgtggcccctgagctctttactacagaaaaagcagggaaagctttggagattgcagaaaaaaaattgcttggtccccttggcatgaaaactttagatccagatgatatggtttactgtggaatttatgacaatgcattagacaatgacaactacaatcttgctaaaggtttcaattatcaccaaggacctgagtggctgtggcctattgggtattttcttcgtgcaaaattatatttttccagattgatgggcccggagactactgcaaagactatagttttggttaaaaatgttctttcccgacattatgttcatcttgagagatccccttggaaaggacttccagaactgaccaatgagaatgcccagtactgtcctttcagctgtgaaacacaagcctggtcaattgctactattcttgagacactttatgatttatagtttattacagatattaagtatgcaattacttgtattataggatgcaaggtcatcatatgtaaatgccttatatgcacaggctcaagttgttttaaaaatctcatttattataatattgatgctcaattaggtaagattgtaaaagcattgattttttttaatgtacagaggtagatttcaatttgaatcagaaagaaatatcattaccaatgaaatgtgtttgagttcagtaagaattattcaaatgcctagaaatccatagtttggaaaataaaaatcatgtcatcttctatttgtacagaaatgaaaataaaatatgaaaataatgaaagaaatgaaaagatagcttttaattgtggtatatataatcttcagtaacaatacatactgaatacgctgtggttcattaatattaacaccacgtactatagtattcttagaatacagtgctcactgcatttaataaatatttaataaatgatgaatgatagaagtttccatctacaatatatgttcctaaatggagcacagatgttcaaactatgctttcattttttcactgatatattaatttttgtgtaatgaatgccaacagtatattttatatgatttacttatgtgaggaaacatgcaaagcattaggaaatttatttcctaaaaacagttttgtaaaattagtattgagttctattgagtattataagatagcttacattttcaaaatggaaattgtcggtcatatttctagaactttaaagaaaaaagaatgttatattagttttctaaaactcaactatctttagtcatgttcaaaaatctattgctagatcatagtagatactggttttctattaactcaaaacctacattgacaagtttaacattgagaagaatcttaacaaaaatatggatatgaattcagtagatatcttaaattcaataaaatcactggaagtttttcatgataacttattttaagatgccttaaaaatcttaaagtcacaaaaggaaaaaggtttttaacatttacatgagttaacattttttcatagaacttatttcctagatagaattttttactgttttttactgttttcttaagaaaacagttaaatcattatgcattcagttggaagaaagtagtggcaagaattctttcattgctatataatattcagtggctcatttatacctaataaaataatggtattttaaaataatgctactttcaaagtagcatttttttagttagtttacaggttacatacccaaaaccttaactatgactaagaaattaaagaagaaaaccagcaaactaaaacttctgggcagcaaaaatatataaatgcttcagatgtcaaatacccatgcttgaaagctcgtgtaatttactttaagattatctgcctgctcttcttcaaagctgaccttgctttagaaatagttttaactagcttagttttctggtttccaaaactaaaatagattaaatcctacaaatttaaggacagttgtgacagtaatctgaccactatctataaatacattggacattggtttccaaatctccctttcttcttcagttccttccttgttcaatatatacccttctctaaactgtgcgggtaaaaggaatgactgtccttgagagaaccattagtttatcaaaggtttatgtagttttgttgctgtaccctaactttgatattcagggaggtaggaaaggtaacagaaaaccagcatatttaatcaaagcaagaagtaatcgctgacagttaaatgtgaccaaaaaaattaaaagttcacaatttttttaatgtagccatttggggttatctctagtaaggcagatacccacgttggtaaatttttaggatattgtgttgcactagaaaactaagtggttcatatttctaatgaggaagattaatgaaagaacattgttatattctgcgtggtatattttaaagtttaagaaggcatgttaaacattatttcctctatggtagttaaaatacagaattagatttttaacaggtgtcatttgactaaacgtttcggtagaatgcttcatacttgagtgatgctggataaggtattgtatttcaacaatggactatgccttggtttttcactaatcaaaatcaaaattactctttaacatgataaatgaatttaccagtttagtatgctgtggtattttaataagttttcaaagataattgggaaaacatgagactggtcatattgatgaatattgtaacatgtgaattgtgatccatttctgatatgtcttgaactactgtgtctagtgggcaaatgtcattgttacctctgtgtgttaagaaaataaaaatattttctaaaggtc

SEQ ID NO: 96106 - DNA, 7679 bp, Homo sapiens
ctgtctacggcagctattccagaggcaacaactgcttccctctgttctcatctccccattggtggctggcgacccgaatttgggaatggggagattgcccacctgttatctttgagcagactaatctcttgtaagcagaagtgccattcggagtctccagagccctgtggcttggggctgggaatgtccccctgacttcaggctttcctaagtgtattgcttttctctgagaatggtctaggtttttaattttttaattgtaagaatctgtaatacagcatttttatttcggtcttattcgttgtgctcaaaggcaggaaacaactattaatttgccttctcgaatcttaatagttataagattcattctctttcattgctctgctaggcataaaacacacttcgaacatgggtaactcattcgactgtggagttcttttaattcttatgaaagatttcaaatcctctggaagccaaaatgggacacagtaaacagattcgaattttacttctgaacgaaatggagaaactggaaaagaccctcttcagacttgaacaagggtatgagctacagttccgattaggcccaactttacagggaaaagcagttaccgtgtatacaaattacccatttcctggagaaacatttaatagagaaaaattccgttctctggattgggaaaatccaacagaaagagaagatgattctgataaatactgtaaacttaatctgcaacaatctggttcatttcagtattatttccttcaaggaaatgagaaaagtggtggaggttacatagttgtggaccccattttacgtgttggtgctgataatcatgtgctacccttggactgtgttactcttcagacatttttagctaagtgtttgggaccttttgatgaatgggaaagcagacttagggttgcaaaagaatcaggctacaacatgattcattttaccccattgcagactcttggactatctaggtcatgctactcccttgccaatcagttagaattaaatcctgacttttcaagacctaatagaaagtatacctggaatgatgttggacagctagtggaaaaattaaaaaaggaatggaatgttatttgtattactgatgttgtctacaatcatactgctgctaatagtaaatggatccaggaacatccagaatgtgcctataatcttgtgaattctccacacttaaaacctgcctgggtcttagacagagcactttggcgtttctcctgtgatgttgcagaagggaaatacaaagaaaagggaatacctgctttgattgaaaatgatcaccatatgaattccatccgaaaaataatttgggaggatatttttccaaagcttaaactctgggaatttttccaagtagatgtcaacaaagcggttgagcaatttagaagacttcttacacaagaaaataggcgagtaaccaagtctgatccaaaccaacaccttacgattattcaagatcctgaatacagacggtttggctgtactgtagatatgaacattgcactaacgactttcataccacatgacaaggggccagcagcaattgaagaatgctgtaattggtttcataaaagaatggaggaattaaattcagagaagcatcgactcattaactatcatcaggaacaggcagttaattgccttttgggaaatgtgttttatgaacgactggctggccatggtccaaaactaggacctgtcactagaaagcatcctttagttaccaggtattttactttcccatttgaagagatagacttctccatggaagaatctatgattcatctgccaaataaagcttgttttctgatggcacacaatggatgggtaatgggagatgatcctcttcgaaactttgctgaaccgggttcagaagtttacctaaggagagaacttatttgctggggagacagtgttaaattacgctatgggaataaaccagaggactgtccttatctctgggcacacatgaaaaaatacactgaaataactgcaacttatttccagggagtacgtcttgataactgccactcaacacctcttcacgtagctgagtacatgttggatgctgctaggaatttgcaacccaatttatatgtagtagctgaactgttcacaggaagtgaagatctggacaatgtctttgttactagactgggcattagttccttaataagagaggcaatgagtgcatataatagtcatgaagagggcagattagtttaccgatatggaggagaacctgttggatcctttgttcagccctgtttgaggcctttaatgccagctattgcacatgccctgtttatggatattacgcatgataatgagtgtcctattgtgcatagatcagcgtatgatgctcttccaagtactacaattgtttctatggcatgttgtgctagtggaagtacaagaggctatgatgaattagtgcctcatcagatttcagtggtttctgaagaacggttttacactaagtggaatcctgaagcattgccttcaaacacaggtgaagttaatttccaaagcggcattattgcagccaggtgtgctatcagtaaacttcatcaggagcttggagccaagggttttattcaggtgtatgtggatcaagttgatgaagacatagtggcagtaacaagacactcacctagcatccatcagtctgttgtggctgtatctagaactgctttcaggaatcccaagacttcattttacagcaaggaagtgcctcaaatgtgcatccctggcaaaattgaagaagtagttcttgaagctagaactattgagagaaacacgaaaccttataggaaggatgagaattcaatcaatggaacaccagatatcacagtagaaattagagaacatattcagcttaatgaaagtaaaattgttaaacaagctggagttgccacaaaagggcccaatgaatatattcaagaaatagaatttgaaaacttgtctccaggaagtgttattatattcagagttagtcttgatccacatgcacaagtcgctgttggaattcttcgaaatcatctgacacaattcagtcctcactttaaatctggcagcctagctgttgacaatgcagatcctatattaaaaattccttttgcttctcttgcctccagattaactttggctgagctaaatcagatcctttaccgatgtgaatcagaagaaaaggaagatggtggagggtgctatgacataccaaactggtcagcccttaaatatgcaggtcttcaaggtttaatgtctgtattggcagaaataagaccaaagaatgacttggggcatcctttttgtaataatttgagatctggagattggatgattgactatgtcagtaaccggcttatttcacgatcaggaactattgctgaagttggtaaatggttgcaggctatgttcttctacctgaagcagatcccacgttaccttatcccatgttactttgatgctatattaattggtgcatataccactcttctggatacagcatggaagcagatgtcaagctttgttcagaatggttcaacctttgtgaaacacctttcattgggttcagttcaactgtgtggagtaggaaaattcccttccctgccaattctttcacctgccctaatggatgtaccttataggttaaatgagatcacaaaagaaaaggagcaatgttgtgtttctctagctgcaggcttacctcatttttcttctggtattttccgctgctggggaagggatacttttattgcacttagaggtatactgctgattactggacgctatgtagaagccaggaatattattttagcatttgcgggtaccctgaggcatggtctcattcctaatctactgggtgaagggatttatgccagatacaattgtcgggatgctgtgtggtggtggctgcagtgtatccaggattactgtaaaatggttccaaatggtctagacattctcaagtgcccagtttccagaatgtatcctacagatgattctgctcctttgcctgctggcacactggatcagccattgtttgaagtcatacaggaagcaatgcaaaaacacatgcagggcatacagttccgagaaaggaatgctggtccccagatagatcgaaacatgaaggacgaaggttttaatataactgcaggagttgatgaagaaacaggatttgtttatggaggaaatcgtttcaattgtggcacatggatggataaaatgggagaaagtgacagagctagaaacagaggaatcccagccacaccaagagatgggtctgctgtggaaattgtgggcctgagtaaatctgctgttcgctggttgctggaattatccaaaaaaaatattttcccttatcatgaagtcacagtaaaaagacatggaaaggctataaaggtctcatatgatgagtggaacagaaaaatacaagacaactttgaaaagctatttcatgtttccgaagacccttcagatttaaatgaaaagcatccaaatctggttcacaaacgtggcatatacaaagatagttatggagcttcaagtccttggtgtgactatcagctcaggcctaattttaccatagcaatggttgtggcccctgagctctttactacagaaaaagcagggaaagctttggagattgcagaaaaaaaattgcttggtccccttggcatgaaaactttagatccagatgatatggtttactgtggaatttatgacaatgcattagacaatgacaactacaatcttgctaaaggtttcaattatcaccaaggacctgagtggctgtggcctattgggtattttcttcgtgcaaaattatatttttccagattgatgggcccggagactactgcaaagactatagttttggttaaaaatgttctttcccgacattatgttcatcttgagagatccccttggaaaggacttccagaactgaccaatgagaatgcccagtactgtcctttcagctgtgaaacacaagcctggtcaattgctactattcttgagacactttatgatttatagtttattacagatattaagtatgcaattacttgtattataggatgcaaggtcatcatatgtaaatgccttatatgcacaggctcaagttgttttaaaaatctcatttattataatattgatgctcaattaggtaagattgtaaaagcattgattttttttaatgtacagaggtagatttcaatttgaatcagaaagaaatatcattaccaatgaaatgtgtttgagttcagtaagaattattcaaatgcctagaaatccatagtttggaaaataaaaatcatgtcatcttctatttgtacagaaatgaaaataaaatatgaaaataatgaaagaaatgaaaagatagcttttaattgtggtatatataatcttcagtaacaatacatactgaatacgctgtggttcattaatattaacaccacgtactatagtattcttagaatacagtgctcactgcatttaataaatatttaataaatgatgaatgatagaagtttccatctacaatatatgttcctaaatggagcacagatgttcaaactatgctttcattttttcactgatatattaatttttgtgtaatgaatgccaacagtatattttatatgatttacttatgtgaggaaacatgcaaagcattaggaaatttatttcctaaaaacagttttgtaaaattagtattgagttctattgagtattataagatagcttacattttcaaaatggaaattgtcggtcatatttctagaactttaaagaaaaaagaatgttatattagttttctaaaactcaactatctttagtcatgttcaaaaatctattgctagatcatagtagatactggttttctattaactcaaaacctacattgacaagtttaacattgagaagaatcttaacaaaaatatggatatgaattcagtagatatcttaaattcaataaaatcactggaagtttttcatgataacttattttaagatgccttaaaaatcttaaagtcacaaaaggaaaaaggtttttaacatttacatgagttaacattttttcatagaacttatttcctagatagaattttttactgttttttactgttttcttaagaaaacagttaaatcattatgcattcagttggaagaaagtagtggcaagaattctttcattgctatataatattcagtggctcatttatacctaataaaataatggtattttaaaataatgctactttcaaagtagcatttttttagttagtttacaggttacatacccaaaaccttaactatgactaagaaattaaagaagaaaaccagcaaactaaaacttctgggcagcaaaaatatataaatgcttcagatgtcaaatacccatgcttgaaagctcgtgtaatttactttaagattatctgcctgctcttcttcaaagctgaccttgctttagaaatagttttaactagcttagttttctggtttccaaaactaaaatagattaaatcctacaaatttaaggacagttgtgacagtaatctgaccactatctataaatacattggacattggtttccaaatctccctttcttcttcagttccttccttgttcaatatatacccttctctaaactgtgcgggtaaaaggaatgactgtccttgagagaaccattagtttatcaaaggtttatgtagttttgttgctgtaccctaactttgatattcagggaggtaggaaaggtaacagaaaaccagcatatttaatcaaagcaagaagtaatcgctgacagttaaatgtgaccaaaaaaattaaaagttcacaatttttttaatgtagccatttggggttatctctagtaaggcagatacccacgttggtaaatttttaggatattgtgttgcactagaaaactaagtggttcatatttctaatgaggaagattaatgaaagaacattgttatattctgcgtggtatattttaaagtttaagaaggcatgttaaacattatttcctctatggtagttaaaatacagaattagatttttaacaggtgtcatttgactaaacgtttcggtagaatgcttcatacttgagtgatgctggataaggtattgtatttcaacaatggactatgccttggtttttcactaatcaaaatcaaaattactctttaacatgataaatgaatttaccagtttagtatgctgtggtattttaataagttttcaaagataattgggaaaacatgagactggtcatattgatgaatattgtaacatgtgaattgtgatccatttctgatatgtcttgaactactgtgtctagtgggcaaatgtcattgttacctctgtgtgttaagaaaataaaaatattttctaaaggtcaaaaaacacagcacaacaaccaaacacacaacaccaaacaacacaacacaatattataacacaaagacaccaacaaaaatatggtcggcgcgcgcgccaccacagactttaaaccagtgcgtgcggggcgcaacggaaaagaaagatgattctacagaaccgcgcgaggggtgcctccaaaaaaaagcgggcaagccgtgcaaacacagggtgcggcgggcacagaaggac

SEQ ID NO: 96107 - DNA, 7432 bp, Homo sapiens
ctgtctacggcagctattccagaggcaacaactgcttccctctgttctcatctccccattggtggctggcgacccgaatttgggaatggggagattgcccacctgttatctttgagcagactaatctcttgtaagcagaagtgccattcggagtctccagagccctgtggcttggggctgggaatgtccccctgacttcaggctttcctaagtgtattgcttttctctgagaatggtctaggtttttaattttttaattgtaagaatctgtaatacagcatttttatttcggtcttattcgttgtgctcaaaggcaggaaacaactattaatttgccttctcgaatcttaatagttataagattcattctctttcattgctctgctaggcataaaacacacttcgaacatgggtaactcattcgactgtggagttcttttaattcttatgaaagatttcaaatcctctggaagccaaaatgggacacagtaaacagattcgaattttacttctgaacgaaatggagaaactggaaaagaccctcttcagacttgaacaagggtatgagctacagttccgattaggcccaactttacagggaaaagcagttaccgtgtatacaaattacccatttcctggagaaacatttaatagagaaaaattccgttctctggattgggaaaatccaacagaaagagaagatgattctgataaatactgtaaacttaatctgcaacaatctggttcatttcagtattatttccttcaaggaaatgagaaaagtggtggaggttacatagttgtggaccccattttacgtgttggtgctgataatcatgtgctacccttggactgtgttactcttcagacatttttagctaagtgtttgggaccttttgatgaatgggaaagcagacttagggttgcaaaagaatcaggctacaacatgattcattttaccccattgcagactcttggactatctaggtcatgctactcccttgccaatcagttagaattaaatcctgacttttcaagacctaatagaaagtatacctggaatgatgttggacagctagtggaaaaattaaaaaaggaatggaatgttatttgtattactgatgttgtctacaatcatactgctgctaatagtaaatggatccaggaacatccagaatgtgcctataatcttgtgaattctccacacttaaaacctgcctgggtcttagacagagcactttggcgtttctcctgtgatgttgcagaagggaaatacaaagaaaagggaatacctgctttgattgaaaatgatcaccatatgaattccatccgaaaaataatttgggaggatatttttccaaagcttaaactctgggaatttttccaagtagatgtcaacaaagcggttgagcaatttagaagacttcttacacaagaaaataggcgagtaaccaagtctgatccaaaccaacaccttacgattattcaagatcctgaatacagacggtttggctgtactgtagatatgaacattgcactaacgactttcataccacatgacaaggggccagcagcaattgaagaatgctgtaattggtttcataaaagaatggaggaattaaattcagagaagcatcgactcattaactatcatcaggaacaggcagttaattgccttttgggaaatgtgttttatgaacgactggctggccatggtccaaaactaggacctgtcactagaaagcatcctttagttaccaggtattttactttcccatttgaagagatagacttctccatggaagaatctatgattcatctgccaaataaagcttgttttctgatggcacacaatggatgggtaatgggagatgatcctcttcgaaactttgctgaaccgggttcagaagtttacctaaggagagaacttatttgctggggagacagtgttaaattacgctatgggaataaaccagaggactgtccttatctctgggcacacatgaaaaaatacactgaaataactgcaacttatttccagggagtacgtcttgataactgccactcaacacctcttcacgtagctgagtacatgttggatgctgctaggaatttgcaacccaatttatatgtagtagctgaactgttcacaggaagtgaagatctggacaatgtctttgttactagactgggcattagttccttaataagagaggcaatgagtgcatataatagtcatgaagagggcagattagtttaccgatatggaggagaacctgttggatcctttgttcagccctgtttgaggcctttaatgccagctattgcacatgccctgtttatggatattacgcatgataatgagtgtcctattgtgcatagatcagcgtatgatgctcttccaagtactacaattgtttctatggcatgttgtgctagtggaagtacaagaggctatgatgaattagtgcctcatcagatttcagtggtttctgaagaacggttttacactaagtggaatcctgaagcattgccttcaaacacaggtgaagttaatttccaaagcggcattattgcagccaggtgtgctatcagtaaacttcatcaggagcttggagccaagggttttattcaggtgtatgtggatcaagttgatgaagacatagtggcagtaacaagacactcacctagcatccatcagtctgttgtggctgtatctagaactgctttcaggaatcccaagacttcattttacagcaaggaagtgcctcaaatgtgcatccctggcaaaattgaagaagtagttcttgaagctagaactattgagagaaacacgaaaccttataggaaggatgagaattcaatcaatggaacaccagatatcacagtagaaattagagaacatattcagcttaatgaaagtaaaattgttaaacaagctggagttgccacaaaagggcccaatgaatatattcaagaaatagaatttgaaaacttgtctccaggaagtgttattatattcagagttagtcttgatccacatgcacaagtcgctgttggaattcttcgaaatcatctgacacaattcagtcctcactttaaatctggcagcctagctgttgacaatgcagatcctatattaaaaattccttttgcttctcttgcctccagattaactttggctgagctaaatcagatcctttaccgatgtgaatcagaagaaaaggaagatggtggagggtgctatgacataccaaactggtcagcccttaaatatgcaggtcttcaaggtttaatgtctgtattggcagaaataagaccaaagaatgacttggggcatcctttttgtaataatttgagatctggagattggatgattgactatgtcagtaaccggcttatttcacgatcaggaactattgctgaagttggtaaatggttgcaggctatgttcttctacctgaagcagatcccacgttaccttatcccatgttactttgatgctatattaattggtgcatataccactcttctggatacagcatggaagcagatgtcaagctttgttcagaatggttcaacctttgtgaaacacctttcattgggttcagttcaactgtgtggagtaggaaaattcccttccctgccaattctttcacctgccctaatggatgtaccttataggttaaatgagatcacaaaagaaaaggagcaatgttgtgtttctctagctgcaggcttacctcatttttcttctggtattttccgctgctggggaagggatacttttattgcacttagaggtatactgctgattactggacgctatgtagaagccaggaatattattttagcatttgcgggtaccctgaggcatggtctcattcctaatctactgggtgaagggatttatgccagatacaattgtcgggatgctgtgtggtggtggctgcagtgtatccaggattactgtaaaatggttccaaatggtctagacattctcaagtgcccagtttccagaatgtatcctacagatgattctgctcctttgcctgctggcacactggatcagccattgtttgaagtcatacaggaagcaatgcaaaaacacatgcagggcatacagttccgagaaaggaatgctggtccccagatagatcgaaacatgaaggacgaaggttttaatataactgcaggagttgatgaagaaacaggatttgtttatggaggaaatcgtttcaattgtggcacatggatggataaaatgggagaaagtgacagagctagaaacagaggaatcccagccacaccaagagatgggtctgctgtggaaattgtgggcctgagtaaatctgctgttcgctggttgctggaattatccaaaaaaaatattttcccttatcatgaagtcacagtaaaaagacatggaaaggctataaaggtctcatatgatgagtggaacagaaaaatacaagacaactttgaaaagctatttcatgtttccgaagacccttcagatttaaatgaaaagcatccaaatctggttcacaaacgtggcatatacaaagatagttatggagcttcaagtccttggtgtgactatcagctcaggcctaattttaccatagcaatggttgtggcccctgagctctttactacagaaaaagcagggaaagctttggagattgcagaaaaaaaattgcttggtccccttggcatgaaaactttagatccagatgatatggtttactgtggaatttatgacaatgcattagacaatgacaactacaatcttgctaaaggtttcaattatcaccaaggacctgagtggctgtggcctattgggtattttcttcgtgcaaaattatatttttccagattgatgggcccggagactactgcaaagactatagttttggttaaaaatgttctttcccgacattatgttcatcttgagagatccccttggaaaggacttccagaactgaccaatgagaatgcccagtactgtcctttcagctgtgaaacacaagcctggtcaattgctactattcttgagacactttatgatttatagtttattacagatattaagtatgcaattacttgtattataggatgcaaggtcatcatatgtaaatgccttatatgcacaggctcaagttgttttaaaaatctcatttattataatattgatgctcaattaggtaagattgtaaaagcattgattttttttaatgtacagaggtagatttcaatttgaatcagaaagaaatatcattaccaatgaaatgtgtttgagttcagtaagaattattcaaatgcctagaaatccatagtttggaaaataaaaatcatgtcatcttctatttgtacagaaatgaaaataaaatatgaaaataatgaaagaaatgaaaagatagcttttaattgtggtatatataatcttcagtaacaatacatactgaatacgctgtggttcattaatattaacaccacgtactatagtattcttagaatacagtgctcactgcatttaataaatatttaataaatgatgaatgatagaagtttccatctacaatatatgttcctaaatggagcacagatgttcaaactatgctttcattttttcactgatatattaatttttgtgtaatgaatgccaacagtatattttatatgatttacttatgtgaggaaacatgcaaagcattaggaaatttatttcctaaaaacagttttgtaaaattagtattgagttctattgagtattataagatagcttacattttcaaaatggaaattgtcggtcatatttctagaactttaaagaaaaaagaatgttatattagttttctaaaactcaactatctttagtcatgttcaaaaatctattgctagatcatagtagatactggttttctattaactcaaaacctacattgacaagtttaacattgagaagaatcttaacaaaaatatggatatgaattcagtagatatcttaaattcaataaaatcactggaagtttttcatgataacttattttaagatgccttaaaaatcttaaagtcacaaaaggaaaaaggtttttaacattttttcatagaacttatttcctagatagaattttttactgttttttactgttttcttaagaaaacagttaaatcattatgcattcagttggaagaaagtagtggcaagaattctttcattgctatataatattcagtggctcatttatacctaataaaataatggtattttaaaataatgctactttcaaagtagcatttttttagttagtttacaggttacatacccaaaaccttaactatgactaagaaattaaagaagaaaaccagcaaactaaaacttctgggcagcaaaaatatataaatgcttcagatgtcaaatacccatgcttgaaagctcgtgtaatttactttaagattatctgcctgctcttcttcaaagctgaccttgctttagaaatagttttaactagcttagttttctggtttccaaaactaaaatagattaaatcctacaaatttaaggacagttgtgacagtaatctgaccactatctataaatacattggacattggtttccaaatctccctttcttcttcagttccttccttgttcaatatatacccttctctaaactgtgcgggtaaaaggaatgactgtccttgagagaaccattagtttatcaaaggtttatgtagttttgttgctgtaccctaactttgatattcagggaggtaggaaaggtaacagaaaaccagcatatttaatcaaagcaagaagtaatcgctgacagttaaatgtgaccaaaaaaattaaaagttcacaatttttttaatgtagccatttggggttatctctagtaaggcagatacccacgttggtaaatttttaggatattgtgttgcactagaaaactaagtggttcatatttctaatgaggaagattaatgaaagaacattgttatattctgcgtggtatattttaaagtttaagaaggcatgttaaacattatttcctctatggtagttaaaatacagaattagatttttaacaggtgtcatttgactaaacgtttcggtagaatgcttcatacttgagtgatgctggataaggtattgtatttcaacaatggactatgccttggtttttcactaatcaaaatcaaaattactctttaacatgataaatgaatttaccagtttagtatgctgtggtattttaataagttttcaaagataattgggaaaacatgagactggtcatattgatgaatattgtaacatgtgaattgtgatccatttctgatatgtcttgaactactgtgtctagtgggcaaatgtcattgttacctctgtgtgttaagaaaataaaaatattttctaaaggtc

SEQ ID NO: 96108 - DNA, 6231 bp, Homo sapiens
tttctcccccacacccctcgtgtgtgtttgcgcgtgcacgcacgtgcacacacgtgcacacagcaggatgagaaggggaggaggtaggaggatacctgtgaaataaatatttgttttattttcagtgaaaaaattataggccaaaaattagaaaatagtgacagttataatctctttgtagatatttgcatttaaggtatcatcttttctttcttttagaaaataggcgagtaaccaagtctgatccaaaccaacaccttacgattattcaagatcctgaatacagacggtttggctgtactgtagatatgaacattgcactaacgactttcataccacatgacaaggggccagcagcaattgaagaatgctgtaattggtttcataaaagaatggaggaattaaattcagagaagcatcgactcattaactatcatcaggaacaggcagttaattgccttttgggaaatgtgttttatgaacgactggctggccatggtccaaaactaggacctgtcactagaaagcatcctttagttaccaggtattttactttcccatttgaagagatagacttctccatggaagaatctatgattcatctgccaaataaagcttgttttctgatggcacacaatggatgggtaatgggagatgatcctcttcgaaactttgctgaaccgggttcagaagtttacctaaggagagaacttatttgctggggagacagtgttaaattacgctatgggaataaaccagaggactgtccttatctctgggcacacatgaaaaaatacactgaaataactgcaacttatttccagggagtacgtcttgataactgccactcaacacctcttcacgtagctgagtacatgttggatgctgctaggaatttgcaacccaatttatatgtagtagctgaactgttcacaggaagtgaagatctggacaatgtctttgttactagactgggcattagttccttaataagagaggcaatgagtgcatataatagtcatgaagagggcagattagtttaccgatatggaggagaacctgttggatcctttgttcagccctgtttgaggcctttaatgccagctattgcacatgccctgtttatggatattacgcatgataatgagtgtcctattgtgcatagatcagcgtatgatgctcttccaagtactacaattgtttctatggcatgttgtgctagtggaagtacaagaggctatgatgaattagtgcctcatcagatttcagtggtttctgaagaacggttttacactaagtggaatcctgaagcattgccttcaaacacaggtgaagttaatttccaaagcggcattattgcagccaggtgtgctatcagtaaacttcatcaggagcttggagccaagggttttattcaggtgtatgtggatcaagttgatgaagacatagtggcagtaacaagacactcacctagcatccatcagtctgttgtggctgtatctagaactgctttcaggaatcccaagacttcattttacagcaaggaagtgcctcaaatgtgcatccctggcaaaattgaagaagtagttcttgaagctagaactattgagagaaacacgaaaccttataggaaggatgagaattcaatcaatggaacaccagatatcacagtagaaattagagaacatattcagcttaatgaaagtaaaattgttaaacaagctggagttgccacaaaagggcccaatgaatatattcaagaaatagaatttgaaaacttgtctccaggaagtgttattatattcagagttagtcttgatccacatgcacaagtcgctgttggaattcttcgaaatcatctgacacaattcagtcctcactttaaatctggcagcctagctgttgacaatgcagatcctatattaaaaattccttttgcttctcttgcctccagattaactttggctgagctaaatcagatcctttaccgatgtgaatcagaagaaaaggaagatggtggagggtgctatgacataccaaactggtcagcccttaaatatgcaggtcttcaaggtttaatgtctgtattggcagaaataagaccaaagaatgacttggggcatcctttttgtaataatttgagatctggagattggatgattgactatgtcagtaaccggcttatttcacgatcaggaactattgctgaagttggtaaatggttgcaggctatgttcttctacctgaagcagatcccacgttaccttatcccatgttactttgatgctatattaattggtgcatataccactcttctggatacagcatggaagcagatgtcaagctttgttcagaatggttcaacctttgtgaaacacctttcattgggttcagttcaactgtgtggagtaggaaaattcccttccctgccaattctttcacctgccctaatggatgtaccttataggttaaatgagatcacaaaagaaaaggagcaatgttgtgtttctctagctgcaggcttacctcatttttcttctggtattttccgctgctggggaagggatacttttattgcacttagaggtatactgctgattactggacgctatgtagaagccaggaatattattttagcatttgcgggtaccctgaggcatggtctcattcctaatctactgggtgaagggatttatgccagatacaattgtcgggatgctgtgtggtggtggctgcagtgtatccaggattactgtaaaatggttccaaatggtctagacattctcaagtgcccagtttccagaatgtatcctacagatgattctgctcctttgcctgctggcacactggatcagccattgtttgaagtcatacaggaagcaatgcaaaaacacatgcagggcatacagttccgagaaaggaatgctggtccccagatagatcgaaacatgaaggacgaaggttttaatataactgcaggagttgatgaagaaacaggatttgtttatggaggaaatcgtttcaattgtggcacatggatggataaaatgggagaaagtgacagagctagaaacagaggaatcccagccacaccaagagatgggtctgctgtggaaattgtgggcctgagtaaatctgctgttcgctggttgctggaattatccaaaaaaaatattttcccttatcatgaagtcacagtaaaaagacatggaaaggctataaaggtctcatatgatgagtggaacagaaaaatacaagacaactttgaaaagctatttcatgtttccgaagacccttcagatttaaatgaaaagcatccaaatctggttcacaaacgtggcatatacaaagatagttatggagcttcaagtccttggtgtgactatcagctcaggcctaattttaccatagcaatggttgtggcccctgagctctttactacagaaaaagcagggaaagctttggagattgcagaaaaaaaattgcttggtccccttggcatgaaaactttagatccagatgatatggtttactgtggaatttatgacaatgcattagacaatgacaactacaatcttgctaaaggtttcaattatcaccaaggacctgagtggctgtggcctattgggtattttcttcgtgcaaaattatatttttccagattgatgggcccggagactactgcaaagactatagttttggttaaaaatgttctttcccgacattatgttcatcttgagagatccccttggaaaggacttccagaactgaccaatgagaatgcccagtactgtcctttcagctgtgaaacacaagcctggtcaattgctactattcttgagacactttatgatttatagtttattacagatattaagtatgcaattacttgtattataggatgcaaggtcatcatatgtaaatgccttatatgcacaggctcaagttgttttaaaaatctcatttattataatattgatgctcaattaggtaagattgtaaaagcattgattttttttaatgtacagaggtagatttcaatttgaatcagaaagaaatatcattaccaatgaaatgtgtttgagttcagtaagaattattcaaatgcctagaaatccatagtttggaaaataaaaatcatgtcatcttctatttgtacagaaatgaaaataaaatatgaaaataatgaaagaaatgaaaagatagcttttaattgtggtatatataatcttcagtaacaatacatactgaatacgctgtggttcattaatattaacaccacgtactatagtattcttagaatacagtgctcactgcatttaataaatatttaataaatgatgaatgatagaagtttccatctacaatatatgttcctaaatggagcacagatgttcaaactatgctttcattttttcactgatatattaatttttgtgtaatgaatgccaacagtatattttatatgatttacttatgtgaggaaacatgcaaagcattaggaaatttatttcctaaaaacagttttgtaaaattagtattgagttctattgagtattataagatagcttacattttcaaaatggaaattgtcggtcatatttctagaactttaaagaaaaaagaatgttatattagttttctaaaactcaactatctttagtcatgttcaaaaatctattgctagatcatagtagatactggttttctattaactcaaaacctacattgacaagtttaacattgagaagaatcttaacaaaaatatggatatgaattcagtagatatcttaaattcaataaaatcactggaagtttttcatgataacttattttaagatgccttaaaaatcttaaagtcacaaaaggaaaaaggtttttaacatttacatgagttaacattttttcatagaacttatttcctagatagaattttttactgttttttactgttttcttaagaaaacagttaaatcattatgcattcagttggaagaaagtagtggcaagaattctttcattgctatataatattcagtggctcatttatacctaataaaataatggtattttaaaataatgctactttcaaagtagcatttttttagttagtttacaggttacatacccaaaaccttaactatgactaagaaattaaagaagaaaaccagcaaactaaaacttctgggcagcaaaaatatataaatgcttcagatgtcaaatacccatgcttgaaagctcgtgtaatttactttaagattatctgcctgctcttcttcaaagctgaccttgctttagaaatagttttaactagcttagttttctggtttccaaaactaaaatagattaaatcctacaaatttaaggacagttgtgacagtaatctgaccactatctataaatacattggacattggtttccaaatctccctttcttcttcagttccttccttgttcaatatatacccttctctaaactgtgcgggtaaaaggaatgactgtccttgagagaaccattagtttatcaaaggtttatgtagttttgttgctgtaccctaactttgatattcagggaggtaggaaaggtaacagaaaaccagcatatttaatcaaagcaagaagtaatcgctgacagttaaatgtgaccaaaaaaattaaaagttcacaatttttttaatgtagccatttggggttatctctagtaaggcagatacccacgttggtaaatttttaggatattgtgttgcactagaaaactaagtggttcatatttctaatgaggaagattaatgaaagaacattgttatattctgcgtggtatattttaaagtttaagaaggcatgttaaacattatttcctctatggtagttaaaatacagaattagatttttaacaggtgtcatttgactaaacgtttcggtagaatgcttcatacttgagtgatgctggataaggtattgtatttcaacaatggactatgccttggtttttcactaatcaaaatcaaaattactctttaacatgataaatgaatttaccagtttagtatgctgtggtattttaataagttttcaaagataattgggaaaacatgagactggtcatattgatgaatattgtaacatgtgaattgtgatccatttctgatatgtcttgaactactgtgtctagtgggcaaatgtcattgttacctctgtgtgttaagaaaataaaaatattttctaaaggtc

SEQ ID NO: 96109 - DNA, 7520 bp, Homo sapiens
ctgtctacggcagctattccagaggcaacaactgcttccctctgttctcatctccccattggtggctggcgacccgaatttgggaatggggagattgcccacctgttatctttgagcagactaatctcttgtaagcagaagtgccattcggagtctccagagccctgtggcttggggctgggaatgtccccctgacttcaggctttcctaagtgtattgcttttctctgagaatggtctaggtttttaattttttaattgtaagaatctgtaatacagcatttttatttcggtcttattcgttgtgctcaaaggcaggaaacaactattaatttgccttctcgaatcttaatagttataagattcattctctttcattgctctgctaggcataaaacacacttcgaacatgggtaactcattcgactgtggagttcttttaattcttatgaaagatttcaaatcctctggaagccaaaatgggacacagtaaacagattcgaattttacttctgaacgaaatggagaaactggaaaagaccctcttcagacttgaacaagggtatgagctacagttccgattaggcccaactttacagggaaaagcagttaccgtgtatacaaattacccatttcctggagaaacatttaatagagaaaaattccgttctctggattgggaaaatccaacagaaagagaagatgattctgataaatactgtaaacttaatctgcaacaatctggttcatttcagtattatttccttcaaggaaatgagaaaagtggtggaggttacatagttgtggaccccattttacgtgttggtgctgataatcatgtgctacccttggactgtgttactcttcagacatttttagctaagtgtttgggaccttttgatgaatgggaaagcagacttagggttgcaaaagaatcaggctacaacatgattcattttaccccattgcagactcttggactatctaggtcatgctactcccttgccaatcagttagaattaaatcctgacttttcaagacctaatagaaagtatacctggaatgatgttggacagctagtggaaaaattaaaaaaggaatggaatgttatttgtattactgatgttgtctacaatcatactgctgctaatagtaaatggatccaggaacatccagaatgtgcctataatcttgtgaattctccacacttaaaacctgcctgggtcttagacagagcactttggcgtttctcctgtgatgttgcagaagggaaatacaaagaaaagggaatacctgctttgattgaaaatgatcaccatatgaattccatccgaaaaataatttgggaggatatttttccaaagcttaaactctgggaatttttccaagtagatgtcaacaaagcggttgagcaatttagaagacttcttacacaagaaaataggcgagtaaccaagtctgatccaaaccaacaccttacgattattcaagatcctgaatacagacggtttggctgtactgtagatatgaacattgcactaacgactttcataccacatgacaaggggccagcagcaattgaagaatgctgtaattggtttcataaaagaatggaggaattaaattcagagaagcatcgactcattaactatcatcaggaacaggcagttaattgccttttgggaaatgtgttttatgaacgactggctggccatggtccaaaactaggacctgtcactagaaagcatcctttagttaccaggtattttactttcccatttgaagagatagacttctccatggaagaatctatgattcatctgccaaataaagcttgttttctgatggcacacaatggatgggtaatgggagatgatcctcttcgaaactttgctgaaccgggttcagaagtttacctaaggagagaacttatttgctggggagacagtgttaaattacgctatgggaataaaccagaggactgtccttatctctgggcacacatgaaaaaatacactgaaataactgcaacttatttccagggagtacgtcttgataactgccactcaacacctcttcacgtagctgagtacatgttggatgctgctaggaatttgcaacccaatttatatgtagtagctgaactgttcacaggaagtgaagatctggacaatgtctttgttactagactgggcattagttccttaataagagaggcaatgagtgcatataatagtcatgaagagggcagattagtttaccgatatggaggagaacctgttggatcctttgttcagccctgtttgaggcctttaatgccagctattgcacatgccctgtttatggatattacgcatgataatgagtgtcctattgtgcatagatcagcgtatgatgctcttccaagtactacaattgtttctatggcatgttgtgctagtggaagtacaagaggctatgatgaattagtgcctcatcagatttcagtggtttctgaagaacggttttacactaagtggaatcctgaagcattgccttcaaacacaggtgaagttaatttccaaagcggcattattgcagccaggtgtgctatcagtaaacttcatcaggagcttggagccaagggttttattcaggtgtatgtggatcaagttgatgaagacatagtggcagtaacaagacactcacctagcatccatcagtctgttgtggctgtatctagaactgctttcaggaatcccaagacttcattttacagcaaggaagtgcctcaaatgtgcatccctggcaaaattgaagaagtagttcttgaagctagaactattgagagaaacacgaaaccttataggaaggatgagaattcaatcaatggaacaccagatatcacagtagaaattagagaacatattcagcttaatgaaagtaaaattgttaaacaagctggagttgccacaaaagggcccaatgaatatattcaagaaatagaatttgaaaacttgtctccaggaagtgttattatattcagagttagtcttgatccacatgcacaagtcgctgttggaattcttcgaaatcatctgacacaattcagtcctcactttaaatctggcagcctagctgttgacaatgcagatcctatattaaaaattccttttgcttctcttgcctccagattaactttggctgagctaaatcagatcctttaccgatgtgaatcagaagaaaaggaagatggtggagggtgctatgacataccaaactggtcagcccttaaatatgcaggtcttcaaggtttaatgtctgtattggcagaaataagaccaaagaatgacttggggcatcctttttgtaataatttgagatctggagattggatgattgactatgtcagtaaccggcttatttcacgatcaggaactattgctgaagttggtaaatggttgcaggctatgttcttctacctgaagcagatcccacgttaccttatcccatgttactttgatgctatattaattggtgcatataccactcttctggatacagcatggaagcagatgtcaagctttgttcagaatggttcaacctttgtgaaacacctttcattgggttcagttcaactgtgtggagtaggaaaattcccttccctgccaattctttcacctgccctaatggatgtaccttataggttaaatgagatcacaaaagaaaaggagcaatgttgtgtttctctagctgcaggcttacctcatttttcttctggtattttccgctgctggggaagggatacttttattgcacttagaggtatactgctgattactggacgctatgtagaagccaggaatattattttagcatttgcgggtaccctgaggcatggtctcattcctaatctactgggtgaagggatttatgccagatacaattgtcgggatgctgtgtggtggtggctgcagtgtatccaggattactgtaaaatggttccaaatggtctagacattctcaagtgcccagtttccagaatgtatcctacagatgattctgctcctttgcctgctggcacactggatcagccattgtttgaagtcatacaggaagcaatgcaaaaacacatgcagggcatacagttccgagaaaggaatgctggtccccagatagatcgaaacatgaaggacgaaggttttaatataactgcaggagttgatgaagaaacaggatttgtttatggaggaaatcgtttcaattgtggcacatggatggataaaatgggagaaagtgacagagctagaaacagaggaatcccagccacaccaagagatgggtctgctgtggaaattgtgggcctgagtaaatctgctgttcgctggttgctggaattatccaaaaaaaatattttcccttatcatgaagtcacagtaaaaagacatggaaaggctataaaggtctcatatgatgagtggaacagaaaaatacaagacaactttgaaaagctatttcatgtttccgaagacccttcagatttaaatgaaaagcatccaaatctggttcacaaacgtggcatatacaaagatagttatggagcttcaagtccttggtgtgactatcagctcaggcctaattttaccatagcaatggttgtggcccctgagctctttactacagaaaaagcagggaaagctttggagattgcagaaaaaaaattgcttggtccccttggcatgaaaactttagatccagatgatatggtttactgtggaatttatgacaatgcattagacaatgacaactacaatcttgctaaaggtttcaattatcaccaaggacctgagtggctgtggcctattgggtattttcttcgtgcaaaattatatttttccagattgatgggcccggagactactgcaaagactatagttttggttaaaaatgttctttcccgacattatgttcatcttgagagatccccttggaaaggacttccagaactgaccaatgagaatgcccagtactgtcctttcagctgtgaaacacaagcctggtcaattgctactattcttgagacactttatgatttatagtttattacagatattaagtatgcaattacttgtattataggatgcaaggtcatcatatgtaaatgccttatatgcacaggctcaagttgttttaaaaatctcatttattataatattgatgctcaattaggtaagattgtaaaagcattgattttttttaatgtacagaggtagatttcaatttgaatcagaaagaaatatcattaccaatgaaatgtgtttgagttcagtaagaattattcaaatgcctagaaatccatagtttggaaaataaaaatcatgtcatcttctatttgtacagaaatgaaaataaaatatgaaaataatgaaagaaatgaaaagatagcttttaattgtggtatatataatcttcagtaacaatacatactgaatacgctgtggttcattaatattaacaccacgtactatagtattcttagaatacagtgctcactgcatttaataaatatttaataaatgatgaatgatagaagtttccatctacaatatatgttcctaaatggagcacagatgttcaaactatgctttcattttttcactgatatattaatttttgtgtaatgaatgccaacagtatattttatatgatttacttatgtgaggaaacatgcaaagcattaggaaatttatttcctaaaaacagttttgtaaaattagtattgagttctattgagtattataagatagcttacattttcaaaatggaaattgtcggtcatatttctagaactttaaagaaaaaagaatgttatattagttttctaaaactcaactatctttagtcatgttcaaaaatctattgctagatcatagtagatactggttttctattaactcaaaacctacattgacaagtttaacattgagaagaatcttaacaaaaatatggatatgaattcagtagatatcttaaattcaataaaatcactggaagtttttcatgataacttattttaagatgccttaaaaatcttaaagtcacaaaaggaaaaaggtttttaacatttacatgagttaacattttttcatagaacttatttcctagatagaattttttactgttttttactgttttcttaagaaaacagttaaatcattatgcattcagttggaagaaagtagtggcaagaattctttcattgctatataatattcagtggctcatttatacctaataaaataatggtattttaaaataatgctactttcaaagtagcatttttttagttagtttacaggttacatacccaaaaccttaactatgactaagaaattaaagaagaaaaccagcaaactaaaacttctgggcagcaaaaatatataaatgcttcagatgtcaaatacccatgcttgaaagctcgtgtaatttactttaagattatctgcctgctcttcttcaaagctgaccttgctttagaaatagttttaactagcttagttttctggtttccaaaactaaaatagattaaatcctacaaatttaaggacagttgtgacagtaatctgaccactatctataaatacattggacattggtttccaaatctccctttcttcttcagttccttccttgttcaatatatacccttctctaaactgtgcgggtaaaaggaatgactgtccttgagagaaccattagtttatcaaaggtttatgtagttttgttgctgtaccctaactttgatattcagggaggtaggaaaggtaacagaaaaccagcatatttaatcaaagcaagaagtaatcgctgacagttaaatgtgaccaaaaaaattaaaagttcacaatttttttaatgtagccatttggggttatctctagtaaggcagatacccacgttggtaaatttttaggatattgtgttgcactagaaaactaagtggttcatatttctaatgaggaagattaatgaaagaacattgttatattctgcgtggtatattttaaagtttaagaaggcatgttaaacattatttcctctatggtagttaaaatacagaattagatttttaacaggtgtcatttgactaaacgtttcggtagaatgcttcatacttgagtgatgctggataaggtattgtatttcaacaatggactatgccttggtttttcactaatcaaaatcaaaattactctttaacatgataaatgaatttaccagtttagtatgctgtggtattttaataagttttcaaagataattgggaaaacatgagactggtcatattgatgaatattgtaacatgtgaattgtgatccatttctgatatgtcttgaactactgtgtctagtgggcaaatgtcattgttacctctgtgtgttaagaaaataaaaatattttctaaaggtcaaaaaacacaaaaccacaccaaaaacccaccgacacaccacaaaacaaaagcaccgcacaaagaaccaaaca

SEQ ID NO: 96110 - DNA, 6737 bp, Homo sapiens
  misc_feature (6737)..(6737): n is a, c, g, or t
ctgtctacggcagctattccagaggcaacaactgcttccctctgttctcatctccccattggtggctggcgacccgaatttgggaatggggagattgcccacctgttatctttgagcagactaatctcttgtaagcagaagtgccattcggagtctccagagccctgtggcttggggctgggaatgtccccctgacttcaggctttcctaagtgtattgcttttctctgagaatggtctaggtttttaattttttaattgtaagaatctgtaatacagcatttttatttcggtcttattcgttgtgctcaaaggcaggaaacaactattaatttgccttctcgaatcttaatagttataagattcattctctttcattgctctgctaggcataaaacacacttcgaacatgggtaactcattcgactgtggagttcttttaattcttatgaaagatttcaaatcctctggaagccaaaatgggacacagtaaacagattcgaattttacttctgaacgaaatggagaaactggaaaagaccctcttcagacttgaacaagggtatgagctacagttccgattaggcccaactttacagggaaaagcagttaccgtgtatacaaattacccatttcctggagaaacatttaatagagaaaaattccgttctctggattgggaaaatccaacagaaagagaagatgattctgataaatactgtaaacttaatctgcaacaatctggttcatttcagtattatttccttcaaggaaatgagaaaagtggtggaggttacatagttgtggaccccattttacgtgttggtgctgataatcatgtgctacccttggactgtgttactcttcagacatttttagctaagtgtttgggaccttttgatgaatgggaaagcagacttagggttgcaaaagaatcaggctacaacatgattcattttaccccattgcagactcttggactatctaggtcatgctactcccttgccaatcagttagaattaaatcctgacttttcaagacctaatagaaagtatacctggaatgatgttggacagctagtggaaaaattaaaaaaggaatggaatgttatttgtattactgatgttgtctacaatcatactgctgctaatagtaaatggatccaggaacatccagaatgtgcctataatcttgtgaattctccacacttaaaacctgcctgggtcttagacagagcactttggcgtttctcctgtgatgttgcagaagggaaatacaaagaaaagggaatacctgctttgattgaaaatgatcaccatatgaattccatccgaaaaataatttgggaggatatttttccaaagcttaaactctgggaatttttccaagtagatgtcaacaaagcggttgagcaatttagaagacttcttacacaagaaaataggcgagtaaccaagtctgatccaaaccaacaccttacgattattcaagatcctgaatacagacggtttggctgtactgtagatatgaacattgcactaacgactttcataccacatgacaaggggccagcagcaattgaagaatgctgtaattggtttcataaaagaatggaggaattaaattcagagaagcatcgactcattaactatcatcaggaacaggcagttaattgccttttgggaaatgtgttttatgaacgactggctggccatggtccaaaactaggacctgtcactagaaagcatcctttagttaccaggtattttactttcccatttgaagagatagacttctccatggaagaatctatgattcatctgccaaataaagcttgttttctgatggcacacaatggatgggtaatgggagatgatcctcttcgaaactttgctgaaccgggttcagaagtttacctaaggagagaacttatttgctggggagacagtgttaaattacgctatgggaataaaccagaggactgtccttatctctgggcacacatgaaaaaatacactgaaataactgcaacttatttccagggagtacgtcttgataactgccactcaacacctcttcacgtagctgagtacatgttggatgctgctaggaatttgcaacccaatttatatgtagtagctgaactgttcacaggaagtgaagatctggacaatgtctttgttactagactgggcattagttccttaataagagaggcaatgagtgcatataatagtcatgaagagggcagattagtttaccgatatggaggagaacctgttggatcctttgttcagccctgtttgaggcctttaatgccagctattgcacatgccctgtttatggatattacgcatgataatgagtgtcctattgtgcatagatcagcgtatgatgctcttccaagtactacaattgtttctatggcatgttgtgctagtggaagtacaagaggctatgatgaattagtgcctcatcagatttcagtggtttctgaagaacggttttacactaagtggaatcctgaagcattgccttcaaacacaggtgaagttaatttccaaagcggcattattgcagccaggtgtgctatcagtaaacttcatcaggagcttggagccaagggttttattcaggtgtatgtggatcaagttgatgaagacatagtggcagtaacaagacactcacctagcatccatcagtctgttgtggctgtatctagaactgctttcaggaatcccaagacttcattttacagcaaggaagtgcctcaaatgtgcatccctggcaaaattgaagaagtagttcttgaagctagaactattgagagaaacacgaaaccttataggaaggatgagaattcaatcaatggaacaccagatatcacagtagaaattagagaacatattcagcttaatgaaagtaaaattgttaaacaagctggagttgccacaaaagggcccaatgaatatattcaagaaatagaatttgaaaacttgtctccaggaagtgttattatattcagagttagtcttgatccacatgcacaagtcgctgttggaattcttcgaaatcatctgacacaattcagtcctcactttaaatctggcagcctagctgttgacaatgcagatcctatattaaaaattccttttgcttctcttgcctccagattaactttggctgagctaaatcagatcctttaccgatgtgaatcagaagaaaaggaagatggtggagggtgctatgacataccaaactggtcagcccttaaatatgcaggtcttcaaggtttaatgtctgtattggcagaaataagaccaaagaatgacttggggcatcctttttgtaataatttgagatctggagattggatgattgactatgtcagtaaccggcttatttcacgatcaggaactattgctgaagttggtaaatggttgcaggctatgttcttctacctgaagcagatcccacgttaccttatcccatgttactttgatgctatattaattggtgcatataccactcttctggatacagcatggaagcagatgtcaagctttgttcagaatggttcaacctttgtgaaacacctttcattgggttcagttcaactgtgtggagtaggaaaattcccttccctgccaattctttcacctgccctaatggatgtaccttataggttaaatgagatcacaaaagaaaaggagcaatgttgtgtttctctagctgcaggcttacctcatttttcttctggtattttccgctgctggggaagggatacttttattgcacttagaggtatactgctgattactggacgctatgtagaagccaggaatattattttagcatttgcgggtaccctgaggcatggtctcattcctaatctactgggtgaagggatttatgccagatacaattgtcgggatgctgtgtggtggtggctgcagtgtatccaggattactgtaaaatggttccaaatggtctagacattctcaagtgcccagtttccagaatgtatcctacagatgattctgctcctttgcctgctggcacactggatcagccattgtttgaagtcatacaggaagcaatgcaaaaacacatgcagggcatacagttccgagaaaggaatgctggtccccagatagatcgaaacatgaaggacgaaggttttaatataactgcaggagttgatgaagaaacaggatttgtttatggaggaaatcgtttcaattgtggcacatggatggataaaatgggagaaagtgacagagctagaaacagaggaatcccagccacaccaagagatgggtctgctgtggaaattgtgggcctgagtaaatctgctgttcgctggttgctggaattatccaaaaaaaatattttcccttatcatgaagtcacagtaaaaagacatggaaaggctataaaggtctcatatgatgagtggaacagaaaaatacaagacaactttgaaaagctatttcatgtttccgaagacccttcagatttaaatgaaaagcatccaaatctggttcacaaacgtggcatatacaaagatagttatggagcttcaagtccttggtgtgactatcagctcaggcctaattttaccatagcaatggttgtggcccctgagctctttactacagaaaaagcagggaaagctttggagattgcagaaaaaaaattgcttggtccccttggcatgaaaactttagatccagatgatatggtttactgtggaatttatgacaatgcattagacaatgacaactacaatcttgctaaaggtttcaattatcaccaaggacctgagtggctgtggcctattgggtattttcttcgtgcaaaattatatttttccagattgatgggcccggagactactgcaaagactatagttttggttaaaaatgttctttcccgacattatgttcatcttgagagatccccttggaaaggacttccagaactgaccaatgagaatgcccagtactgtcctttcagctgtgaaacacaagcctggtcaattgctactattcttgagacactttatgatttatagtttattacagatattaagtatgcaattacttgtattataggatgcaaggtcatcatatgtaaatgccttatatgcacaggctcaagttgttttaaaaatctcatttattataatattgatgctcaattaggtaagattgtaaaagcattgattttttttaatgtacagaggtagatttcaatttgaatcagaaagaaatatcattaccaatgaaatgtgtttgagttcagtaagaattattcaaatgcctagaaatccatagtttggaaaataaaaatcatgtcatcttctatttgtacagaaatgaaaataaaatatgaaaataatgaaagaaatgaaaagatagcttttaattgtggtatatataatcttcagtaacaatacatactgaatacgctgtggttcattaatattaacaccacgtactatagtattcttagaatacagtgctcactgcatttaataaatatttaataaatgatgaatgatagaagtttccatctacaatatatgttcctaaatggagcacagatgttcaaactatgctttcattttttcactgatatattaatttttgtgtaatgaatgccaacagtatattttatatgatttacttatgtgaggaaacatgcaaagcattaggaaatttatttcctaaaaacagttttgtaaaattagtattgagttctattgagtattataagatagcttacattttcaaaatggaaattgtcggtcatatttctagaactttaaagaaaaaagaatgttatattagttttctaaaactcaactatctttagtcatgttcaaaaatctattgctagatcatagtagatactggttttctattaactcaaaacctacattgacaagtttaacattgagaagaatcttaacaaaaatatggatatgaattcagtagatatcttaaattcaataaaatcactggaagtttttcatgataacttattttaagatgccttaaaaatcttaaagtcacaaaaggaaaaaggtttttaacatttacatgagttaacattttttcatagaacttatttcctagatagaattttttactgttttttactgttttcttaagaaaacagttaaatcattatgcattcagttggaagaaagtagtggcaagaattctttcattgctatataatattcagtggctcatttatacctaataaaataatggtattttaaaataatgctactttcaaagtagcatttttttagttagtttacaggttacatacccaaaaccttaactatgactaagaaattaaagaagaaaaccagcaaactaaaacttctgggcagcaaaaatatataaatgcttcagatgtcaaatacccatgcttgaaagctcgtgtaatttactttaagattatctgcctgctcttcttcaaagctgaccttgctttagaaatagttttaactagcttagttttctggtttccaaaactaaaatagattaaatcctacaaatttaaggacagttgtgacagtaatctgaccactatctataaatacattggacattggtttccaaatctccctttcttcttcagttcctcctgtcaaataacctcctaacgtgcggaaagatgcgctggagacatagtacaagtagagttgtgttccactn

SEQ ID NO: 96111 - DNA, 773 bp, Homo sapiens
ctgtctacggcagctattccagaggcaacaactgcttccctctgttctcatctccccattggtggctggcgacccgaatttgggaatggggagattgcccacctgttatctttgagcagactaatctcttgtaagcagaagtgccattcggagtctccagagccctgtggcttggggctgggaatgtccccctgacttcaggctttcctaagtgtattgcttttctctgagaatggtctaggtttttaattttttaattgtaagaatctgtaatacagcatttttatttcggtcttattcgttgtgctcaaaggcaggaaacaactattaatttgccttctcgaatcttaatagttataagattcattctctttcattgctctgctaggcataaaacacacttcgaacatgggtaactcattcgactgtggagttcttttaattcttatgaaagatttcaaatcctctggaagccaaaatgggacacagtaaacagattcgaattttacttctgaacgaaatggagaaactggaaaagaccctcttcagacttgaacaagaaactgggtctcactatgttgcccaggttgatattgaactcctggactcaagcaaccctccctctttggcctctgaaagtactgggattacaagcataagccaccgggcatggccccacttctgagcattaatttatttattggtgagatgaaagtggtaatttctgttcttctacctttctaggttttgagactcaaaattaataatacatg

SEQ ID NO: 96112 - DNA, 384 bp, Homo sapiens
aaaaaattgcttggtccccttggcatgaaaactttagatccagagtaagttggaatataagtattaagaatgttatcatatttaatccaaatacattgacatcaaccataatttttttttttttgccagggcaacaaaaggagatgccatctctacaaaaataaaagttaaaaaaaaaattagttgggagagattgtgtacacctgtagtcctagctactcaggaggctaaggcaggagtatcacttgagcccaggagatcaaggctgtagtgagctatgatggcaccactgcactccagcctgcttgacagaatgagacactgtattaaaacacacacacacacacgcacacacacaccaaaactcacaattaaagctgactc

SEQ ID NO: 96113 - DNA, 498 bp, Homo sapiens
tgctgtcaccatttcccacacaaccctcaactacaaccataccccacacaggtaccaccaccaccgccaccactcccacttacaactacggtcatcttctgcacaatgttcaattacaaccacaccccacacagctaccaccaccaccaccaccactgacaactaccatcatcatctcccacacaaccctcaactacaaccacaccccacaaattttagggatcatattgtatgattgactacgttgcttaaatatgacaagatgtagtttaaaaacagcttattataaaacatccactgtagccaaaattatctgggtttccttttctttggatcttttctgtctgtcactgagaaaaatacaccagcaagacacaagaaactgtaatactactccgattaacagtaatattacctctgagacaaatatagaaagtgatgcagttgccgaagatgaaagtctgcagggttgggactgtacggcagcagcactgggat

SEQ ID NO: 96114 - DNA, 2843 bp, Homo sapiens
ggtaatgatgagggataggtagaaaagatgggaagggggtcagcttgtagataacctagactagcaggtgtatgacttctagtctctgaactggagccatctgagatcagtttgagatatggtgtcttataaatgtattgagagaggttgaggagttgtctatagaatggaatggagtgaggtcagagatcagtggcaaggaagaccacataaaggtttttgcacaaacttgccttgatggcaagtcctcaaaagtacaattatcaagctttctgtttaaacatgcataagtcagtaaatataaacattaaaatttgcccaagactcttaactcagttgtatttcataattaaagtgtacattaaaaagccaaactagtcatgaaagtattacatacagcaagggcagtttagataagttaatgttgctatgggaaccccagcagatctccttgtgtctccgtttaaaaatcatggcccaaggtggtttcaaaaacaacagaaggtaaaattattctcacattctcacacatgtaaattgtactgtctctctcagttctaaatagcggattcaagccagcctcttgactggcacagtaaaattcggcttcgtgtctttctataatgtattacagcatgtgagttaacctttagaagcttcaaaaatacatcaaccaaatttggactgtgagacacaaactggtctcttttgggctctgtccagcatagccttcctattccacatggctgcgcagcagggccatttccaccagtgtcttctgcttgcctggtcagtctttctgtctcttaacctacctacaacaacttccttctcggggtttgctgctagatagaaatgtagattttggcacagaaagaaaagggaaagacctatttggaattttgtctatagatgttaagaaatcatgaagcgttgcaaatgtaactgcttgggtattagtttaaaatatttgataactgcatgaaattctaatttacccctcacatccataaagctaggaccagttggttaggcagagtttgatatttaaaaattcatcttctgagagagctgaatttcaaaaggaccattttctttccaggagtaaaaggtatattctttcatcttcttacagtacagaaacaatggaatatattgtttaaatgcacccttcatttttttctccatttctaaaaattcacttttgagcatcgtccaaatgtaaaaattctcacacatgaggaactgtttccgaaggttgtgagaaagtcaagataacagtttctattattaaaagttttgcattcggtatgacacatttgcctgtattgaaacacccatttaacattgacttctgagaacttatttgctttgcctctctcgattccatatgctttgtctacaaattgtgaacacgtcccggtttctacccgtgtgtgattctaagtcgttgctgtactctagcttgtacgtgaaaattcacccatatgcagatagctgccctcttggaggcaaaacttaaagctatcagaaccatctggattgttaaaccccaaaacttccaactcatcaaagtcctgaagcctgaatagatcacacattgttacttctaattggttttgatgtttgttatgctcctcacaagtgcagataacttcacatttgcatcactaatcgacctctttcaaagcctctgctcctcctgcttcctgcctctgttagtcatcaggagacttagtgttggcgtgggtattttccccgcttgtgaaagtgcattgtcaattctagagcattaaatatatgtgaggtattgttattaatctacaaggcagtacacacagtattccagcaacagtgactttttcaaaggttttatgagacattgtaagaaagacagtatctttccatggaaaaaagtgttgcctcagagtcaaacaggaagcatgggtcctagttcctattgaactgcttagctactcttaatttagctctgaatgctagattttgtgtatactatacacattatttaatcctcaaactcctaggaattcattttgatgataaccatttacagaagagatgttgggtaacttgctcaggataccacatctagtaagtagcagagtcacaactcggacccagaactctctgattccaaaacctctacttgctgctcttgtaatggatgggcccaaatgctgctgggaaaggcaccagggaagaaagagctttctgagtcaagcagaaaacgatagcagtggagaggagtttgtttcagacgaccttcaaggttatggctcattctagatccaatcattctagcaaataagtaggttacacttgtccacaattacaaattggaaaagaagagaaggaaaggaactgagaggaatgacaaagcaaaaagctttcaatcagttcttttcagcattctgcttctgcctagttctgcacttgccccaccccctcaggcttcagccttccacttggcatccctcctcgcagagcactctcacttgcatactcctcgcttaaagaaaaaaagcattctgtactgcagtggggaaaaaaaacccttaaaatgtcttcaaaaggattcagctctagggtaatgtaaaatatgtgaaatcaggaggtgtccataataaaatatgagtgaaaacatcgttatttaaaacattgtatgtacattaatgccacattaataccaattcaggcatgaaatgttgagcatttcttggaatacggtttcttggaatatggttggggatttgagaggcgcaaaggtacccgcaagatggctttggtgtagttataaatataaatagaagtaaaataacagt

SEQ ID NO: 96115 - DNA, 371 bp, Homo sapiens
gtttgttgaaaagactatattttctccattgtattaggtctgtgatccattttgagttaatttttatgaagggcgtggtctgtgtctagattctttatatatatatataaatggatatccagtcttttcagtactatttggggagaatgtccattgacttactgattctttgttagagatcaatgtgctatatttgtgtgggtctatttctaggctctctattctgttccactgacctgtttgtctgttctttcaccaataccacactgtgttgaatactgtagctttatagtaagtcctgaaatcagatagtgtcagtctcccaacttcgttcttctccttcaatattgtgttggctcttctatgtcttt

SEQ ID NO: 96116 - DNA, 287 bp, Homo sapiens
actgcaacctctgccccttttgctcaagcagtcctctcacctcagcctcctaagtagctgagatcacagatgcttgccaccacacctggccatttttttcttttttgtatttgtggtagagatggggtttcactatgttgcccaagctggtcttgaactcctgagctcaggtgatccacttgccttagcctcccaaagtgctgggattacaggcttgagccaccgcatctcgctccgtgctgcttattgtatacggttttctgttttttaccacctgtaactccacc

SEQ ID NO: 96117 - DNA, 403 bp, Homo sapiens
tctagacaatgaggataagaatagtacttgtgtctcatagagttcttgtaaggattaaataatatgtaatgtttctagagcagggtatggtactcaactggcatgcaatgagtaccagctgctatttgtggctgttactactattacaacaaacaaataagatcttcaaatttctcttttagtcgtgtcctcagataacgtaactaagaaaatctattcatgatctctcctttctcccaaataaaaacaaaaagttaataaaaacaaactggctttaatatttcctatattttcaactactccacaactaaaggtcatttcaaaatttctctttaaacgttgccttttattaaagcataatgaataggatccatttttctgtcacagataactcagtgttttt

SEQ ID NO: 96118 - DNA, 781 bp, Homo sapiens
aacatttgaatgaacataataaatgaggagttggggctgggtaaaaggccagaagtagaagtacttatagtacaaggcttggcagcaattcacatagtttgtaggcaactgcctactacccaccatgaagctggcccttccagtgaggtagagaagtgttacaaacgccttcagtttctagactaattctaccgagatatccataactcatgttgaaaaatcacagtaggttgagttcagtgatgatctatacctcacctgacctagacaagtaaggaagaaacagaaggaagcagaataataaagtatttgaacccaaggatttgaccatctggttctttggggggagtcatgcctcctgtccttactttatatttaaggcattctgtcattacaaaaggcagtgatagagtaatgaaagaccattgcccaaggggaatgaaagagtgcagctaagtgaaaccagggcacacccacacacacacaacagtacacttctgcttctattctttttaactccttcagcttcttcgtgctcctagatgctgctgctttattaatttttgctaactgtgtatctcatacccagaatccctaagagagaggatttggttagttccaataatcacggtagtccctgctgagcaacctctcatactgggcctatagaacccaatgacaaggctccatgcagattccctctgatggctgtgctctttgtgtacttcccttccggtgtgtttttactcccaacagtcagcacctgcaactgtttgtcaga

SEQ ID NO: 96119 - DNA, 920 bp, Homo sapiens
cacaaggtaactcagcatccccaaaccactgacctgccacttgcaggcggaaggagagctgctggcccccagcctcacagctatactctccggtgtctgcctggcctgcctgctgcaccaccagcctccgtgtacagcctgcagcctccacatgcactttcaagctggagctcagcttcttcccgtccttgtaccaagtcacctctgtctgggcctgggccacctcacagctcagtgtggcgctagcccctgcttcagcctgcacctccctgtgtgctggctgctccttagcaaacaccgccttgggctctggggaaggcagggatgcacagggtggccaccaccatctaggtcaggaaggcagcactggggagagaaggcctggaaggggaagtgcgagggacagatgctctccaggctctgcaccaccgcctcccagtacaaggaacacagtttctccatccattctgcatgcaggatctgtcacatccccagggcaccctgcagaatggtggcatgttcctgtggtccctgctgcttgggaggctggtctcgaatgcctgagctcaagcaatccttctgcctcagcctctcaaagtgctgggattacaggtatgaggcaccgtgccaggcctgatgctaaactttatcaaacagctgttcagaatttatgatgttaaatttcatcaaacttttcttctgcatttattgagattttctctttcaatctgttaatgtcatgcatgacattttctgatgttttgaatattgaatatattgagtatagcatttctaaattatgccttttatcatagtgcattttccttttgacatactggtcataccactttgaaaatatattgttgaagcattggcctggatatccataatgactggcctgtaatttcaaatctttatac

SEQ ID NO: 96120 - DNA, 204 bp, Homo sapiens
cctttacgggacttgataagggaacacagagcaacctccaccacagagaattatgcagcccacagtgtcaatagtgccaaaacaaaagggacattgtgatcctaaccccagctccatttatgaagatgataaattccttaccagagaaatagagaaatctcttgatatggtttggctgtgtccccacccacatctcaccctgaa

SEQ ID NO: 96121 - DNA, 358 bp, Homo sapiens
agaagcagtgagggacatattttactctttagaattatataagtaatttcctcatgcatcaatagaaagaaattagctacaggcttcggaatgcttagagtgggaatgcgagataatcgtaagtaagctctacatagctggtattactttttttattccatcaaagaaactacatttttttttgctttttttcgagatggaatctctctctgtttccagcctgagaaacagagcaagacgccatccccgtcccccacaaaaaagaactacgactcaacaagcagacaacccagttagaaaatggacaaaagatttgaatagatatttttcaaaagaagataagcacatgaaaagatgc

SEQ ID NO: 96122 - DNA, 870 bp, Homo sapiens
aacggaatgttctggcatatttcaaaatggttacttttcttcccccttgccagaagcctgaggggatttttctcagatctttactgggagaacttggtagagctcctggagtgtggggaccctctatgattggctcccctacagtttttaggtcttagacttttctacactgaacttccagcaatttatcatttatagtcaaggtttcctactctggtactggtttccatggaggcttctgctcgtgggtttctgctctaataaggtgtgattctctgtatttatctgtctgtctctcctattttgagggcagcagtttacccatgatctcacttctttggtggatctaagaagagttgtcagtttttccatttgtttagctttttacttgttgttaggaataagtgataaactctaaacttctcacatgccataccagaaactggaagtctccctttcctttttgccccacatcttgacaagctgataagaaagcccaagtgctaccttggttgacaccagcaggaagtttcaaccatgcaagctcaggcctacatgagggagctcttgctctagccccaccttctaaaaccacaagccagtcagtcagccttcaggttctcaagtcattttgggacatgcttgggatcttgccttgctctccctggaaagccttattatatgtgtaataaaccttttggtatcctcttagtacctcttggtactttggcatttcaatatctgattcaaattttgggtgggggagtttattgtctctggagggtaaccacaacatcttgcaagtagaaaatccaaatgaattaagaaaaccattggaaggccaggtgtggtggcttatgcctgtaatcc

SEQ ID NO: 96123 - DNA, 458 bp, Homo sapiens
ctctcagcccgagtgggtagctgcttcttgcagttactaacttaagtgatactgcagatttgtttttttgacttttcagttatctagttaataaccataaacctagttaacagttctctgtattacattgtctctgttaaataattggtatagtttctgtcccctgactgatgtatctttataagcttaattctctattacgatacatttgtttatggttgtgatttgcacctctgggagggttaggttctaagatcagggtatcaaacaataaaacttgttggtcccccaatacactgcctccttaatgtaatcgaaattggctgttggccctgggatggagccagctaccctagctaagacactgttgggcagtgcagagcagaatttggcagctgaggagaaggcctctcatctggctgtggtcagtgtcagttcctcagggctctctgcaaaca

SEQ ID NO: 96124 - DNA, 470 bp, Homo sapiens
aaatcggaacaggttgaaataatccccttgtcacttaaaggtctttaactgggccactggatgggcttttagggttttataaaactcttatactttgtatacagaagtttatttctgttttctgtttctcagaacatttgctcattcataactttttttttttaataatataggttttttttttttttccttgtagagacgagggctcactgtgttgtccgggctagtttcagacttgagctcaagcaatccttccacctcacctcccagagtgctagggttacaggcgtgacactcatgcctgggcctcttattaataactttttaaaggatttttgttcgaaaaaatccttcagttaagtctcttagccaaaattagctaagaatagatctttagaaccactctggcgatatagtagccagccgccatatgtgacaatttaaatttaattaaaattaaatagtttctc

SEQ ID NO: 96125 - DNA, 483 bp, Homo sapiens
ttgcagacaaatggggggatcagaggcaccgccaaggtgttcttccttgttttgtgggtattttactaaatgaaacaatgaacgaattgcttgaatagacgtgaggttaccgtgactccatccagaaaccacttggtccagactttgaaggcaataaaacagcaggaaaagacaggccctgcctcccggtccctgacaggcgccgtcactcttgagcctgtggtagggagtgcattttcaagtcgcccgctgcctcccgagcctgcctgcagggtctgcaagcctccagccaagcaggagggatcagctctgcagcttccgacaccccagcccatgtcctctcagcccactgggcccaaggcgggtgtaaaatcctggctcaccaagcagagactctgggaagaggcccagtggcctcccagacagaccagaggtcctgctcactggtgtcctcctgtgcgtccttggcaagtggcttcccct

SEQ ID NO: 96126 - DNA, 1093 bp, Homo sapiens
attaggctagtacgaggctcggtgtgaatcggccgagggttccacactgtggaagctttgttcttttcgttttttgcaataaatcttgttgctgctcgctttttgggtccacattgctttcatgagctgtaccactcaccgtgaagatctgcagcttcacttcagagcctagcgagaccacgagctcactgagaggaacaaacaactccagacgcgctgtcttaagagctataacactcaccgcgaaggtgtgcagtttcactcctgagctagtgagactacgaagccactggaacgaagaaactccaaccacgtttgaacatcagaaggggcagactccagacgcttcatcttaagagctgtaacactcactgtgaaggtctgcagcttcactcctgagccagcgagaccacgaaccgatctgaacatcagaagggacagactccagacgcgccaccttaagagctgtaatactcactgcaagggtctgcagcttcattcttgaagtcagaccaagaacccagcaattcccaacacacagggaccagcttctttcctaactcacttaggctcttcgtgctgctctggcaactaacacccttggctgcaggggcttggacactacccttagtcactgacaattgtgtgaaggctgctgtcgttaacttcacttgatcaccttaggctcctgtgaagtggtgagcaattcaaacaaattcctgtcgtcaaatcatgagtccacctgtcccgagttggaagtctgaactcatgttcctggattcctcccatgcatcttggtgctggtgtggggcctgaactcagccaatccgcaacacctccaggagtcttcctcttagatgctgaggccacggagaaggaagcagccacaaagaatgaaccctggagagggtgccagaggcaggcgggttccagccatgtggcggcacagccttactgggatagtctagctgtgtcactcaggtacggttgctctctgagaagccgccaaacccaaccctttcacacacacctaggatgatttgaagagctacctaataacctttcataaggttctgaaagccagccagagtgg

SEQ ID NO: 96127 - DNA, 950 bp, Homo sapiens
cctagcgggcgaatacagggtcctttgtggaagtcatggggcagggtcccctgaggcaccttgaaagtaaaggagaaacagctctcagggactcagctgcaagtcattagtaactaagcggaacagctgtcttcagcaaagcttgacctggatcccagaactgaaacagcgggagaaacagaactctcaccttccttaacctggatcccagaatttaaacggactgcttccccaacagcaggcgatggagtccctgagatgcctgctaaaaatacagacccctgttcacaagggccaagaggtgggagcaacccaggtgtgtacggatggataaatggataagcaaaatgtggtctagccatgcaacggaatgtcctgcagccttgaacaggaaggaaatcttgacgcgcgccgcagcatgggggagccgcaatgaggacgttatgctaagccagtcacaagtgcatgattccactcagaggaaggacccagagtcgtcaaattcagagacacagagatggagaaattgcactgcagagaaatctttaaaagcaattacctaatactgcagattgctgaactgtacccacacccaagactgagcattggatcaatccagaatatacatcaggtgttctgcaatgtctgcctaaaaccatgactctgcctcctccagctgttgctacatctcactatgggtttcctgtgacattttgagcaagtatgcctctgtgactggggttcttacactccagaatggatgagaagcaccgtaagtggcttttaaaatgaatattccctggcccttcagtcgctctataggtcaagaatctgaattctcaacctgtctagaaggttctggttttaatggtctgtgggctgcacattgagaaacctgttcagcgagtgcaacaaaggttccacatgtgagaaaggaagcatcaggtctc

SEQ ID NO: 96128 - DNA, 926 bp, Homo sapiens
agcattgacaactcgcggggattgttttccacactgtggaagctttgttcttttcgttttttgcaataaatcttgttgctgctcgctttttgggtccacattgctttcatgagctgtaccactcaccgtgaagatctgcagcttcacttcagagcctagcgagaccacgagctcactgagaggaacaaacaactccagacgcgctgtcttaagagctataacactcaccgcgaaggtgtgcagtttcactcctgagctagtgagactacgaagccactggaacgaagaaactccaaccacgtttgaacatcagaaggggcagactccagacgcttcatcttaagagctgtaacactcactgtgaaggtctgcagcttcactcctgagccagcgagaccacgaaccgatctgaacatcagaagggacagactccagacgcgccaccttaagagctgtaatactcactgcaagggtctgcagcttcattcttgaagtcagaccaagaacccagcaattcccaacacacagggaccagcttctttcctaactcacttaggctcttcgtgctgctctggcaactaacacccttggctgcaggggcttggacactacccttagtcactgacaattgtgtgaaggctgctgtcgttaacttcacttgatcaccttaggctcctgtgaagtggtgagcaattcaaacaaattcctgtcgtcaaatcatgctggagtgcaatggcgtgattatggctcactgcagccttgacctcctggacccaggtgatcctcccactttagcctttcaagtagctgggactacaggtgtgtgccacaatacccggctaattttttaaaaattttaataaagacagggtcttgctatgttgttcatgctggtctagaaccctgggcctcaagaagtcctcctg

SEQ ID NO: 96129 - DNA, 1167 bp, Homo sapiens
attaggctagtacgaggctcggtgtgaatcggccgagggttccacactgtggaagctttgttcttttcgttttttgcaataaatcttgttgctgctcgctttttgggtccacattgctttcatgagctgtaccactcaccgtgaagatctgcagcttcacttcagagcctagcgagaccacgagctcactgagaggaacaaacaactccagacgcgctgtcttaagagctataacactcaccgcgaaggtgtgcagtttcactcctgagctagtgagactacgaagccactggaacgaagaaactccaaccacgtttgaacatcagaaggggcagactccagacgcttcatcttaagagctgtaacactcactgtgaaggtctgcagcttcactcctgagccagcgagaccacgaaccgatctgaacatcagaagggacagactccagacgcgccaccttaagagctgtaatactcactgcaagggtctgcagcttcattcttgaagtcagaccaagaacccagcaattcccaacacacagggaccagcttctttcctaactcacttaggctcttcgtgctgctctggcaactaacacccttggctgcaggggcttggacactacccttagtcactgacaattgtgtgaaggctgctgtcgttaacttcacttgatcaccttaggctcctgtgaagtggtgagcaattcaaacaaattcctgtcgtcaaatcatatggagaaattgcactgcagagaaatctttaaaagcaattacctaatactgcagattgctgaactgtacccacacccaagactgagcattggatcaatccagaatatacatcaggtgttctgcaatgtctgcctaaaaccatgactctgcctcctccagctgttgctacatctcactatgggtttcctgtgacattttgagcaagtatgcctctgtgactggggttcttacactccagaatggatgagaagcaccgtaagtggcttttaaaatgaatattccctggcccttcagtcgctctataggtcaagaatctgaattctcaacctgtctagaaggttctggttttaatggtctgtgggctgcacattgagaaacctgttcagcgagtgcaacaaaggttccacatgtgagaaaggaagcatcaggtctc

SEQ ID NO: 96130 - DNA, 1255 bp, Homo sapiens
attaggctagtacgaggctcggtgtgaatcggccgagggttccacactgtggaagctttgttcttttcgttttttgcaataaatcttgttgctgctcgctttttgggtccacattgctttcatgagctgtaccactcaccgtgaagatctgcagcttcacttcagagcctagcgagaccacgagctcactgagaggaacaaacaactccagacgcgctgtcttaagagctataacactcaccgcgaaggtgtgcagtttcactcctgagctagtgagactacgaagccactggaacgaagaaactccaaccacgtttgaacatcagaaggggcagactccagacgcttcatcttaagagctgtaacactcactgtgaaggtctgcagcttcactcctgagccagcgagaccacgaaccgatctgaacatcagaagggacagactccagacgcgccaccttaagagctgtaatactcactgcaagggtctgcagcttcattcttgaagtcagaccaagaacccagcaattcccaacacacagggaccagcttctttcctaactcacttaggctcttcgtgctgctctggcaactaacacccttggctgcaggggcttggacactacccttagtcactgacaattgtgtgaaggctgctgtcgttaacttcacttgatcaccttaggctcctgtgaagtggtgagcaattcaaacaaattcctgtcgtcaaatcatcattaagaagaaaagaaagagcacttggaggtctgcttggagatccctgaggtttttcacaggcacaatgtccttatttgggagcctcaaaataccagactaacattgctcaaagcagctttgggaagagggcaggtgtctgagatgctgagaggccaactgagcagttttttagctggagccatgggccacaccaggaacaaaccactggaccaaattgactcaggacacctgctctggacccagtttcttctcatgtctcctcacccctaactctgcccaccacctcccacttcctctctgttccccatcccatcccaggtttgtatttaaatttctgcataatgcatgttctctgcatgttctgaagtactttccatcaagtccttcattttaaaagtgtttcttttaaatgaagctgtgcataacctctttttgaggctctctttggcttttcttgcacaattttaaattgaccaggtctacttgcaaaaataaagacactttttctgctctttgtt

SEQ ID NO: 96131 - DNA, 432 bp, Homo sapiens
tccaatgacagtttagttttcagaggccctgcaatgttatcccaatctgctttgtttttatggtatcgttgaggctcctcttcagtcgctgctggtgatatctgtgggggtgaaaggcacttccctgtgttactgggtgtcgctgagccacctcctataggggggtcagggagagagaagcttctgggtacagagacagcagggagacaaggggtttcattgctgctgctgctgctgctgggagcagatcgagctgcccaccagtgtcctggttgtggagcacaagttgagtaggcctggggtttgctgctgctgcaggtagagtagccagctcactatgtcctgtttatgaagcaggtctcaggctccccatgtggtctctgttgggctttgtctccccagtccattggccagggagagcagactgttctt

SEQ ID NO: 96132 - DNA, 211 bp, Homo sapiens
gagtcggcccatcttccctctctcacgacatacctttccttcagacttatccattttcaaattatacaattatttgattaccatctgtctcccccactagactggaagtataggactaaaagagaaaaatagaggtcaggactctgggattcactccataaaggaataatagctgaaggtttgggagtgaggagagctcagaaaaaccaca

SEQ ID NO: 96133 - DNA, 138 bp, Homo sapiens
aagagtcttgtgggccccagtgagtggtgggaatttcaacccaagtgcaatgggaagtgctgaagtgttttgagaagggtactggccgagtatagtagctcacacctgtaattccaacactttgggaggatgagacag

SEQ ID NO: 96134 - DNA, 383 bp, Homo sapiens
aaaaatcaaacacatatgaaacatggtctctctttctttggctacaaagcgtagtcagttattgccccctgctcactctcaaagtatgaaatagctagataatatttgtatctaatactctctgtaggtttacttataagcctacctctttcctgctttaaaatcttggggcttttttatgtgtaaaagggttttgtttttagcaatgccctgtggcattgcgcaggtggagaaatcttttaccagccgtgggctgtttgagttggggtaacatatcaaagtttgcgttggcatgataagggatcattttattactatgagaccagttaacttttttttctcctgaagatttttggtttgatatcttaaataagaggacttca

SEQ ID NO: 96135 - DNA, 297 bp, Homo sapiens
agcgacggttccgtccacgccggctctagggagggggcggtgttccgtggccgcctccctggcggcgctggggaaatgagcaggtaggaggccgacagcgacctccgcgtctcggagcgaaccgtgagcctccccgtaacgagagagtttgactgtcagccaaggtcaccgggcccggcgcagggaaggggtggggctcggctgagcccgcgagacccgccctgctcgccgcagcccccgccccgctagggccacagggtcccggtatggcgatggctttgacggacccggcgcagg

SEQ ID NO: 96136 - DNA, 206 bp, Homo sapiens
ctgaaggacaagagcccaggaaaaaagatgccatgggccccagaggcagagagagacccagagacatttccaccaaaggcaggaaccctgtatggatcgtgattcagatacaccaaggcaaagacagacaacagggacgcagacacaggctgcaggccatgtgagcagtcacagctgcatctcagacatggcgctattctcaccaa

SEQ ID NO: 96137 - DNA, 652 bp, Homo sapiens
acctggctaatttttgtatgtttagtagagatggggttttgccatattggccaggctggtctcgaattcctgacctcaagtaatctgcccaccttggcctccccaggtgttgggattacaggcatgagacactgcacctggcccattataagcatttttgaaaacatcatcccaaacaaaaactgaaactttgacaataacatacatctaactatgtggttccccctttcccaccccttttgtttctcaccatctgaggtgagcatttgaaacccatttttatcattcccttgctttcctttttatgcagttttatgcatctgcatgtatttttcaaactaaaaaaggttttgtgttgcatgtaatcttttggagtttattcaattcttgtttcaattttggtggactgttgatttcaggaattttttcaaaggtcctgtgattttcttttattcatccttgcagaggggatttatgcttgcctagggttgacatacaatcaaatgattgatttgggatctgtatgaaattttatagcagttcctggtcagaatcaaaggcagaacagaaggctataggctgccattgtggggacccagcaggctgtgtggactgagtggggcgctgtctccagttaaacattttctctcca

SEQ ID NO: 96138 - DNA, 327 bp, Homo sapiens
ttcgggatgaaactgctccacctcagatcacgaggcattagtcagattctcataaggagcacgcaatctagatccctcacatgcacagttcacaatagggtttgagctcctatgagaatctaatgctgccgctgatctgacagggggcggggctcagccagtaatgctcacttgcaccactcacctactgctgcgccgccccgttcctaacaggctgcagaccacagcccgggggtcggggatccctgcactaaaaaataatgtatgagattcgtggatttgtttaaagcacacaaaagcagcaactggaagagaacagctgccagt

SEQ ID NO: 96139 - DNA, 1086 bp, Homo sapiens
cctcaccttgtctcccaggctgaagtgcagtggatgatcagggttcactgcagtccctacctcctgggctcaagtgatcatcccacctcagccccatgaatagctgggactataggtgtttgccaccatggccagctaattttttgtatttttggtggagatggggtttcaccatgttgccttggcaggtcttgaactggactcaagcgagcagcccacctcagccttccaaagtgctgggatcacaagcgtgagccaccatgtccagccaaggatatattttagtagtaatgaacttatggtgacagaatatgtgggataacgtcacctactgtcacaagctggcttctctggaaacagttactgagactgactttggggttcaagatatttgttacagatcaagtcttgtgaagggaagggggagaaaccagtgttaggcagaggaagaagttgcatacgttataggcccaactaaacctcagtcaggccgtgtgtggtggcttatgcctgtaatgccagcactttgggaggccaaggtgggaggattgcttgagcacaggagtttgaggctgaagtgagctatgatcgcaccactgcaatcaatcaatcaataaacttcagtcaaccctgccaggagctatggaacaattattgtttgttggagtgttctgtgttgggctaaatgtgaagcctctttatacttctaccttactcagtcaccatatgggggctgccccagagaggtcatgacctcaagtgaggaagtactcagcagctgagccaggccctactgatagctggaggatgctgctgcccatgctgcccactgtgaggcagcaagcccttgcttgaagggggatctggatagtatgtttctgtgtctaccacccctagaaatggtgcctagagtgagtcatcacaaaaagaatcaggatagcttggtgtggtggcaggtgcctataatcccagctactcaggagactgtggcaggagaatgacttgaaccagggagttggaggttgcagtgaggtgaggtcacacaactgcactccagactgggtgacagagtgagactccatctca

SEQ ID NO: 96140 - DNA, 659 bp, Homo sapiens
cctcaccttgtctcccaggctgaagtgcagtggatgatcagggttcactgcagtccctacctcctgggctcaagtgatcatcccacctcagccccatgaatagctgggactataggtgtttgccaccatggccagctaattttttgtatttttggtggagatggggtttcaccatgttgccttggcaggtcttgaactggactcaagcgagcagcccacctcagccttccaaagtgctgggatcacaagcgtgagccaccatgtccagccaaggatatattttagtagtaatgaacttatggtgacagaatatgtgggataacgtcacctactgtcacaagctggcttctctggaaacagttactgagatgaagtattaaaaggcattttaaatagatccaaaagattcatttttaccttaattgcagtgattatgggattaattgcagtcacagctacggctgctgtggcaggagttgcattgcactcttctgttcagtcggtaaactttgttaatgattggcaaaagaattctacaagattgtggaattcacaatctagtattgatcaaaaattggcaaatcaaattaatgatcttagacaaactgtcatttggatgggagacagactcatgagcttagaacattgtttccagttac

SEQ ID NO: 96141 - DNA, 265 bp, Homo sapiens
aacatacccctcttagtaggaattaaataaatttttggagaatttcaagataagtccattgaacaaaataaaaaataacagcctggtctagtgacactgtgcccttttgaagtgacagcactgacattttctagcattaatgctatgtttattcaggtcttgggttatcatttcattgatcattattcagttccatgaatgatcactgtgctcttgaaagaaattacgtcttgcttattgcctcttaaatagaaatgaaaaaaaa

SEQ ID NO: 96142 - DNA, 173 bp, Homo sapiens
aagattgtgccactgcactccagcctgggccatagagcaagaccccgtctaaacaaacaaacagacaaacaaacacagaggtgaagtgacttgtccgggaaggctggcggccgagctggtcagcacttggagagtctggctgcccctctgggctccccaccctgaactcagtt

SEQ ID NO: 96143 - DNA, 447 bp, Homo sapiens
  misc_feature (299)..(299): n is a, c, g, or t
ccgcaatcccagcagtttgggaggtgaggcaggaggatcacttgaggagtttgagacttgcctgggcaacatagcaagcccatctctattaaaaaaaaatgaaattttaagaaacattgagtagacagtatgagtgaaagctgaaagaacatacaaaaaaaacagccatccaggccatgacgagaaggagcctaactcttaacactctgtctagacctcaattctctcttatttgtatttatttatttatttatttttattttattttttgagatggagtctcagcctgggcaacagangtgagctccgtctcaaaaaaaaaaaaaaaagcaaaggctgaatgaggccaagtgtggtggctcactcccgcaatcccagcagtttgggaggtgaggcaggaggatcacttgaggagtttgagacttgcctgggcaacatagcaagccc

SEQ ID NO: 96144 - DNA, 688 bp, Homo sapiens
gttttgtgaaagaagttggggatctatttatgtgaaacttccctatttttaaatgttagcagctaattttgaaaatcttaaatacttgtgtgagtccaagagaaacatctgcaaatagcatgcttcccactcgtgagtcactatttgaaacctctgatttcaactatagctttctgctcatttctggcctcggtgcatttgggtgataatagtaccaaggccttctgaaaataacatgatttctggtcatttttagagatgcagagttttttgttgtttctgctttattatgaggctggactggagggaaattctcatttattaaatgcctgctgtatcccaggtactttaaacacattatcttgcttattcttacaacttcctaaggcaggcattgtcgtttaccaacaggctaactctggctcagagaggttgcctcaagttccaccgctggctggttgacaaagtctttatgggatcccatgtaggtttgactgcagagcttagaaaaagagcaggtacagaatgggctggaagagtactaatagctttcttcccttacccgttcaaccatcgtaaggaggcagttccttttcatatcatgagctggttggcaaaaaagcgttactctattctgggtactctggatatagttacctagaaataaggcaagtgaaggtttaaaata

SEQ ID NO: 96145 - DNA, 859 bp, Homo sapiens
agcggagcgttggcctttttcccacagctccaccaggcagtaccctgttgaggactctgtgtgggggctccagcctcacactttccttctgtactgccctagtagtagaagttctctatgagggttccaccactgtggcaggtttctgcctgggcaccagggctttctcatacatcctctgaaatctagggggaagctgccaagccccacttctctcctgcattctgcatgccagaattaacaccatgtggaagccaccgaggcttacagtggctttgactctccaaagcagtggcctaagtagtatctggggccctttcagctgtggcaggggctagagcagccagataaagggagcagtatcccaaggctgtacaaggcagcaagagccctgggcctggatcctgaaattattctctcctccgaggcctctggggctgtgatgagagcggctgacttgaagatttctcaaacgccttcaaggccttttcctcattgtcttggctattaacacctggctcccttccaatcctgctaatctctctagcaagtagttgctccataggctgcttggattccttccctaccacaggcccaggctacaaattttccaaatgtttatactctgcctcccttttaggttcaactttaagtctttattttgctcccacatctgatggtaggttgtagatgcgggcatgtcacttcttgaatgctttgctgcttagaagcttcctcaaccacataccctaagtcatcactcctaagttcaaacttccacagatccctagggcacaaacacaaggcagctaagttctctgctaaggtatacatgggcgatcttcactccccttcccaa

SEQ ID NO: 96146 - DNA, 260 bp, Homo sapiens
agagggttacatttcagatcctccctttccagaattcagtgtttttcccttataccactaaacttcctagatttttgtcaagaggtgggaggaagttaaaagataaataagcttgtgaattttaaaacttgaaaatttatatacagcaaaatagttagacctaaaatatacagtttgaagtgttttgacaagtaaatatactcatgtaaccaacacccctttatcaccctggaaagtttctttcagccccttttacttct

SEQ ID NO: 96147 - DNA, 475 bp, Homo sapiens
atacaagtgtcatatcccccagcccatgcaagaagcaaaatgggaagagactaggaggtagcctgggcaagagctgacagctgagaatcctgaggtcagagagaccttaggatgtcaaggagctgaccctgcaagtctccggacaggcagctgggccttgtaggagagatctgacaggaaaaggaggttcacatgcaatagggttataagctaggggacacaggaccctagggacattctcaccagctaaccattcccacaggttgcagaatttcctggtcagaggtggaaatggtatatagggcaaacaagtttgctgaggtcttgggagagggtgagtggtggacataccaggtgagggaaacgagaaataaaaagaactgcagggatgggaaggtgctgacatccgagagtttgctattatgtgttcagagactaagctactaaattaaggttaaagaaggtggccaaggca

SEQ ID NO: 96148 - DNA, 328 bp, Homo sapiens
  misc_feature (266)..(266): n is a, c, g, or t
tgttcaactcttaccatagtagtaaaaggctaaacaaattagtgtggctatgctctagtaaagcttgattttggaaataagacagcagactagatttgacttgttgataataatttgctgatctttgctatagattatcctgtatagtaaattagttcttcaacgctaagtttattttgaaaagattatttttttcagatcttctttaaaaatattcctttattattctaaaataacgtttgggctgggattacaggcgtgacacncgtgcccggccctaaaatgaaattattaatgttggttctgaaacaacctcttagcattcaga

SEQ ID NO: 96149 - DNA, 1471 bp, Homo sapiens
tgagaagaatgttaacttccattatgtgagagcagatgaaaccaaagccttgggcccacacagcaaacctttgggtagcaacgagttctagaaaaatggagcctaaggagtccagattgtttttccttgaaataccaagcaagtctaaaatgattactacccatgagatatatttttaatgatgttaggtttgggggtgtgttagattgttttgcattgctataaatgaatacctgaggctgagtaatttgtaaagaaaagaggtttatttggctcacatttctgcctggcagtggctatagttggcttctagtgaggcttcaggaagcttttactcatggtagaaggcaaggggggggcaggcatgtcacatagcaagaggaggagtgagagagagaaggaggtgccaggctcctttaaattgtaaactaacagcaagaactcactcattcccatgaggaagggaccaggccattcatgagggatcctccctcatgacccaaacaccccgactaggccctacctccaattctgaggatcacattccaacataagattcagagagtgaaaacattcaaagtctaccaggaggtgattaaagtgatatgacaatgtgaggtatatgttacctggaaggtagtaggagcagatggtgggaagaagaaaagtgtagcaactacccagtcctctgcatgaaagagccctccctcaagagcttggaagcaacacaaaatggggagtagaccaggtctactatcagcacagagataagagactctgaacagagaagacggatccaagggggacagcctggagtcgggggacccagctggaggccagcacagttgcctgggcgagaggtgagccctccctcctggagaggtgagcccttcagaggaagagatgagaaacggaaacccctgactcattaccatcggccttggcttgctgttccattggcagccctttctacctgtgatcaacacatgcctatctagcagcatactaactctgtctctcattctagagcacgcatccgcccagagttaataagttttagaatgtcggcgtcctgtcattgcatcatccacagattcagtgaccagagaggaagaaacacagggaagctttatattaataaaggtcttgcgttgaatattcctaagcaactgtcaaaagtaagcagttcgtatgcttcttttctggtgacaataatagactgggccccatcccttcccagagctcccgataagcaactggatccagtctccactccagaacctgaatggactttttgctcaatacagctactgctggccagtcagcttcatgggacatgtgccaagaggtcttccattccatcttgagtaaacaaattagagtcctagcaaaaactcttcccatgagccctttaactgacctaaattcaacatatgtcataatctaggaggaagcaccaaaatggaaaact

SEQ ID NO: 96150 - DNA, 938 bp, Homo sapiens
tgagaagaatgttaacttccattatgtgagagcagatgaaaccaaagccttgggcccacacagcaaacctttgggtagcaacgagttctagaaaaatggagcctaaggagtccagattgtttttccttgaaataccaaagcaactacccagtcctctgcatgaaagagccctccctcaagagcttggaagcaacacaaaatggggagtagaccaggtctactatcagcacagagataagagactctgaacagagaagacggatccaagggggacagcctggagtcgggggacccagctggaggccagcacagttgcctgggcgagaggtgagccctccctcctggagaggtgagcccttcagaggaagagatgagaaacggaaacccctgactcattaccatcggccttggcttgctgttccattggcagccctttctacctgtgatcaacacatgcctatctagcagcatactaactctgtctctcattctagagcacgcatccgcccagagttaataagttttagaatgtcggcgtcctgtcattgcatcatccacagattcagtgaccagagaggaagaaacacagggaagctttatattaataaaggtcttgcgttgaatattcctaagcaactgtcaaaagtaagcagttcgtatgcttcttttctggtgacaataatagactgggccccatcccttcccagagctcccgataagcaactggatccagtctccactccagaacctgaatggactttttgctcaatacagctactgctggccagtcagcttcatgggacatgtgccaagaggtcttccattccatcttgagtaaacaaattagagtcctagcaaaaactcttcccatgagccctttaactgacctaaattcaacatatgtcataatctaggaggaagcaccaaaatggaaaact

SEQ ID NO: 96151 - DNA, 545 bp, Homo sapiens
gtgggactctccagtggctgcaggtgttggacagctggatggaaggatcacagcagcctcatgcatgcacagtggcagtggcctccgctgtctcctccatgagtccactctttctccagtgggccatatggatcacggcgtggtgacctcagtgttccgaggggtgcagggcaggatctgctgtgctcctaaaggtctaggctccagaactcacacgaccacactcctactgtattctattaatcaaagcaaaccacgggaccagcccagattcaaagaggtagacaggccgcaccatgtgatgtcagggacagcaatgtcacactgcaagggtgtagggccgggaagcaccattcactgggagtcagaattgtaaccatctcccatggtggcccaaattaagattctactctaagtaggaaaaggagagtggatactgaagggattcatttattctgaagtgagaaatccccaaaaataaaagcaagcagacgttcctggacttggccacttatcaccagatttatggtcctgtttattagtca

SEQ ID NO: 96152 - DNA, 340 bp, Homo sapiens
tgatactcaaatgaaagtctccggccttgatgaaggactgatgtatgagtatcgtgtatatgctgaaaatattgctggaattggtaaatgcagtaaatcttgtgaaccagtccctgcaagagatccttgtgaccctcctggacaacctgaagtcacaaatatcacaagaaaatcagtgtcacttaaatggtctaaaccacattatgatggtggagctaagatcacaggatacattgttgaacgcagagaactaccagatggccggtggctgaagtgcaattatactaatatacaagaaacatactttgaagtaactgaacttactgaagatcagcgttat

SEQ ID NO: 96153 - DNA, 452 bp, Homo sapiens
agcaaaccttttagaataaaaagcaatttacaaagtactcttatggaggcttgtgtagtattaaacacacactgtaaataggttaaaatgtggcactgtgttctttaaaaggctgacatttgtcttttgaatgttcataatcttgatttacaaactgatagatggggcaaaactatttttttttttgcataatatgggtacaagtcattcaagaaggatcaaagttataaatactgtggattttgttctcaggaaatttggaagattttgattaaaatttaaaacatcaataatttgcattgtagaaatggttttaaaactataaatggcatttaagagctttaaactagcacaaggactcatgaaaaatctgtatttggcattattttcctgttctgtttgtatagacttaattattcactggataatgatacaaaagggaacaaggctga

SEQ ID NO: 96154 - DNA, 584 bp, Homo sapiens
gccaaagcagccaacaaagccacagccctatcggctgtactgggctctgccttttgggcagctcgccggccactccccaaaagcagagcattccatcctttctctttttaaacccacgtcatcatctgatcataatggaaatcaatctcctcaaaccaccatgcaaaggcgtatccatggcaacctcaaaaggaaggacacagagatgatgcttcagtggctgcagcaggaaaagctcttcgcctctcggtaccttaagtatacctgagtagccagtggtcaacatgggtttgctgctctcctcactgcaataaatgacggaaacctgtagctcagtatggattcaggggcgcctcagacgctcgcaggaacggaggggagacccttgcagttctggaggaactctaaggcgcagtcactctgatcccaggagaacaatgctaggctgaagagctgagccctgactgaaaactgcgcaccgaccgcagccgggattacatcaatcaggcacaaagctggacacctgggacaggataagcgcacgcgcactgtgcctgggaagccgattaggaccataagaaatc

SEQ ID NO: 96155 - DNA, 499 bp, Homo sapiens
gccaaagcagccaacaaagccacagccctatcggctgtactgggctctgccttttgggcagctcgccggccactccccaaaagcagagcattccatcctttctctttttaaacccacgtcatcatctgatcataatggaaatcaatctcctcaaaccaccatgcaaaggcgtatccatggcaacctcaaaaggaaggacacagagatgatgcttcagtggctgcagcaggaaaagctcttcgcctctcggtaccttaagtatacctgagtagccagtggtcaacatgggtttgctgctctcctcactgcaataaatgacggaaacctgtagctcagtatggattcaggggcgcctcagacgctcgcaggaacggaggggagacccttgcagttctggaggaactctaaggcgcagtcactctgatcccaggagaacaatgctaggctgaagagctgaggtgggtcagaccggcctcggggcaaacgctcaggcggagcc

SEQ ID NO: 96156 - DNA, 180 bp, Homo sapiens
tgattcttttaaaccaagcggaagcctgcttcgatgacttggacttatgtctgcaccagggtctcattcctgtgtcttcaagcttttccatggagtggcaaaatgattcaaatccagaaaggaagggagtgaagttattaggagctaactaaagttaaaaaaaaaaaaaaaaaaaaaaaa

SEQ ID NO: 96157 - DNA, 680 bp, Homo sapiens
aaccagaaataatgtatggagggactatacaagggcatatatactagtaaaagtgttttctcaatagatcaccaaagaatttgccacacctgatatatagaaaagtttattgtgcagcacctctaccttcgctctcctgctcctgctctggccacataaaacgtgctggctcctcctttgccttctgctatcattggaagcttcctgatgcctcccaagaagcaaatgccatcatggttcctgtacagcctgcagaaccccccgaggtactgaagagtgagccgtatggggagaaggctgatgtctgggcagtaggctgcatcctttatcagatggcgactttgagtccccccttctacagcactaacatgctgtccttggctacaaaaatagtggaggcggtatatgaaccagtcccagaaggtatctactctgaaaaagtaacagacaccatcagcaggtgcctcactcctgatgcggaagctcgtccagatattgtagaagtcagttcgatgatatcagatgtcatgatgaaatatttagacaacttatctacatcccagttgtccttggaaaagaagctagaacgggaacgaagacgcacacaaaggtattttatggaagccaaccggaacaccgtcacatgtcaccatgagctggctgttctatctcacgtaagt

SEQ ID NO: 96158 - DNA, 622 bp, Homo sapiens
tgacaatggggcagagattagagcatgtgatgcctttacaatacaactaggaatgccaggcgccaccagaaggaggaaggcatggatgaggctggtcctcagggcctcagaaggaaacagcccctgatttcggacctctggcctctggaactgtgaaaatacgtttgtgttgttttaagtcccctcgtttgtgctaattggttacaacagccactcaagagactaaggtgtgagggtcccaggaacttcagcagggtaaggggccgagggtccatctggctcacagagctacagcccaccccttttctaggcccagagaggttgggcgatttgtccagggccacacaggtgcctatgaaagagcctgcaccaggatccagaacttggcggcccccatcccagctcctgtctccctgaatctttccctgcccggggggaggtctggggtggaggcatctgcacaggccacttgccctctcactttcccaagggttgaatggggacaaggagacccctccctctgggtggggcaaggcagtggatgaggttccacgagtccctggctcaggcgtggcccacaggctctgggtcagcagaagagactgtcttcccatctgtctgg

SEQ ID NO: 96159 - DNA, 873 bp, Homo sapiens
gataaaatacctgggtcctaggtgctcaaaattggcatctcagggagctgaagaaatgtaactggtgtatactgaaggaacttgaagataggaccatgtgaacagtgtcaataaactttaaataataacagaatttgtcttttttttcctaaaatgggaaaaaatgtatagatatcagaaatccatgctattttgtctaccaacccaatcataatttcaaaaatgatttgtcatatcatttgtgacaaagtgaaaaataaagcatggttttcataaagataaggactctaacctattttagaaagggcctatcaaactggcagaataaaataatgtggatatagtgatgacccatccctagtttcacccaatagctttaaaagacttaggggacaagcacctcaaacacagtaaacactcaacaattttatttcagcaagttatatgtaatattttaatgaccaccatctggagaaaaatatccagttacacagatattcacctaaaacatgagtgttattaatgcagaagaaatttatagcaaggctaataaaacagaatgatctttaaaatcatctctaccaccaccagcactaaaaaagggaatgtaactagatacatagataaagggtagggacactattgtcaggaatccatatggagctttaggattttagctggctacattcaaacaatcttaatatatactacacgatgagaaagaacccaagaggtacattcatccataataaaagaaataaaggctaacggtagaactgatatttaacagtggataatcttcagttaactgaagacattaagagcaaatcaacgtatctgatacagcatccagggtgtaagaaaattgtctat

SEQ ID NO: 96160 - DNA, 470 bp, Homo sapiens
caggataatctcttcatcgaactacttaatcacatctgcaacatccccttttgttttgtaaggtgacatactcagattccggggatcaggacaggagatttttgaaaagaaccaagaaggattatttcatctaccacacatcccttttcctggtttcttttttatcctcttttttgctttcctaatctatcaagatgcttgtggctgcaaagtagcagaggccttagttaaacaatgctgtaatcaacagaaagacagaaggcttacacaactggatacccagaggagagtgagcccgtgactcagcatcgccatcatggaccctggttctttccatccctcccatctgctacccatagcattagcttcatcccgaggctggttccttgagtggccaagggatgaggctggaagtgtccttattcacacccactgagggagatagttgagtacttatcactttccatttg

SEQ ID NO: 96161 - DNA, 609 bp, Homo sapiens
gccacagagatgggtgaggtggggtgcccacccatgtggggcttgtggtcaaggagcagagatggtggtaagcagaatcgcagtgtggtatagcaaatggagagcctgccagtgtcactgcgaggtggggacggtggttgctgctgtggagctcctctcccaggcctcccatcctttccctcagctgactcggctgttccctatggtggccgctgaaggcagatcatgtcttcatgtgcctcaatgccagcctgagcattgacctggaaaaggtgcttgacagacatttattctgggctccataaaggaccagtgttgccatggtaggtggaggagaggaggaagcccagagtgtgacttgccccacacacccctggatatcacagtcctgcccctgcccattttggaaagaaccacatggagagggctcacttccatggacctgaaatcgtgagtttgactttgtcatcagctgcagagcaaggagggaggcagtttacatctggatgcctgcattcaccttgcccagagatgctgactgctgaggatgcacctcagggctttacagatgctccccttcttgccatgttcagtctcctccctgagatc

SEQ ID NO: 96162 - DNA, 965 bp, Homo sapiens
gaggaaaaacagcacatagaggcatccacagtatttaatttgtttggataacagttacagataaacaggtacaccccatatacaattaccaatactttttatacagttcatatttcagtacatcaacactattttatttacactctatttatatacattaacatctttttaaattgggattattgtccatatgctttatattttttattccagtgatttcccttttaggaatttatctgaggggagaatactctgtaattactccataatttgcaggcaaatatcatcatagcattttttaggagagtaaaaagttattaacaacttatatttgtctcacattagaggaatggttaaataaagcatggtgtattcattggataaactataatgcagttgttgaaaatgattaccagggagtttttgctaaccatttatgggaacatgcttatgatatgtgaacatttttttaaaaacaagacataaagttgcatatactggaaataataccttcaatattgaaaaaaatactatttaggaaaaaggacagaagaaaatctgccaaaattttgacagtggttgcctttgtattaagaatataaaaggattccatgcctttttacatttttctctgctttccaaattttccacatgaatattatacatagtaatcagaaaaaaatacagggacactcactcttatcctttacatttctctcctgtttggacctcagattcctcagtagaaaattaaactagatgccagcctgggcaatatgatgtcaccctgtctttacaaaaaatgcacaaattagccaggtgtggtgttgtgcacctatagtcccagctgcttgggaggctgaggttggaggattgcttgagcccaagagatcaaggcggcagtgagctgtgatctcgccactgcactccagcctgggtaacaaagcaagaccctgtctcaaaac

SEQ ID NO: 96163 - DNA, 467 bp, Homo sapiens
atttttgtatttttagtagagacggggtttcaccgtattggccacgctggtctagaactcgtgaccttgtgatctgccctactcggcctcccattgtgctgggattacaggcgtgagccaacatgcctggccctgagcatctttttcttatcagtttgctttaacggtttgacagtctgacttggcttatgactctgggcaaatcatttaatcctttgggccccattttgggctcattttactcatttaaaaattgagatgcttagagatagataatctctaatgtttcttttggttttaaggtttttggcactttctgagtgggtgatttagatttagatttggcctcatggcttaatcaagatcttacaaagtctatgtgaatgttattgactaaggaattttcttgaaacatctgaaatgaattgagcctttcaggtgtctacctataaggactgtaccccctc

SEQ ID NO: 96164 - DNA, 783 bp, Homo sapiens
gatttttcaaattaatttggcctaaatattatcccaatttattaaccttaattggagaatgttgaaaatcttgtctcttcataaaaaaaaaaaaaaaaaaaaaagccatttccgaatacgtagtagctgaattcctaaggctaaactgagaaattctgtagtttaactacttgatttacctattatagcaattatataaagtatagaaaagaaatagcattttacatatactattgtattagtccattttcatgctgctgataaagacatacctgagactggggcaatttacaaaataaagaggtttaattggacttacagttccatgtggctggggaagcctcacaataatggtggaaggcaaggaggagcaagtccccatcttacatggatggcagtaggcaaagagagaatgaggaggatgccaaaagtggaaacccctgataaaaccatcaggtctcatgagacgtattcactaacacgagaacagtatggggaaactgcccccatgattcagttatctcccacccaggtcccctcccacaacatgtgggaattatgggagttcaattcaagatgagatttgggtggggacacagagacaaaccatatcaaccatatgaactctttgggtctgtagaataaatagctattgttttttaaatctagcatgatcccagttagctaggattgctaatataaaagaaataaagatagtgaatatgaaattaattatccagattttcagttcatagatttttatgtaaaccactgtccttttgt

SEQ ID NO: 96165 - DNA, 666 bp, Homo sapiens
actaggtcttacaaacaagctgttattccaagaatctcttcaaaaaacagcaacaaggctttcagctttcagctgggaggaggccaaggtgcaactttcttgggtcgtcctgaatctagccacctctgccatgctgccgaagttctaccccaatgagatcaaagtcacatacctaaggtgtactggggatgaagtgggtgccacgtctgtgttggcccccaagatcagccccctaggtctgtcttcagaaaaggttggtgatgacattgctaaagcaactggtgactgaaaggatctgaggattacagtgaaactgatcatttagaacagagaggcccagattgaggtggtgacttctgcctctgccctgatcatcaaagccctcaaggaaccgccaagagacagaaagaaacagaaaaacattaaacacagtggaaatatcacttttgatgagattgtcaatgttgctcaacacatgtggcaccgatctttagccagagaactctctggaatcattaaagagatcctggggactccccagtctgtgggctgcaatgttgatggctgccaccctcatgatatcatagatgacatcaacggtggtgctgtggaatgcccagctaattaagaagcacaaaggaaaatatttcaataaaggatcatttg

SEQ ID NO: 96166 - DNA, 607 bp, Homo sapiens
gatctctttctattatacgacagaaaataaaaattatatttttgtctttgaaatccaatcaaaatataaagtacttatgcttggtatagtgtctcatagtgtatgaaatataaatagccccttaaaggtcttgcttctagatattcaggtattaaataacatgattaaaatcgttttctgtcattcggagaatgaggaaggaaatataaaattattttatttatttatggcaataccaaaaacaaaagtgtgaaaaacttcacaatgcttagtacttataactcttataattatgtcttattaagggatctttcttaagacattttgaaaagctattttaatatttcactacaaacaagtgataatattaaaattaaagtatatctattacaaatacatcagtaaaatattttgtgaccgaattttaagaattttgttatatttttcaaatgaaattgaaaaaaattaaatgtttatctaacatcacttttattgacacattgatattgcataactttgaattttttcagaaactatacaagggaaattaaatcctgcatttacatttgctagcaactaatgagtgtggactgaggataatatttct

SEQ ID NO: 96167 - DNA, 606 bp, Homo sapiens
  misc_feature (570)..(570): n is a, c, g, or t
  misc_feature (579)..(579): n is a, c, g, or t
  misc_feature (606)..(606): n is a, c, g, or t
gtttcataaaggtagtaactctgaatttatggactgagcataggctttgaagctagcgttgtagctgtaaaaaaaaggaaacccagtcttgtctgtgatgaagattaaatgaaataatgaacataaaatatagaacatagggactggtatattgtagacccctggaaaatgataaccgcttatattgaagttgttctaactcttctactagcttacctcactgaacttgagaacttaagcagttccagtggggtgggggtttgctaaagagaaagttggatttttcagtctaaataaataagaaaacttatttataagaaaactggaatggctaagaaaaagggaactttggatttagcttggactgtatacacttatatgaagttcattttagcttattttatgattatgttccatattttatgttcattatttcatttaatcttcatcacagacaagactgggtttccttttttttacagctacaacgctagcttcaaagcctatgctcagtccataaattcagagttactacctttatgaaactcacaaaaacacaggcatttctantaacagaanatatagctctgtttttcataagctggn

SEQ ID NO: 96168 - DNA, 466 bp, Homo sapiens
gggaggtggaggttgcagtgagccgaaatcgcgccactgcactccagcctgggcgacagagcaaaactccatctgaaaaaaagaaaaaaaattagatgactgtatcacatcagttggggaaacagattgcgatatcaggcagcaaagcgatttgcctagtggaattagcccctaaccctgcttgccctggtggttaactcactgctttcgctccccactctctaatacctgttaatacaaaatgagaggaagggaaagtcagcagtggctgctgggagatggggttagggaagaggctgactagaggggcagcaggggaaagggtgcagccatgccacgtgctgtagcctgttacactccggtatggctttgccagcgttcatagaaccatctaacaaaaagtgaatttgaaggtgtgtaaattattttagagttgaatttctaaaaaagaataggcccaaacatc

SEQ ID NO: 96169 - DNA, 108 bp, Homo sapiens
taactctgatgttaagaggtcttaaggtattcagttagaagttgtaacatttgggggccgggtgcagtggctcacgcctgtaatcccagcagtttgagaggctgaggc

SEQ ID NO: 96170 - DNA, 715 bp, Homo sapiens
actgctttgggggttcggttagtgcgaagacgacgttcttcttttcccctggtgtcagaatgcctgttaaaaaaaaccaacagcctccacaactagggcatgcacacattggtgtaatttgatggtgaaaggcctggggaattcctgttaggaaacctgtagacaatacactttgatcgctaatgggagtgtaacatctaggggttgtactagatgacatcaaggtgtccctttcaactcttctgtgattaatgagccttggcggggggtggggggtgggcagtgggggcttaaaactagtttagaccattctgtctttttttctttagcaaaatataccattcttttaaaaatgacacctgaaacaaagccagctgctgtgtttaaaatattgaaataacaagacttggattagttggtgtatgtgtgtatgttttacaagagttgaataggctgggcacggtggctcacgtctgtaatcccagcacttcgggaggcggaggtgggctgatcacttgaggtcaggagtttgagaccagcctggccaacatggggaaaccccaactctactaaaagtaaaaaataaaaaaagctgggtgtgatagcagacgcccgtggtcccagctactcaggaggctgaggtgggagaatcgcttgaacccgggaggcagaggttgtagtgaatcgagattgcgccactgcactccagcctgtg

SEQ ID NO: 96171 - DNA, 222 bp, Homo sapiens
gctacctgccacacactttcacgtggccttattctgtgtgtttctcacagcacccttgagaaatagagactacgatcacatcttttacataaaagaaaaccaccatccagggaggcgaagtcccttgctcacagactgtcatgtgggaagctctctggatgcaatgatgtcctccagttgcattaccaggcaagctgtcccagagttcatggagcggaaagg

SEQ ID NO: 96172 - DNA, 643 bp, Homo sapiens
gttgcttgagatgctgacttacgagaagaagacttattcaagtttttcatctagaatatcactggcaagtgaagaccaccaacccagcagttctttcctcaatagaatcttatcacacttgttacttccctcaagatccaagacagagctacgcaaagtgagattggtctttggggctacaaaacttagcgacatctcttctgttatctctttcctttccccagagacactccacatcgtgtttcctgctgggcgatctgggaggcaaactgccttaaatttcccaatgcactccattatcaaaatgcatctattctgccaaggctgaattctgtacaggcacatctcattttattgtgctttgcagatattgtattttgtttttacagattgaaggtttgtggcaaccctgcctcaagcaagtctatcggggctgcttccccaactgcatgtgctcattttgtatctctgtgtcacattttggtaattctcaatatttcagacttttccattattatcgtatctgtgatggcaatatgtaatcagtgatctttgatgttactattgtaattgtttcggagcatcatgaaccatgtccatggtagagaacctaatcagtaaatgttgtatgtgttctgactgc

SEQ ID NO: 96173 - DNA, 785 bp, Homo sapiens
atttattcattcacctactgaaagatagcttggttgcttcccaattttggcaattgtggataaagatgctgtaaatatccgtgtgcaggtttttgtgtggacgtaagttttttcactttacttcggcagataccaaggagtatgattactgtattgtacagaaagagtatgtttgctgtttggaagaaactgcccacagtggctgtaccattttatattcgcaccagcaatgaatgagagttcctcttgccccacattgttgacagtgtttggtgatgtgtcttgagtttggccattttaatagatgtgttgtgctatctcattgttgctttaatttgcagttccctaatgatgtatgatgttgaacatgttttcaaatgcttacttgctgtctgtaatgtttgctcaggtcttttgtccattttttaatcaggttgttcatttttttgagttttaagtgtctatatatatttttatatatatataatataagatacatattttgagacggagtttcgctcttgttgcccagggtggagtgtaatggcacagtcttggctcactgcaacctctgcctcctgagttcaagtgattttcctgcctcagcctccggagtagctgagattacaggtgcccgccaccacgcccagctaatttttgtgttttagtagagatggggtttcaccatgttggtcaggctggtcccaaactcctgacctcaggtggtccacccacctcggcctcccaatgtgctgagattacaggcatgagccacagcgcccagc

SEQ ID NO: 96174 - DNA, 405 bp, Homo sapiens
actgcattccggcctgggcaacagagtgacactctgtctctctcacacacacaaaaggcacgtgatcagctagcatgaccctattcctgtgccctagttctgcccattgtacttcttccttgtttctgagattcgggcccacctggttctccatttcttaactgaagccatgttttgctgcctgtatctgagcctctgtcttacaagcttgctcagtactcctggttcatctagattctataagagtgtggtctgatttgctttcactaggtactacctccagtggaatagagtcttgcttgtgaatatcaagccagtcaccaggtccggttattagcgtgaacttttatgttacctactcctggatttggggccccttcctggggcaccatgggcccttcatca

SEQ ID NO: 96175 - DNA, 1094 bp, Homo sapiens
cttttagccttagtttcccctttaaattggtgatggattagatcagtggtggtcagccattttcttaaagcaactgaactgtatcttaatcagaaacttaactagtaaaacaattaaaatgcaagtctgttgcttcaagcaacaccactgtggctccatggagcactaatttgaaaaccacagagatgagatcatttctaagaaaacctttcaactttgtttccatgatgctacttgccacaatcttttttacttaagcaatgataccgtttctggctgaacactcaccacacagctattaatattggaaactgaggcaagataccaagagatttttgcacttgaattcctcagggttctcttacagccctgaaaacacctcttcaaggaaataaataacatctgcaaatggtgcagctgcccctaagtattcaaggcaaagaagccttagtttgcagagatgatgataaacttttcatccttccacagaaaatgagaaagccacaggaaatacacggttattttctaattaaagttcaatgtgtacgcttttaaattctgaagttatccttcttttatgatatcaaaatagccctcttttttgaaatgatggtagatcataccttttggtctttttcattgtccttacataaaagttggtaatcatatgtcagtcccagaagttttatttgacacttactggtctataaaatccaaaggaatggggatcactgcctgccttaaaggtttttttgtgtgtttgtttgtttgtttgtttgcatgtgaaggatttttatgtcacaaatccagctaacagtggatctaggatctaggcctcaccgaggatgtcactgaacctgtcagccccaatgacaggcacacaccttcaaagagcaagagtgcccatcactttctaggctccttgcctgctgctcattccatcatcacggatacagacttgtttctggtttcatcttccaccagagattgcaaagcatcctctgcccagtgcttctaggaggccttactgggatggttcataagccactttcctcttggtgacagcccctgtacactgtggcatgtacggctgg

SEQ ID NO: 96176 - DNA, 536 bp, Homo sapiens
ttcccatggtagtgaataagtcttataagatctgatgattttataaggggtttccccttttgcttagctctcattcattccctcttgtctgctgctacgtaagacgtgccttttgccttctgccatgattgtgaggcctccccagccacttggaactagatggagccgggcaggactaaccctgctgtgcagatggaataaaaggcagggacctgttccacgatgctcccaagctcagatcacagcgagctaaagggaacctgggaggtgggtctcctaagcctcaggcacaggtctctggaaaggacacgcactggatagaaaattgggaacagtttatttcaaacaacaaaagcagcccacagtcctcatggatgaactttgcagagggcctcacagccaggaacttcctttgacccctgggtggcctcgaccagacccttctcagtgggaatggccttggctatttgtgagtgagctgcctgcccattgcccatgggtcagtccatgggtggcttgggtcctctgtccagggt

SEQ ID NO: 96177 - DNA, 668 bp, Homo sapiens
cattagttagtgacaagatgaagtccagcctggcccacaggaccctttaggatctgcctctccagctgtttggtcccatcatttgacaataccaaattattggctgaaagcacagtcacacttgccatttcatatgccctggtctttacaccagcagtcctgtggcctggctaccttcctcccttgctaatatgaagtctacagacatccttctctgggaagcctgaattgggatcaacccattccctgaaagatgcttctcatctcatctgtattgccccagcaccttcttataccccatacagagactttttaggcacgatgttgtggacaccctacactcagcatccagctcagtgtgtgacccctggtaggcattccccaaatgttggtgcaaagaaccatgccgggggtggagccactgtttactcaaagtgatggttactggggaaggattggaggtcaggaccctagccaggtgccacctcggatgaggtccatgccatggctgcttacaccaggtcctctcttttcctccaccactgggacgcagcaccctccttcctcaagaattctgtcccccgtgcttaccacaggtaaaacacttccttggatggaaaggtaggctctcttcctcgggggtggtacattagtttcctgggctttgg

SEQ ID NO: 96178 - DNA, 602 bp, Homo sapiens
agtgggaggttacagcaccagtcggtggcaaggggccaggaagccacggttatgccctaggcgcagggagtgctggcgtgccccacccgtgggccccagcttcccagcccagcccagcccctcagcactgggagcttctccctgagctgccctgacaccatcctgcccttagcaacattctccaagcagcaccaccctcccttagcaaccgtctccaggcttcacaaactgtggccaggccagccccaagctcccctcatgtttttgtttaacagcaaatagtaacaaggccttgctggaccagctgcacccctgcccagggcatgcacccgtgcccagactggctcttgctgggtcctcatgacccttacagagatgctgtcctcactgaatgcctgcccgaccagcagcctggcctggccccaagccagcttggcatggagcttccagggagggggcctgctctgccaccctcacttccacccaagcaaggccttgtgccagggccagacaaagccagggccccagctgctgccctaacagtctttctggacagtgccactctgttccctgtgggcatcattatttcatctgctgaaccc

SEQ ID NO: 96179 - DNA, 615 bp, Homo sapiens
caaagtgctgggattacaggtgtgagccacagtgcccggccttgagttaatttttatataagtgtaaagtggggattcattgttttgcacgtggaaatccagttgtcccagcaccatttgttaaagatactattctttactcattgaattattttggcacccttgtcaaaaatcaattaaccattgtgtgaaggatttttccctggactctcaatttttgcatatgtactcataagaggttggtctgtagtttccttaggttgtttgtctgggtttggtatcagggtaatactgccctcagagaatgagttgttaccttttacttcaacctacttgtatcctgttatatttaatgtgagttacttaaagacagcatataattaggtttttataatccaaactgataatatgtcgaattggcgtgatgaggccatttatgtttaatgcaactattgaaatgtttggctttagatctaccattatgttgttttctgtttgttccctgttttccattgctgtttcttctttccttttttccttccctcctatctctccttctccctatacacacacacacacacccccaacacacacacatagtggttgttctagggg

SEQ ID NO: 96180 - DNA, 551 bp, Homo sapiens
ggcaggacagcgcccgcccgcccgggtaagcccctcgcgaccttccctgctgccactgccacagctccaggtgacgctcgccccgtcccctttacttgctctctcagcccaggaataattatagtaccattgcagacatccccgcaccctccctcttggagacccaggcggtgcagcaacgttctctcccaccccccgcagcgagaaacgaatgaaccccctcctactttcaaaagagaacaaaataacacgccccttaagaaaagaggcgatcctacctccgcaggcgctggagaccaccagtgatgcgtttgcttagcaatccctgagccccatttcccctggccgccttcgccctggggcctgggactgtgcgctagacgtggctgacactccctgcacggcaaccctggaaggagggagaggaaggagagttctataacccaggcttcactgccaacccctcctctgttcggttccccccaccccactaccaccaaatgcatacacccgcccaggatgcgttgtaaaaacaaaacaaaaccaggaaa

SEQ ID NO: 96181 - DNA, 2251 bp, Homo sapiens
aaacattcggtggagtcgcggacacttccgctcggggactgaggttgctgcagtttttccgcgatagtttggggcagttccgcgcgttgcaggcccttctgaatttcctggacctacgcattggatcctcaaagaactggtgatcgaattaggggaaaaggggcctcgtcggagagtagaggtttggaggggcaagggccgctgtttgcgttctcgtccgtggcaccttcttgggcttgggtctgtcctcgcttcccgggggcattggtacttggttgggtcgcgtctcacctggtttcagggtttccggggctctgagctcgcccactccgccccctgcaccccacgcgcgtggccacttcttcgcgatataacgttggggtgttaatctccttgggtttcccgttactgttctttaaaatggggactttagggccatcctaatggaatcgttttgggaactggaagaggtaacacaaatgagagccttaaagcagtccctgtcacttggtgactggtggtctcttgttaatttcccacgaaggaccgggtggggtcagagctccagctgcaggggcctcggcccttctccctgatccctgcaggacgctggatgatcccggaagccttctgacctctttttaggagagcgagggttgcgtccactttcatgaagggaaaggagcatttaacttttatgggggacggcgacgcggtcaaggtgtttcacagctttctcgttccccaacccgacctttccagaagagctgcagggagggacttcttggcttctgagggcaaagctctacgtgagtggtccttggctctttgaccgagatgctcaccccaaccgagagtgtataggttgtgtcctcgggcatgggggtcgataataattaagtcttaattagtaacttcattctaagggctttatacaaataaatttacgccacaccgtggctctgtggagaagtattgcttttttctattttaaaaacgaaagtgagacacagagcgcataggcacccgactagtgagaggtggagctggggttggaacctaagcagtctgggtcagagcctgatttgatcttctcttgggatacgttgtcattgaggcagaggaactagttggacttaggtggggaaagcaagacttaggggcttgaaattttctgagtttctaaaaatgttgtcaactattttgtttcaatcattacaaatattttgtattcttatagaaccatgtcattgtacagcattctatttttctttattaagaacaaaatgggccaccgcgcccagcctaacctaaattttttgtgcatgatactagaaaatttgccagtcacttgtgttttgtttcttcatttactcctcagaacagctgaatgaggctgttcttatcttcctcttaaacacatgaaatatgagaaacctgctcaggttcagacaggagaccaagggtccagaatattagttattttagcctttttactcagttgaaagagagagaaaaagaaagagagaattctccattgagggaactgtgccctgtggtgtgggtgtctggagtgtcctgttgagtgatgatgtccacaggtggcatcgctcctccctggacctaccttgggaggggggcatcttctcttcctgtcgtggtacctcttccatggcccccagcacttcaggcacccaaggacggcaattaccacaattgttatagaacattttaaaattcattatgggaaaagatgccttacacaaaccagaaaatgtaacagtctaaggtgaaaatatttaccatttggatatctaaaacaagatacaatccaaaataagaatcttatgcccagaccagggaagaaaatccaaagaaatacaaataaaggacattaccaggaatgtatagaaggagaaaaacagatgtcaataaatatttgaaaagatggtggtattcatttataatcaaataagtgagaataataaaacaaaatcatggccaggcctgtgactcacacctataatcctggcactttaggaggcttaggaaggaggattgtttgaaaccaggagctcaagaccatcctgggaaacatagcaagactctatctctacaaaaagaaaaaaaagaaaaaaacaatttcttcctaatcagattaccaaagtaatgggaaaattgataacttgcttttggctatgttaagaaaaaccagaataatgtatccccttgaaagattttgaagttaggt

SEQ ID NO: 96182 - DNA, 563 bp, Homo sapiens
aaacattcggtggagtcgcggacacttccgctcggggactgaggttgctgcagtttttccgcgatagtttggggcagttccgcgcgttgcaggcccttctgaatttcctggacctacgcattggatcctcaaagaactggtgatcgaattaggggaaaaggggcctcgtcggagagtagagctgaataccactagaaacatacctgtaaccagagacagctgattatagctttctgcagcaaggaagcccacgtaccaggggctgtcttggcacaattctgctttcccaggaactgcatcactcaggactctgcaagtttccagaagtaagagggaaaatgaccacgttcaaggaggcaatgaccttcaaggacgtggctgtggtcttcactgaggaagagctggggctgctggaccttgctcagaggaagctgtatcgagatgtgatgctggagaacttcaggaacctgctctcagtgggacatcaagcattccacagggatactttccacttcctaagggaagaaaagatttggatgatgaagacagcaatccaaagggaa

SEQ ID NO: 96183 - DNA, 1860 bp, Homo sapiens
aaacattcggtggagtcgcggacacttccgctcggggactgaggttgctgcagtttttccgcgatagtttggggcagttccgcgcgttgcaggcccttctgaatttcctggacctacgcattggatcctcaaagaactggtgatcgaattaggggaaaaggggcctcgtcggagagtagaggtttggaggggcaagggccgctgtttgcgttctcgtccgtggcaccttcttgggcttgggtctgtcctcgcttcccgggggcattggtacttggttgggtcgcgtctcacctggtttcagggtttccggggctctgagctcgcccactccgccccctgcaccccacgcgcgtggccacttcttcgcgatataacgttggggtgttaatctccttgggtttcccgttactgttctttaaaatggggactttagggccatcctaatggaatcgttttgggaactggaagaggtaacacaaatgagagccttaaagcagtccctgtcacttggtgactggtggtctcttgttaatttcccacgaaggaccgggtggggtcagagctccagctgcaggggcctcggcccttctccctgatccctgcaggacgctggatgatcccggaagccttctgacctctttttaggagagcgagggttgcgtccactttcatgaagggaaaggagcatttaacttttatgggggacggcgacgcggtcaaggtgtttcacagctttctcgttccccaacccgacctttccagaagagctgcagggagggacttcttggcttctgagggcaaagctctacgtgagtggtccttggctctttgaccgagatgctcaccccaaccgagagtgtataggttgtgtcctcgggcatgggggtcgataataattaagtcttaattagtaacttcattctaagggctttatacaaataaatttacgccacaccgtggctctgtggagaagtattgcttttttctattttaaaaacgaaagtgagacacagagcgcataggcacccgactagtgagaggtggagctggggttggaacctaagcagtctgggtcagagcctgatttgatcttctcttgggatacgttgtcattgaggcagaggaactagttggacttaggtggggaaagcaagacttaggggcttgaaattttctgagtttctaaaaatgttgtcaactattttgtttcaatcattacaaatattttgtattcttatagaaccatgtcattgtacagcattctatttttctttattaagaacaaaatgggcctggcgcggtggcttacgcctgtaatcccagcactttgggaggtccaggcgggcggatcacgaggtcaggagttcgagaccagcctggccaacatggtgaaaccgcatctctactaaaaaataattacaaaaattagctgggcgtggtggtgggcgcctgtaatcccatctactcgggagggtgaggcaggagaatcgtttgaatctgggaggcggaggttgcagtgagcggagatctgccattgcactccagtctgggcgacagtgcgagactccgtctcaaaaaaaaaaaaaggacccttctagtttggaagacacttcacaacgaaaaacaaagtacagaactctagttactgagacagtccacgcttaatggggggaaacaatgtggtcgaggtgttagaggccgggcatggtggctcacgcctgtaatctcagcactgtggcaggctgaggcagaaggatcccttgagcccaggactttgagaacagcctaggcaacaagtgagaccctgtttctacaaaacatttgaaatttaagccaggctggtgttgtgtgctgaatgtg

SEQ ID NO: 96184 - DNA, 1002 bp, Homo sapiens
aaacattcggtggagtcgcggacacttccgctcggggactgaggttgctgcagtttttccgcgatagtttggggcagttccgcgcgttgcaggcccttctgaatttcctggacctacgcattggatcctcaaagaactggtgatcgaattaggggaaaaggggcctcgtcggagagtagaggtttggaggggcaagggccgctgtttgcgttctcgtccgtggcaccttcttgggcttgggtctgtcctcgcttcccgggggcattggtacttggttgggtcgcgtctcacctggtttcagggtttccggggctctgagctcgcccactccgccccctgcaccccacgcgcgtggccacttcttcgcgatataacgttggggtgttaatctccttgggtttcccgttactgttctttaaaatggggactttagggccatcctaatggaatcgttttgggaactggaagaggtaacacaaatgagagccttaaagcagtccctgtcacttggtgactggtggtctcttgttaatttcccacgaaggaccgggtggggtcagagctccagctgcaggggcctcggcccttctccctgatccctgcaggacgctggatgatcccggaagccttctgacctctttttaggagagcgagggttgcgtccactttcatgaagggaaaggagcatttaacttttatgggggacggcgacgcggtcaaggtgtttcacagctttctcgttccccaacccgacctttccagaagagctgcagggagggacttcttggcttctgagggcaaagctctacctgaataccactagaaacatacctgtaaccagagacagctgattatagctttctgcagcaaggaagcccacgtaccaggggctgtcttggcacaattctgctttcccaggaactgcatcactcaggactctgcaagtttccagaagtaagagggaaaatgaccacgttcaaggtgggtaggacttgcttctat

SEQ ID NO: 96185 - DNA, 569 bp, Homo sapiens
  misc_feature (569)..(569): n is a, c, g, or t
gcaacacacacacacacacacacacacacacacacacacacacgatcatcaacacatacttagcctttttagatccataaagtccagaaggcagtagggatcccaagacgacctcacccaaagggctccctggctctcctctgatggaggggcactgcttgcttggcccggtcccctccgtgccagttcccaggcgcactctactccagcccttctccctccctcccttcctccctctcctggcccaccctgctcttccctcgccctgcaaattaggtgggtgtggcaagggcaccgcctggtcccaagtgtccctctgtacccacacccacccactcacttgtaagctccttgatgagcaaacccctaaggcccccagctcagactcagcaggcattcaggtcaactcaggcagactggctaaggaccagcccagggcaattttgcagaaatgatcatttgcacagaatgggtttccttcacagggagaaacttgcctctgaaagctattttctgatcaagaaaaggcccactttttaaaaagtgaaacaagtttgcagatacggttn

SEQ ID NO: 96186 - DNA, 1077 bp, Homo sapiens
acagagacaggagactcaccgtcttgcccaggctggtctcgaactcctgggctcaagctatcctcccaccttggcctttcaaagtgttgggattacaggcgtgagcaccatgcccagccttggtttacttttaaactcagagactgtatctcagaaacactataatcaccaaaaaattttaaaaacacaatagaggtgatcttctacagcaggaatttatattaagcttatttcagttggcaaataaatcagattttactaatgatgtttaagaatagcgatattggttcagtcagcttgaaatgtaaagtatccaaataatcaaatcgatcacctatcctgatatgactactcattcatattcttctgctgtgcagaagccaattacccaaaaccatgccagggaatttatgtgctcagtcagtctcggaagtgatttccacagttcttaaccaacctgtcagctattagggttgaaaatcatatcatactgccatagaagcaccggctagaaataaatcaggaatcatttgcccttaattaacatgccaggttcaaaccaactttatttatttacactctcctctcccagtgagtgctctagttgccactttatccaactttcaaaaatatctcagagaggatttgagatttctattttgctagagagacatgcttggtcagattcaacatttaccaactctctttcatggagggaatttgctgggctcttttccttgcaatttctaagccaagtgtcttctgcttctgtaaactacttcacttaactgaaatttataacgaattcttcctgccatttggaatgtggtagttttgcataatctatttgtaagtgcttgtttccaatgttgctgactgtatctgtggagcttgttgtacaacctttacataaccaggtttgtaaaacagttgagtgaactgttctttgaaattttattttttttaattttcttatgaatattataaaacttagaaacatgtttgattatctaatttttcttttattgtatttgattatgtcactctagttaaaataaaagcactttggtgaaaaga

SEQ ID NO: 96187 - DNA, 299 bp, Homo sapiens
ggactatgtcatgaagtcattttatattttagatccacccatgcataaatgccaattgagtactatttgtgaaaatctagaaaaattttttccacaattcgttcactcaagtatgagtgatccgaattcaaatttaggttttggaaattgtatttccatattctcgggcaattttttttatttctctgtgttacagtttcttcatctatcaaattggaatgatacttcaaataattatgatgaatactatctatctatctaacacctacatgatagcagtgactcccaactaataatag

SEQ ID NO: 96188 - DNA, 222 bp, Homo sapiens
cttccatcaggagtgaagacatatttgtggaaggtcccatctacacagatggcaatgacagagttgaatttcttggaagtattgcgaccgaaggagcagatgcaagctgactcagcaggcacagtgaacctcgccaggctccactgagagtccacgtactgcccaatcataggccccaccttgtccacggagccagcgcggagcagcggttaaggtgggtat

SEQ ID NO: 96189 - DNA, 436 bp, Homo sapiens
tcaccctaacagcgggagctgctccgcgccatgctaaagccactccaggacagcaggacgggccgatgggggtcagcgtgtcggcccagcatgcggggtcatcccaggaacccacgtcccagccccttggagcccagctggagagactgtggggccagagggaggtgtgggagaggggcaggggagggtaacccctgggaacaggacagaggtgggggatccaggcccctcggagggtgcagagccctgagctcagcaaggaggggcagggagctcccagggcccagccctgtgcttgggaaaggagccgggagggggatgggcaactgagcggccccagggcctcaggtccacccccttggccgggtcccctcggccctgtccccatggccccgtcccctcggccccatcccctcggccctgtccccacgtccct

SEQ ID NO: 96190 - DNA, 896 bp, Homo sapiens
agcgggagactagggggcggcgaggagtgggacccgctcgcggccattggttgtgcggccaggaggggcggagggacgacgcgcgggctgtgcggggccggcagcccggatccactcccgctgcgcctgctgtccgccgtgcgcccagactgcgcgccgcgccgctgcgcccaacattcccgaggacggcttcgcgggcgcgtatcgtccagaccggagcaccgccccaccgctagcgcaggagacctgccggggaagtcgcgtgtcctgacctgcagtctcaatgcacatctgatacctgctgcctttgagaaacaagttttgttgtgctgatttaacagcctgtgaattctgcaaacacgatcgtgaaaaaatgccaatctgtcctgtgtaagccctgtgtgaagttttgactttaatctaccagatcactccttcaccctccataaagatgtctgaacctgacacttcctcaggattttcgggaagtgtggagaatggaacttttcttgagctgtttcccacatccctgtccacgtcagtggacccatcctcaggccacctgtcaaacgtctacatctatgtgtccatattcctcagccttttagcgtttctgcttctgcttttaatcattgccctccagaggctcaaaaatatcatctcctccagttcctcctacccagagtatccaagcgacgctggaagttctttcaccaatttggaagtctgcagcatttcctctcagaggtccactttttcaaacctttcatcctgaggaaaatggaagagtccttgagtgtggcagcagttttgacatccccttacggaagtgtcccgtgaggcattgcctcatgaaagaaatgatccttttggtgtagacctgcttctccttctcc

SEQ ID NO: 96191 - DNA, 274 bp, Homo sapiens
tgggattacaggcgtgagccaccatgcccagcccatgtattattttaaactcactcaggtgcagttgttaacagtaaaatacaaattcacttttagaaatttctgaatttctgttagcttgcattttgaatattttaagtgaatagataatgatattatagccaatcatatgtggatgccctcaaaaaccactcttagtcttaaaatgttgttttaattctaaaattttgattaccactgctgtggagaatagtgtcttgaatccttagcctca

SEQ ID NO: 96192 - DNA, 312 bp, Homo sapiens
acccatgttcaaaataactcaacaaacccatgttcctcctgtccctggtccagttaacatttttgtcatataatcttaaaaattttaactgctttgtttaaaaaaaaattattctgacagtctcccttctcccagtgcagttccacgctcctcttctactcccccaaaggtgaatgtcaagaatttggtacgtagctttccaggctattttttcttttttttgagacagagtttcgctcttgctgcccaggctggagtgcaatggcgcaatatcggctcacctcaatgtctgcctcccgggttcaagcaact

SEQ ID NO: 96193 - DNA, 99 bp, Homo sapiens
gttgtccctgacagtgatataaaatgagaaaaagatataaaatgatacagattggaaagaaagaaaacaatcttcatttgccaatgacattgtctacat

SEQ ID NO: 96194 - DNA, 233 bp, Homo sapiens
tatcccggatgcagccagagatgcgcatttcaacagggaattcagagaaggagcctctcctcttagccatcacagcttggaatgtgctgggtcacacctgaagccagcatgtcttacagtctcacccaaggcccccggcatgtactacctggctaccgctgctgattattcagggcccaagggctctttagtcagcaggtgacaaatcctgccaggactgggttcttctcttc

SEQ ID NO: 96195 - DNA, 725 bp, Homo sapiens
agcggagaatcatgatgtgagggcggctcgcaccccagcgcgcacccaggcaccttagagtccccggctttggctcccctgggtcccctggttgtgcgccaggcaagatgttgagatgcacactggaaaaccggaacgctcaaaccaagcaactgcaagcagctgtctcaaatatggagaagcatttgggagaactgtgccaagtctttgctgcctatgtgcggaaaactgccagactgcgagacaaagtggaccgaggatgaatgaaatcaactcatatgccgctacagaggccccacatctaaggctgggcctgatgaactttgctgatgagtttgccaaacttcaggattattgacaagcagaggttgaaagacttgaagccaaagtagttgaaccctggaaagcttatgtaaccattgtaaaaatgaaacgggatgaccccaaagcaacattcacagcaaggaatcgagaagctaagcaattaactcaggtagaaggaacaggtcagcgaaacccacctcatctgatcgacatgttattgtatcctttgaatttcgacctttaaaaaaaacgttttttaggccaggcatggtggctcacgcctgtaatcccagcactttgggaggctgaggcgggcagatcacgaggtcagaagttcgagaccagtctggccaacatagtgaaatcccatctctactaaaaatacaaaaaaaaaaaaaaaa

SEQ ID NO: 96196 - DNA, 1166 bp, Homo sapiens
aacagaagccatcggcacagccagcagacagacgtcccctttcaaaggtgcttcccacacatctgttcatcgccccatctgcagttgttgtcaatcttcagggcctgccttctccctcctatccccactgacaccctacaccctaggctcctgactgcctgccatggagggctgtgagtccagcctgcagaatcccctcctgagcagacacaggagtgcgtttacactcgggggcagtgtctggccttccgggggcaaaacgactcactgaacccgcagcccagggccactgggcaagggcagaggccactgcacctgtcctcagactcatccccacacttgaccccataggaactgatgcatctgtgtgagccaggccctgccttagtcagcagaggccactacttgtgccaaatccactgtgggcctgctgtaccaggctgatgctggccaggcgctggatgtcccccacagtcccctgaggcctgactgttgtactcaggccctctcccagagtcctccatcatctccccattttaccctaccccgagccccagtcgccaagaaggaggtgttgttcttccagggtcttcctttcaatgtctgtttccacagtctcatgctatagaagcgctgagccctccagcgtggttggaggatcaagggatgaaatgggacaggaggagaggggtcctccaggctggtgacccctgccctgttggcctgtctcccaagtggcagccttccctgtgggccacatcaggaaacccacggagacagggtgattttgcatctcctggaaaatgagtgggacactcctggccccctggctctccccaccacccctacatatgtgctcagaaggagcccaatgcattgaatggttccactgtcgagccctctaagacctggtttgcctcctaaacctccagtgtacttctctgataggtgtttaagctacaggtgagactttgaagtccagagaagacagacacacctgaaaaccggtccccatttgggccgaaccttaaaaagcccattgtcccagagtcctagtgcccacggagctgtctgtgtgtcattgtcctgcccaggtcatcaggtgtgggctgaggacaggcccagggcataccctcccataaaggggttttcttctttcctcattt

SEQ ID NO: 96197 - DNA, 460 bp, Homo sapiens
aaatagcctaagaaaattttattttttaagttatgttttgatttctgtttacttttttatatgtttactttttattgaattttttaatgttaaaaaatttaatttttaagttatattttgatttttgttgttttttaaccatatgtttactttttattgaatttattaatattgcaaagttcttgcactgccaaaccatgcctaagaattcaaagaaagaaatggtacagtagacggcctcattcacccatcatacagtatcttaaaacttgattcatgtacattttgatattttcatagtcttttaagaagttataacgagttggaatttaaatctgctgcaggggctgagcacagtggctcatggctataatcccagcaccttgggaggctgaggctggaggattgcttgagcccaggagttgagacctgggtgacatagtgagaccctatctttcca

SEQ ID NO: 96198 - DNA, 372 bp, Homo sapiens
  misc_feature (209)..(209): n is a, c, g, or t
taagagggatgattatgattccatcttttatcttcatttacattctacaacacagatttggggaatgcatgccgggaggaactatcacctcttttaatctgactttgagggctcatggtatttaaaaataaaattttgaggttaaaggtttcaaagtgtaggaagaaagtaaaccgtttttttgttttattttgttgttgttgtttttnttttttaaaggaaatcgcagcatggcaacaggttgccacagaatacccttccctgtaggtgagaaaataaacctgcataatgtacacaggcgtctacacgagaaaggaaaggacatgatgcaacatctcctcctttgcagcccagatttattcaagcaaccaa

SEQ ID NO: 96199 - DNA, 482 bp, Homo sapiens
  misc_feature (393)..(393): n is a, c, g, or t
  misc_feature (421)..(421): n is a, c, g, or t
  misc_feature (440)..(440): n is a, c, g, or t
  misc_feature (451)..(451): n is a, c, g, or t
  misc_feature (473)..(473): n is a, c, g, or t
ctctcagtattcaaggggtattggttccaggacgcctgaatatcccaaaattgatgaatacttaggtcccacatttgggcctgcggaatcctcatatatgaaaagccagccttccacatacagattttacatcccaggaatactgtgcccggccacatataacctttcttctggtggacctacgaagccatgagatagattgtgattcatttattccaacctcgggaacactgatgacttgtcagcctctatggcaggaactggagagtcaggggtagaacagttctagcacagtgcctaagaaagtggggagcacaggctgtccagaggcagggagatcctgggggggtacatggtgggctttagctggaatggttcattcagggacagttnaaccaaactgggggttggacctttcttnggtaggaaagttccaggtngcctggaggantttggggtggctttttggaggntatgggcaa

SEQ ID NO: 96200 - DNA, 379 bp, Homo sapiens
agttagttatccggtgtgatacctttgcagtgtgtcagcttaactaggctgaactagagtttccagaatttcatttcttgtatgtttccagttgggatggtctataaagtatattttttcaagaggtggactataaatggaaaacagtggccatttagtagcatacacataccttctcccagctactcaagaaaaaactaatctaagccagacgtggtggtgctcgcctataatcccagttactttggaggctgaggcaggagaatcacttgatcctgggagacggaggtttcaatgaaccaagattaagccactgcactccagcctgagccaaaagagctagagactgtgtcaaaaaccaaaaccaaaacaaaaaaca

SEQ ID NO: 96201 - DNA, 181 bp, Homo sapiens
taacaaggtgaaacattataagaaagaattttggaagacactatacagtcaaatattatagagtccagtcccagttgtaattatcataagaacagaacgtgtgcacttgatcagcttctgataggcattccgggtcaagggtagatctgtaactttacacatagactaacggaagagaatg

SEQ ID NO: 96202 - DNA, 127 bp, Homo sapiens
caccacgcctggctcattttgtattttgaatagagacagagttttaccacattgcccaggctgctgtcgaactcctgatgtcaggtgatcagcccgcctctgcctctgcctctcaacatactgggat

SEQ ID NO: 96203 - DNA, 509 bp, Homo sapiens
gagtatcccattcagaacttagagacaaacgctcagagtttttcggcttcgtattgctcccttctttggaaagttaaaagatagtcttcacttaaattacttaaagaggtaactgccctattattttaactcagtgaagctcaaccagggaggattttcctaaccagggaggatttccctcccccaggggaacatgtcaatgcctgcagacatttctggttttcacagctaggggatgccactggcatctagtgagtagagtccaaggatgctgctgcggtacccaggacagcccccacaacaaagaattatctggttcaaagtctctgttgttgccgaggctgagaaactctgctttaactgaggagcaggcaattcgggacagacccatgtggtcaggactgctctgctaactgcagccttcatttttggattgttaaaactctgtctcttaaagttccagcctcctaactttcccagatatccttacttgatttttcctcccaccc

SEQ ID NO: 96204 - DNA, 357 bp, Homo sapiens
agcagtctgattgaagaatggttttccccctacacccaggaggggccacagtcttggggcagatgctggcctctggaggccctgggtggccaggccccctcatgggaaaggactgggcatccctttggtgtgtggaattgggaccttccaactccttcctgtagaggaacccagcaaacgtgggcctgacaacactacatttttttcgggttatcagtttaaaagttggaagcccagaaaaagagaagagccttgaggaaggtcaagctttccttgttgtgttttgcatgttacttaattcactcagcttgctgaagttggtggtgtttgtgaagacagacagcagagggtcacaga

SEQ ID NO: 96205 - DNA, 477 bp, Homo sapiens
atcacgaggtcaggagattgagaccatcctggctaacacggtgaaaccccgtctctactaaaaatacaaaaaaattagccgggcgtggcggcgggcgcctgtagtcccagctacttgggaggctgaggcaggagaatggtgcgaacccgggaggcagattttgcagagagccgagatcgtgccactgcactccagcctgggcgacagagcaagactccgtctcaaaacgaaaaacacacaaaccagtatggagcattctgatatgaataagacacttgctcacttctcaatttctttggtgtccagctctacaagtgtatatagacttccaaataatatttaaatcctttaacaaaaatgccacctaagaaaatatgaaatacttcagtctgtctgtcagtgctcacttcctgtctagaaactttcaggctccggcacaaatgaaccatgtacttcgcctaagtcatctatggaaca

SEQ ID NO: 96206 - DNA, 398 bp, Homo sapiens
tcgtcgtcttggagcaaaagaagcaagtgctgctttagactcccggcctaactttgttcaataaatccccacttccaaatatcttgtgattgcagtgtgggtcatttttagtacttagatccagagcagtctctgattgttagtgacagtgctgtcaaattgcatgctgttcaccagctataaacgaaaacatcacatttccttgaagtgcactttaacgtgtaattcaaagacttttccaagaggcttactggggaaaaatagaggtgtgtacctttggcattggacatggagtctctgattttagattgtagttgtttccccaaatctttaagattgtggcagaaacatgattgtgactacggcattcattttgtagggcagtgcgtgttatttta

SEQ ID NO: 96207 - DNA, 758 bp, Homo sapiens
agcggaaagtgtggacagtgagaaggggggcaaagcaataggatggagctgcaaggacttgaagggtagtgttcagcctctatctaattttacacagagatggggaaggaacaggagccactccgcacatggtggtttcaatctattttacagtgttatacagtaacattcgcttattcaacctggtaaaaatggttcagagaggcagatgttactctccttaaactgaatgccacattttccttcctgaataccagcactgctatgaattatgcagtagacatgatttttacatagatctgattttcataatcttacaaaatttatataaattcacatttttaatgtcaccatgaaggaaagagcctaaataaacacacctgtgtggataattaacaaatcaaattaacattgcttgaaagcagtcaccctgggaatcaatctttcttactatatacactatgcaaaatattttagaattctttgcaaaaaaaaaaaaaatagcagggatttaattttggaaagtggataaataaatcagagttaaggccagtgaatcacacacaggcaacgtgtttctggtgtcaaaagcaagatatgcctcgtagaagtacatgagaaaatttgattaaatcctgcataatattatctcttagaaaacgtcttcctatcggatacagatttttattattttcggtatgtctgtctttatgtgtaagggtaaccattggttttaaaatcagaagaaaggtatattg

SEQ ID NO: 96208 - DNA, 302 bp, Homo sapiens
gttcaactgcacatgtgtgcaggtattgttgccttgcctgtctgcacacacatgtacctgtatgttcatttcacacatgtattgctgggaacatgtgtgtacatggctatgcatacatgtgtatgtgcctgtgtgttagtgtaggcctggaacccacgtacacccagggcatgtggggctggagaacaggcgtggccaagctcacagatgggcagctgcacggacacccagggcatgtggggctggagatcaggcgtggccaagctcacagatgggcagctgtgcggacacccagggcatgt

SEQ ID NO: 96209 - DNA, 368 bp, Homo sapiens
agaaatgagtaggggtgtgtcgagcacacacacgacactctaacacccccgagtgcaccctcacgcagctgagatggactgggaccatggataggctgcagcaagagcagcccaaggatctggattcctggaagaagtcacagggagggccttctctaagaagatggccaatgccccccagacagcctgttccgctgcttctgtcccagttctgtacaagtgtgggattctgttaatcaggaactgggcagcctcagcagtgccccctactcacggaaatcatgctgtcctgacctggccatcaaggaaggacagacctgtcatccatcacttttaccggttccattaaaaatatgtatgtaataggt

SEQ ID NO: 96210 - DNA, 356 bp, Homo sapiens
agccgtgtgtcatgtctgatcagagcatgattaagcaggacaggatttcacatgtgggccacaaagccctggacctggccgctcaccctgagaggggcactgtggaccccacccgccattcactacccagcttgccagtggggtgggtgctttgcaggctcacagaaaaatcactcgcccttgaaatgtcttatctgggcctggacacctccttagtttctcttgtgtttcctttctgtgtaaggctggtccctcaccgctggtttgatcacagccctctgtttcctcagggtcactggtaggtcagcgtttgaactttgtgatttctgtctccctccttcagtccagtctttgac

SEQ ID NO: 96211 - DNA, 378 bp, Homo sapiens
ccagatttcaactgacaagttttctgcaagaaagatgcttctctggtatctgctgagatcatttgaaatcatggtagaacgcccagaattatgggctcttcttgaaattggatatcatcaaacgaggcactaattacagaacaattaacaaaagcctaaaagggtgtaatggagaatttctaatgaatcctgacttatcatggctgaaagaagacttgaagttggattaatgtagaaacactggaattctactgaaggagctggtgcttgatttgatagaaaaaaagaattattacactgttctattccctttttcagtttgtaaaactcctcagacaattgttttctaagaaaggattaaactcctatatgaaatgg

SEQ ID NO: 96212 - DNA, 410 bp, Homo sapiens
atggcttttttttttaagctaacaaatggtatttgtctggctctagtgttaacaatttattctcttttactgaaacatcagttaagaataaccttgtattcttttatttaaaataaggctctcggccggcacagtggctcacacctataatcccagcactttgggaggccaaggtgggcagagcgcttgaggtcaggagtttgagaccagcctggccaacatggtgaaacccctcctctactaaaaatagaaaaattagctggcgtagtggtgcgtgcctataatcccagctactcaggaggctgagtcaagagaatcgcttgaacccaagaggcagaggttgcagtgagctgagattgcgccactgcactccagcctgggtgacagagtgaaactccgtctcaaaaata

SEQ ID NO: 96213 - DNA, 803 bp, Homo sapiens
actgggataacaggtgtgagccaagatattgggattacacccagacaagatattaaaatatatttaatagacacaactgtacctcacacatatacatttgaatatcgcataaatatctttaatatatttatccaaaatgaatctaaaattagctaaaggattccagatttataagaggaagactgttataatttgtccaaattgcataatattcttcctcctatatttcttatgggatgatgatttccaacacatgttaatatcccaaacacaaaaatgagggctcatggttcattcattgttgtctccttaattattattgggctcaacctttatcccttcaaaatctcctacaggccagccatagtggctaaagcctgtaatcccagcacttctggaaactgaagtgggaggatcatttgagcccaggaatttgagaccactatgggcaacatagtgacacccagtctctacaaaaaaatcaaaaacttagccaggtgtggtggcatgtgcctgtggtatcagctacttgggaggctgaggtaggaagacctcttgagcccaagagataaaggctgaagtgaactgtgatcacttcactacattccaccctggataacagagcaagaccctgtctcagaggaaaaaaaaatcatatatggaattcaaaagacaccaggatgcctaaatagttgaaaagagatcattttggtgataattggtttgcaaacttggaagacttcaaacttgcaaaattctggggctgactgaagacaccctctttttgaagaggagaaggatat

SEQ ID NO: 96214 - DNA, 340 bp, Homo sapiens
atacttgttcaaaagcttgcaaattagtgtaagctcaggacctgccgaacatcctttcagcattatgagattccagaaaatgtgaataggatgtttcagttgttaggtaatttccagatgccttttttttgtgctcagataattcaaatggcttcttttcaatacttcaggcttgtcatgtacactatattagagtgtgtaacatttttgaaggaatttggcacaggcatcgcttttccacttctgactctctaagtttgaagagtgcctgccaagatcgttataaatacatcctaataaatatattttcaccaatttttgaagttcccttttacttcaa

SEQ ID NO: 96215 - DNA, 299 bp, Homo sapiens
taactagagtacatcttacagagggtcacaaagttgcaaaataaatcatttttctttccttgtgacataagatacatatgtataattccagaacatttttaagtgtatagaagttttataaaatgtatagaatgcatttaagtgggtaggtggattgggaataaaaggaaaaagaaaagatgggaaatttctataaggatatcagtcacttagaaaatgaatgcggttttataagagccttcaagaatattcattaggaagctcatggtagaattgaatgccttttgcttgcccctttc

SEQ ID NO: 96216 - DNA, 150 bp, Homo sapiens
ggattaagatcttagagcagaatgggcatgcttttggtgattgctgtccatcatttcttaatcctgaaaacaagccccacattattgagtcacggacatgttagtaacttgctcagggtcacagccctgcacccactttacctgccatgt

SEQ ID NO: 96217 - DNA, 354 bp, Homo sapiens
taagtattggccgtcgctgatcccgggggaaaaacctagaccgcgatgtccggattaggggtcggggggagatataggggagaccgccgcgatatatatggagggtctgtgctagaattgaaagtgaagtcatcagaagtaggtgagattgcctggttcagtgattttcaacataggcactacttaaaaaccacctggggagcttttaaagaatgaggatgggggatcgaggcatccacagggattctgtatcatttggtctggtgcagggccagaccttgttactttaaagatgcttcccatgagatggtgataggtatctaggactgagaactgggctgagagcccaaagag

SEQ ID NO: 96218 - DNA, 366 bp, Homo sapiens
aagaagcaaaatgcttctcaaaaagattaacatctgagtgtataggcctctgtgctaaattactaaaagttgtatcagtatttttacataatagccaaactaaatgaagttgacattgtgtactaccaataactgcagagaaacccaataaggccagattttgtgcgagtgcgttttttgtaaaatgatcattcctagttttgaggggaacaaagaaatagatcattgtaacaacactttgaaatgggagaaggctttgtgatcatgtgcaagaaaaagcactagctgaactagccctcagatttgagattgagtttgggccctgccacatccttggttttgttgttttttttttttcgagacaga

SEQ ID NO: 96219 - DNA, 470 bp, Homo sapiens
ctgagggactggatgaggaatgtgtcctagcccacttaggctaagaccaccagggacaaacctgtagtccagcactgtcagatttatttacaatggcaatgggagagtctgcacactagagataccataggccaggggtccccaactcccaggctacagacgggtaccagtctatggcctgttaggaatagggccacacagcaggaggtgagtggcaggcaggtgagcgagtgagagaagcttcatctgtatttacagccactccccactgctcgcattaccacctgagttccgcctcctgtcagagcagcagcagcattagattctcacaagagtgtgaatcctattctgaactgtgcatgtgagagatctaggttgccctccattttttttttgtttgtttgttttttgggttttttggttttttttttagatgaagtctcactctgtcgccaggctggagtgcagtg

SEQ ID NO: 96220 - DNA, 1168 bp, Homo sapiens
tttatcttcttaccaaaagccatcctgattgctccctctgaggtgatggacagagaaaattttccctccaaggactgacagagaaagaacaacggagatgtggtcgtctgctggcatccatgcacttgtgcaactagcaaagcaccgagtccacagggaaaagggagagaaagtgtaaatgaaggtacatacgcagaagcacaattgccaggtcaattagtaactctacgtttaacacttgaagaactgaggaactgacagactgttttccaaagaagcagtcccattttcttatattcccaccagcaatgcatgaggattccagtgtttccctatcttcaccaacccttattattatctgactttcattttatcgtagtggggtgaagtggtgtttcatagtgaaacatagttttgatttgcatttccctgatgatgttgagcatcatcatgtgcttattattaaatttgtttgggagaatgtccattcagatcttttgcccgttttttaattttttttttgagacagggtcttgctctgttgcccaggctggaatacagtgggcagtggtgcaatcatggctcactgcagcttcagacttctaaactcaaatgatcctcccacctcagccttcagagtggttgggactaccaacacatgctaccatgcccagataattttttaacttattgtagagacagggtctgacattgcctaggctggtgcaatcaagttctttatcagatatttgatttgcaaattttttttcaaataaaaaatgatgaccaggggcagtggctcacgcttgtaatcctagcactttgggaggcgaggcagaccaatcacttgaagttagaagttcaagaccagcctggccaacatggcaaaaccccgtctctattaacaatacaaaaattagccaggcatgctggtgcacgcccgtagtcccagctattcgggaggctgaggcatgagaattgcttgaaccccaggatgcagaggttgcagcgagctgagatcacaccactgcactccagcctgggtgacagagtgagactcatctccaaaacaaaaacaaaacaaaacaaaacaaaagatgaagcggtaactcaggaaacctttatattattgtattattcataaatcaaaataaacctttgtaaaaca

SEQ ID NO: 96221 - DNA, 236 bp, Homo sapiens
cttttttcagtgtctcgctatgttgcccaggctggtcttgaactgctggcctcaagtgatcctcttgcctcagcctccagaatagctaggactacaggcatgtgcaccatggttttcaaaccttggttctctcaacttccttctccacagctcctctatctacgtaatcatggagtcctccatcctacctcctatagcactggttcccactaggagtaataccaccttggcaattt

SEQ ID NO: 96222 - DNA, 772 bp, Homo sapiens
  misc_feature (529)..(529): n is a, c, g, or t
  misc_feature (533)..(533): n is a, c, g, or t
  misc_feature (540)..(540): n is a, c, g, or t
  misc_feature (555)..(555): n is a, c, g, or t
agcggcaagactgatatataatgataaaaaaggaggacatagattattactgtcagaaatgaaacatgagatataactacagaccttcacacatcataaggctaataagggaataataaaaataactttacacaaataaatttggcaacttggaatggaccaatttttttaaaaaaacaaaatctaccataacttactcaatatgaaatacaaaatttgaatagttttataactaataataatattaaattttcaattaaatacttccctcagtataaatctccagatggtttcattgtaaaattctaccaaattccttaaagaagaattaacgctcattttacactatctcttacagaatatagaagaaaaaggaaaacattatgactccttccaaaaagtgattactatctgactagtataagaagataaaggcaataccaaaaaaaaaaaaaaaaaaaaaaggctacggggccaaaattccctcatgtgaaattccggtttgaaacccttttttaccaagggtttntccnttaaaanccgggaatacttaanccacttctctttttctttcgagtgaaccccgaaaagaatttctactcccacagtgagacattttcattcacatcagcaaaggaaacttacagtccccaacgggaaaggcgaaagacgcgggcgtttaacaccttcggcgatcaaactaccttgcagaacacctaaaccacttttaacaggtgcctcaaggacaagcagaagaaaaacctttactccc

SEQ ID NO: 96223 - DNA, 1139 bp, Homo sapiens
cgcgccggaaatggccgaagccggcgttcgcgagcgggggcgcggacgcgggcgcgcgctcgccactttcccgaccgcgtccgaagaccgccgaggcctcccgcagctccgcggtgacacccgggtcaggggcgcggggccgggcgccggggattgtgggaggcgcgggggggcgcgccggccgccttcggagccccccaactcgcgtcctgcaaaggccgccgggccctgtcgagaagacccgaccgcagatggcggggaggatgctcccggcggcgtgggaaccgggtctgactcccgagccaccgccgcttccgcaggggcgccggccccgggaaagtcaagtcataaatccctgaatctaaaactccattctcagagaaaaggcctccaaggacgggcgccgtgcgcggcaactgcctgcagttttgaagccctttgactatttcataacaaagacaaggccgggcggcttggacgcttaggaaaatcctggggctttgcaaaaacaacaggttaatctagtcgtgtgggatgatcaccaaaacaagacaggaaagaagaacaccgtgtcaatgctgaaaagccagcccctaacacagggcttctactccagggtttcctcgccagggaaccccaaacacacaggacctggagaagccgggtagagctggctcctggccctgcgcttgggtggtcggctgccttaagaagaactgcaccccagagacaggctcgcagctgccgaccttatccactcgccctttctgctggagcccaggcccagtgctccagcaaggaggctgagaaaatgctgaagactgatgcccacgggggacagcttgggctaaggataacgtttgcaaaacaaacctttaaaaacccatagcaacctgtttcctagagcacactcttcatctctccacccccaaactagtcccgactcggatcctccttttcctatcctctttctcttgctctcccgtctcctattcacttttcctctcctttcctcttgattattataaacaaatgctttccaagtcttaccgccatcatatgtgtacatatgcaacccttactgttaccaatttgttgaagtcaagacaggaggaggcaaagtttaaaaatcagaagca

SEQ ID NO: 96224 - DNA, 1375 bp, Homo sapiens
cgcgccggaaatggccgaagccggcgttcgcgagcgggggcgcggacgcgggcgcgcgctcgccactttcccgaccgcgtccgaagaccgccgaggcctcccgcagctccgcggtgacacccgggtcaggggcgcggggccgggcgccggggattgtgggaggcgcgggggggcgcgccggccgccttcggagccccccaactcgcgtcctgcaaaggccgccgggccctgtcgagaagacccgaccgcagatggcggggaggatgctcccggcggcgtgggaaccgggtctgactcccgagccaccgccgcttccgcaggggcgccggccccgggaaagtcaagtcataaatccctgaatctaaaactccattctcagagaaaaggcctccaaggacgggcgccgtgcgcggcaactgcctgcagttttgaagccctttgactatttcataacaaagacaaggccgggcggcttggacgcttaggaaaatcctggggctttgcaaaaacaacaggttaatctagtcgtgtgggatgatcaccaaaacaagacaggaaagaagaacaccgtgtcaatgctgaaaagccagcccctgtgagccccaaagtgcacgttttccacagtcccaaggaacacgtgactgtgtgtttccacacttgagaagtcaggataagaccccttggataatggaacaggggatgggggtgggagcaagcaccctacctggtcacctgcttaacttagaaaccagcttttaaaacctgtaactgcagtatgagctacgatcaaatttgtcttaacgtattttttttaatgtttttaatacccagaacacagggcttctactccagggtttcctcgccagggaaccccaaacacacaggacctggagaagccgggtagagctggctcctggccctgcgcttgggtggtcggctgccttaagaagaactgcaccccagagacaggctcgcagctgccgaccttatccactcgccctttctgctggagcccaggcccagtgctccagcaaggaggctgagaaaatgctgaagactgatgcccacgggggacagcttgggctaaggataacgtttgcaaaacaaacctttaaaaacccatagcaacctgtttcctagagcacactcttcatctctccacccccaaactagtcccgactcggatcctccttttcctatcctctttctcttgctctcccgtctcctattcacttttcctctcctttcctcttgattattataaacaaatgctttccaagtcttaccgccatcatatgtgtacatatgcaacccttactgttaccaatttgttgaagtcaagacaggaggaggcaaagtttaaaaatcagaagca

SEQ ID NO: 96225 - DNA, 378 bp, Homo sapiens
agcaagctacaagagagttccgtccttggtgtaaattgaccgtgtaatccttgtcaagtttgagccttactggagctttactttcttattcttaaaatgcagatatcttgcctgcatcctggacagagcttttaacaaggtcatatgttgcagaatatgaaagttcatgttaaaaaaccctttaaaatgtggtatcccatttactagctggtgaacttcttgaggaacctctgtgcccatgggtatgaagtgtatgctgaatgatcacccaatgttagaggagtgggtggactggtaacctgatttaagggccattctaactcttacattctatgatttttttaattctgtctttaagtttttacatttacaatcaca

SEQ ID NO: 96226 - DNA, 397 bp, Homo sapiens
caccagggaccaaattcctgggaaacagtttttccacaggtgggagtgggatggtttggggatgaaacttttccaccttagattatcacgcattagttagaatctcataagaagcgcgcaacctagatcccttgcatttgcagttcacaatagggttcatgatcctctgagaatctaatgccacccctgatgtgacaggagtgggagctcaggcgataatgctcccttgtctgctgttcacctcctgctatgcagcccggttcctaacaggctgagaggaccagtaccattctgtggcctgggcgttggggacccctgttctagatgatccacattcttttaaatgcctatatacaaaccatactttctttatttcttttctttttttgagacagtc

SEQ ID NO: 96227 - DNA, 259 bp, Homo sapiens
gtaatacgagaaaaatcacaacagagtaataaagatataaaactttcacaattaacactcatcagtgtgataaactaagcccatgtaaaagtaaaaatctctcacagttaacaaacgtctttactttcactaagaaggaactgaaattaaagtccttagtcactttggaggtggctgcaaaagctcacaacatagttgatccttaaaataattatgaatggcaaccagtgctgcctttctgtactcaaccatgcaactg

SEQ ID NO: 96228 - DNA, 352 bp, Homo sapiens
cacaaattgcccttttaaaaagacacacaaactgaatttgtcatgtctcaaatgataaagggtcttgcacataataaaaacaaaaagtaaaacataaaccactattctaacactaaaaatactggaaattggtaattataaacaatagaagtctgttagagttaagactcatttaaataaatcataggcaacagaaccacatatttcatctgggatattaaacgaagctagagaccttctaaatcttttacaagaaactgagagatcaagcatctcatttccctctaaattttttggtgccacaattggcaacagaagagtggggtggaagaaacactgggcaataaactac

SEQ ID NO: 96229 - DNA, 177 bp, Homo sapiens
cccgagagcaggctgggatatgatcgtgtgtgtgcaacgctggtgtgctgccacgctcatcgctttttctccccttcccccttgtgggttcctcgtactaaatctgtttttagtgtctcacaaagtaggattgcactttttaatttttaaaaaatttttttttagagacaggttctc

SEQ ID NO: 96230 - DNA, 337 bp, Homo sapiens
caggttttctgcctcctgctaagccaatttatacattccaagaaaatcttccatttcatccaggtgaaacagaacctactggaatgaagctggcctcccatggaatgaagctggcctcccgtctccttgatttgaagcagcttctccacgttggttattatgtcatttttctaaatctaacattttaaaatttgtgccttttctttctcttttgcttgacttctcagaggtttttttaatggtcttttcaaagaagtggttttgggttttatttatcaagtctacttttattatggctgttttaaaattaaatacatttatttcttgtttcccttaa

SEQ ID NO: 96231 - DNA, 653 bp, Homo sapiens
tggcctccctccgcctctagctgaccacatttctggggccggtctcatttgcttacgctaaagtggacctatgaggtcaaagggcattacaggctttttggcagatgcagctgaaggacctctggaaggactgtgccaacgcatgcaccagcctgcgtggtcccccatccctgtggctggtgatcctggggtgacaccctgatccagactctgtctttatcccgtaacagaggagagggcacgtcactgccacaggcgcctttcctcccatgccacagcaagatgcagacaagccaccctccccagacacacccactgcacgctgcagcagggcccagggagttgaatgttcagtccaggcctcacccccgtggttcagtgggatgcagggggccacacggaaatgccagaggcagccttcaataagcaaaagtcaataaggcccccaaaggcctggatgcttcaagtccaagcactcggggatggcggagggaaggtgccgccctcatcacaggctgggcatggcttcccaggggggatgccagggagaggctccagatgttcggagcctcagcgtgcccaatgctactaggtcagacctggctttcacctccacagtccttaagagctggttcaagactggggtatgaatg

SEQ ID NO: 96232 - DNA, 450 bp, Homo sapiens
ccctaggtgggaggcagagcaggagggtttggacttggcagacagcccagaagctgtctcctacaaataatgtacaaatgtaagtttgttaatggttgatgagtttacgatacagtcaaagtatggtcatttaggaggcggtgaaggtatggtcatctgtggtcagccccctttatatgtacttctcctccttgccattctttggtcccaaaataggtgattgataggcagtgagaatacctgtgatgtaggatattttgaaagaagggagaggtggagggtagagtgaactggagaaagaaagtataaaaaaggaaaaaagggcagggaaattctcttaatttttcattctcctaatccttggacattttttttccttcttcttgtcacgtcacttgaacggtttggctcttaagaaaaagagtcgggaggaagcaaagggaaacactt

SEQ ID NO: 96233 - DNA, 654 bp, Homo sapiens
tttttaaagacaaggcacgcttcttaattttactcttgaagtttctaattgttgccaagacaagaaattaggtggtttgaggattgcagctttcttttcctggatggctctgatagttgttccataaagcccttccagcaatagctctgttttctggatgccatgcgtggggcaaggatggggtggcccgaggctgctgagatagaccacattctgcatattctaagttgtttatagaatttgtccctttgcaggtatttaaatagtgggtgcaaaaccatcattgcttttctagttatgttaaagagaataaaactttcctactcagaaggcccaggacctatcatcaaaatctcaaagactggcactcttatcttttaatgcttttatgggttcactaccccagctttgtattacttatacttttcatttggtccaccatgttggtttgtttgtaccacttaggagatcctaactcatgaaaggggcatttggaggggctggggctcacctctcagtaagagggctttgctctgaattcaaaagccaatcctctcctattgattttctctttggttgagagtcaaacacaccttcctcaccacagcagtgtgtggagagcagatttaatttacctgcctgcactgcggccgc

SEQ ID NO: 96234 - DNA, 333 bp, Homo sapiens
agtagcagagaaggtgatccctgggtgcattttaatttgggtgctagaagcaaggaggtgcctggcaagttggagcgggtgagggtttggttggtgcttaaatggagcccctgagggtagaaaggaaaacttagaatgttgcctttgggaaactccaaatagaccacagggagggactgtttacggagggaggtggcactggattggtagtccagagctgagatatggtggcctcaagagccctgcccaggagcttggactctggtccatggtccctagggagccagtgaaggttttaggccaggggaataatgtgatcagatttccatttaa

SEQ ID NO: 96235 - DNA, 478 bp, Homo sapiens
tagtagtaatgttatattaaactgctttggcctgcatggtaatgaactatagccactgagtgggatcttggtggcctgagagagttaatgctgccagcatcacagccttctgtccatgaagtagaaatgagcagaaacctggatagtccaaaagtcattttatatttagctttggaatttgtttttgtgccttcatttgaatatggatgagtcacaaattgacttcatacaaattagcaaactttcattggaatggattctgttgtttgctcctcttcagttcctttctgatcctcactgcatgcaaagcacaaaccatttcttaagtgtagcagtggaggcagaactgtcctttttctgcttctttctagaaaaggcttgatgatggtggggttgcaagtctacatctcccttcggagtgtaaataaatagtgaaatagtgagaaggcagatcacaaggaaagtaccaagtaggtgt

SEQ ID NO: 96236 - DNA, 312 bp, Homo sapiens
tcatatgcttcttggtcatttgtatttcttccttatgaactctgatcatgttctttgccagcaaaacttttctttctcttggccgacaaactttctgtggaaaaccagctgagatggaatcatttaaatatcagcaactgcagctccccctgctgacagataaattaccaccaccatcaagtgcccagtaaaaaaaagtgagctagaaccatacgcttgcctgtcttctgggctgctgctacaaatacaaattatacacggtaataaaaaagaaaatactgtgtatctaaactcatacttaacagagctgtg

SEQ ID NO: 96237 - DNA, 292 bp, Homo sapiens
gtgaataagtgtcaccagatctgaggggtttatgaggggtttctgctttcacttcttcctcattctctcttgctgctgccatgtaagaagtgcctttcaccctcccccatgattatgagagaactccccagccatggggaactgttaagtccaattaaacctttttcttcccagtctcgggtatgtttttatcagcagcatgaaaacagactaatacactatgtaaatattaagtatgttaaaagtcttatctttatgaggagtcccctgggcacacattatggaggggtac

SEQ ID NO: 96238 - DNA, 803 bp, Homo sapiens
gtgatgaacaagacaaaccaaactcctgctttcttgggggttatactctcataggtggagacagatgcaacagaatcaattaaataaataagtaaatagaagatcttttcagatggaaaaaaaaaagtagtagcaataaaataaggcagagagatggagcagagttctcgacactggcagtgttgacatttggggctggataaccctgtgtggcggggggcactcctgtgcactgtaggatatgtaactgcatccctggcctctgcccattagatgacagcagtacccaccccagttgtgacaaccaaaatgtctccgacgtcagcaagtattccctgctggttcagaaccggcagcttggacttctacaaagggttacccaatcctgcactgactttttgatagcctttgttcctgaagaactcttacatagatctcagaaactgatcctccaatgtactggagaaacagttaactaatcgtgcacaggaacatctcaggacagttttcagaggctgaggctggaggatcgcttgagtccaggagttctgggctgtagtgcgctatgccgatcgggtgtccctcacactaggtcactatgcctttcagggtggccttttctacctgaaatagtctttctgggttctggtcatcactctgtctccccactcctggggtctaggaagaataacagccgtactgctcctgttcctggcgtacgcactattccttgtgagttcctcacactttgcttccatcttcgtaaatactctctttattaaatctctcaaattttcctaaaa

SEQ ID NO: 96239 - DNA, 436 bp, Homo sapiens
ataggcgtgagccactgtgcccagcctcctgtgagtctagtgaatcattgagcctcagggtggtcttagggacccccaacccaatggggaaactgacacaaacatcatgctcacactctgcctcttgtttttgccatgactaataaaattatttgtctctaatccaggaccacatgtcttctgccggcatccctaaaattgtcgcaggctaactttgtagcttgcaggtagggtaaactcccattcctcatagaattcttaccatcttcaaattattccatgttttcctcttgtatttttatagctatatgtttaaatgtagctcttctctttttattttatttttttcattttttagagtcttactctgtcgctatgttgaagagcagtggcgtaatcatagctaactgcagccttggactcctggactcaagga

SEQ ID NO: 96240 - DNA, 460 bp, Homo sapiens
tgttagcttttatctttttttcatagcttttcctgcaacctagacattgtttatatcattatcttggctgtgtcactaattagcaattgatttctgaaaatttagctcgtcatcaataaatgctgttcctaagtagtcaattagaatgaacatctcccagggatttatggggttattaagtctggaaggtagtcttggtgaaggcatacattaagaccttgtatcccaggaggattatctgtggtgacagcaacaggaggtgaacctgctcagcccagctgtggagttcagcaccaggctggtgaatccatcttcccaagacctcatgctgtcacagccaggagacttatgctctaattatgtgccccttcttttgcaacccctacagcttaatgggtttcacattctcttaaggtctaatgtcattttaaaattgactgacatgccattatctctcagg

SEQ ID NO: 96241 - DNA, 483 bp, Homo sapiens
aaaaaaaaaagataggatttctgtgtggttcacctttgtgacccagttggcacctggaagagttttctgtagttaaaatgccctcagagctgggtgcggtagctcacgcctgtaatcccagcactttgggaggccgaggcgggcgaatcacctgaggtcaggagttctagaccagcctgaccaaaatggagaaactcaatctgtactaaaaatacaaaattatccaggtgtggtggtgggtgcctgtaattccagctacttgggaggctgaggcaggagaattgcttgaacctgggaggcagaggttgcggtgagctgagatcgtgccattgcacttcagcctgggtaacaagagcaagactccatccccccgaaaaaagaaagacaaaaaaaaaattgtgtcacacaggccagatgcagtggctcatgcttataattccagcaatttgaaaggcaaggtaagaggatcgcttgagcttgagt

SEQ ID NO: 96242 - DNA, 484 bp, Homo sapiens
gcgagctgaacaggaccaagtggaagatccctttcacatggctgaaggcaggcctaggacctaggagcaaagcagttcttccagccccttcctcccaaagcccaaatcctggttccctggatctgactactctcacagtaagaaaaaagggactccagaaataactggcaagttagcaaaggggtgacatgttctagacagctggcgtgcctcacctatagccccactgctctaggcattttcaggagatgagtgagagctttgggactcctggcctggatacgcccaccagagggagaggaaaagccagaagacagagctgggagcaaccatcttaccaggctcagaactttagctccttcaattcattcaacacatatgttgtcccttcatatccatgggggattgcttccaggacctcccgtggctaacaaaatccagatgctcaagtctctgatataagatgctgccatatttgcatata

SEQ ID NO: 96243 - DNA, 336 bp, Homo sapiens
gataactgggacccccgtgatcgcatctgagcccaaagctggtggtgtatgtgccaccctcacatatgcatgcattacaaggggcatgaccagaggggtggacacagccctcagcatgctcgctccttctagaactcaacgaaaagtgcctgtactgtttggttctctcatgaagacaaatacggaagagactaatggaaagcccaaaagagaaggtgaaatgtggctcaccatctgcctttggtcttggcagcccagggcatttgggcacccccaccagcttttttttaaagatggagtctcgctctgttgcccaggctgtgtgtgcgacccggg

SEQ ID NO: 96244 - DNA, 712 bp, Homo sapiens
ggcggggcgcggcggcagcggagcgttgtcggccagtgccttccgtgaagttgctcgccgggtcgttgggccctgtcgacctgtaggcgggcgagcgagccagcggacaagactgcgggtgaggctgagctagcgagcggccggcagggggggcgcccgggctgcgagccgctgagcccagccgcgctgccgccgccggccgtcgtggggccggaatggcgcaaggccggacggcgggccgcctttgcccaggacacacgctctggcgtttgttcctttgggcgtgacgccagcttcaacgggtacgcggctttcccgacgggtgctgatctccgagtcgctgttgtcacgcggactgctgtcctccagattcaggccggtgggtctggggagcccggattggtcttggaggagcaacggctgcgcaggtgactcggtggcctcaagtgtgtacaaaactcagaacatgaacaacaatatatattaccaatcttcaaacctggtttgcctagaactggaatacagttgcctgcgacatattttagaagaactagaaaagtcaaagtaatggataacagaaaagagcctccattcttcaagtgatgatcacatgggaccattttactacagacttcatttctgtgataccatggagctcttcatggaaacattaactggaacatgtttgagctgagagttcaccttttgaaac

SEQ ID NO: 96245 - DNA, 398 bp, Homo sapiens
accgcattcaggtgatattctgctcatcttcccaagagggctccccgctccctctcaagctgggctgagctgcagtccatctgcccaggccctgtcacctgggggatggggcttgtttgcagagcaaggtatttctgtttgcctacgtttttatgggtggagacagggaagccatttgaaaaatctgcacagatgagcgtggactcactcagcatgctctggatctgagctcttcacactcaggcagttaaagagaagccactgggaatgatgagaggttaaaatgccataaggagagtaaacaagcctcaaacaggtgcagaacaggtgctgactggctctgagcccaggcaaacctgcccttctcggcgcctggtggagatcaccacctcacccca

SEQ ID NO: 96246 - DNA, 589 bp, Homo sapiens
tccttgatgacagtgtttgaacctgtcctggcctctgtcctggctgcagccccagcgagggtcccctcctaaaggccagccgccgttgtccaaggcagacaatgtggagtagccaggcctctccaggccttttcatcccattcaaaggcctgcgcggcccccaccccctacggcctcaattctttaattcttttcagaaattctcctttcccagtggtcaggggccagcatgcccctgctgggctagcaagagcagttgacatgggcagggctggaggacggaggtggttgaagcatcagaggccagaagagcagttgtctgagacaggggtggacgtgtggcagatgttacagccaccacctattgtgtgcagacaacagttagcctgagtcggctccgttacctgcattcatcagctccagaatcctcccagctgcttggaggtatgctctttatgattctgtttcatagaggaggaagatgaggctcagagagggaacatgacctgcccagagcatggaagtgagccgccaggatcccagatgctaagaggacagagactatgaactcagaaatcccactgttagg

SEQ ID NO: 96247 - DNA, 125 bp, Homo sapiens
ggctccctaccttgccgtttataagcaccgtgccattccacctccatgcacctctatggcacctcctgggtctggaagtcaattcttccaatcctagcctggaagcttctgagatttctgaccat

SEQ ID NO: 96248 - DNA, 739 bp, Homo sapiens
agcggaatgacgttcgcccttaatttctcgccccttaccccgcagcttacctccggcatctcgcaggggaggcacgcctgcgcagtcacgcccgccctcggccccagtcagcgatttgggtctcggagcaccaaggagacggtggacggaatctgaccaggctggtggctacgatggcctgaagcgtgccttttgggttctcagctcgggctcacaagtgttttctgtgctaaatacaaaaagccctgtgatgttttgctttgcgtatccacctatctgactcgtaagaaccgaggctgaatccagacccacactctgtcacgtcgggagagcctgccgcggcgagcctctgcgagcgggcatttcttgggtggggaccaaaagcccagtgctgccatagtttcggatcattcttttaagaagctggggccgggcgcggtggctggcacctgtaatcccagcactctgggaggctgaggcgggcggatcccttgagcccaggagttcgggaccagcctgggcaacatggtgaaagcccgtctctacaaaaaattaaccggtgtggtggtgtgcgcatgtagtcccagctacttgggaggctgaggcaggagaatcgcttgaacccaggaggtcgaggatgcattaagcagtgatcgcgctccagcctgggcgaccgagggtgataccttgtcttaaaaaaaaggtgggagagtggaacgaaaacttggaataagtaggg

SEQ ID NO: 96249 - DNA, 186 bp, Homo sapiens
tgtgtgatgttccccaccctgtgtccaagtgttctcactatccaattcccacctatgagtgagaatatgcggtgtttggttttctgtccttgcgatagcactaccatttttttaaggacacagtatctgcagtatcggaggaaggtccttttaggaagaatcatgtaaacaaagggtagaggagta

SEQ ID NO: 96250 - DNA, 456 bp, Homo sapiens
tgaactaagcatctgttatgcactgtttaaatgctggaggcctgaaagctttgggggactaaacacatcccctaaaagatttgaatttactttattctatggacattagggagccagtcactcttgagaggcaggttagtgttgaagtagagagctggaatggctgggggacaaacggtctccaaggagcctccgccaccatagccacatgagtcagccacttgttgcctcagaacagacccactaccatttagttgctacccaaaactgacacgtgcttgtgactaggagagggatctggagtcataactcctaaaacctgaatttgcggtaagttgtgtgatcttcggcaagtcacatcacatgaaaaggagtacccatataggtgaaaatttttaaatgagattagtactaacactaatatcaaaccacccaccccatgttcttctgaactag

SEQ ID NO: 96251 - DNA, 362 bp, Homo sapiens
  misc_feature (312)..(312): n is a, c, g, or t
gtgaagttttaacaattttaaagtgtacaattcagtggcattaagcctgttcacccatgttatgcagccatcacctctatctcggtccagaactttaaaaaatcaccctaaacagaaatgctaactaagcagtcactctccatttctctctcttctaatctgaggaaactaagcgtgaaagaatgtgagcatgcagaaaaggagaggcaggtatcagaggcagaggaaaatgggaaattggatatgaaagaaatacacacctacaagtgagttcagaaactgaaccccaccctcctgggaaacgcccattgnagtgttgtttttaacctttgtacagtatttagacccagtaaatgcagaaa

SEQ ID NO: 96252 - DNA, 395 bp, Homo sapiens
attgctaagccttgttatttcttctataaaagtgttgaattagatgactttttaagaacccttgaacctttttaagactcttcgtgaatcctttgtgactcaagaatgtttttgattacacattccagtgtacctgaaagctatacagtaaggccagtttcataaaaatcctcatcgcttttaagttagagcaattaaaaatgaaacaaaaggacttgagcattcaataggaatatgaatacaagtgagtttagttgaaataaatactaattaaaaaatgaaaacagtgctgcttaacggatggtaagttgcagtttgaatcatggttactcttaggtggatttatgattagttagcatgttccatgattgatttgtttatgtacttccttaatt

SEQ ID NO: 96253 - DNA, 426 bp, Homo sapiens
tgcagtgcagtggcataatcacagctcactgcagccttgacctcccaggcccaagcaattttccctcctcagcctcccaagtagctgtgactacaggtgcatgccaccatgcccagctaattttgtagagatggggtctcactatgttgcccaggctggtctaaaaattctgagctcaagtgatccacacacctcggactcccaaagtgttgggactacaggcatgagccactgtgctcagcagttctgtgggtttgacaaagcatatagtcactacaataatcaagatacagaatagttccatcggtcacctccaaaaaaatttccctgcaactcaccaaccacggaccaggtttttttgtccctatagttttgcctttcccagaacaccatataacttgaatcatacagtatgtagtcttctgg

SEQ ID NO: 96254 - DNA, 380 bp, Homo sapiens
gagtagacaaattcacagaaacagaaagtagacacatatacctataatctcagcacttaaggaggctgagtgggaggatcgcttgtagccaggagtttgagactagcctgggcaatagcaaaactccatgaccacacacaaaaaagtattttatttttatattttattattattattttgagacagaatctcactctgtctcccaggctggagtgcagtagtgcaatcttggctcactgcagcctccacctcccaggttcaagcgattctcatgcctcagcctccagaagagctgggattacaggcaggctgaccaccgggattacaggcaggctgaccaccatgcccagctgatttttgtattttttagtagagacagg

SEQ ID NO: 96255 - DNA, 531 bp, Homo sapiens
ggggaagaggaatgcctttgcctgccctctggtttaagctgcggggtctagggctaaggtttggttgcttttctttgaagtatctcccttaggctgttgccagctgaccgcttgccagatacttaggcgactaaatagtctagcgtgactcttcctgtattttgttacgacgttaaactcaggttacagctatccttattctgtccattccactccctaaattcgggtcttgtgcgtgaaggaaaagaaacgtaatctctccagctccctctttgcacataacaagacaagtgacttaacacgtgcgagctgtttaaaatgtttttagaacattttaaacattattctctattctgaccaccttagttatcattcccgaaattatttaatatgagaaaatagaaacgattaatagcatatgaaggccactagtagacctactaacataatgtttcatgttaattgccttgggaacaaaaattattgaaaagattaagtgtaatgttaattactttggacccaggatttcct

SEQ ID NO: 96256 - DNA, 789 bp, Homo sapiens
cctgaaaggcagccctcaggagagcttgaggagaaaaccgaccggatgccccaagatgaactgggacaagaaagaagggacttggagccagaaaacagagaggagggacaagaaaggagagtatccgacatccagtccaaagcagggatctcccgggagtcactggtgtccagcaccacagaggacattctgtttcaaaaggataaaagcaccccggtgtatcccttgaccatgacctggtcgtttggatggaacagttctcttcctgtttactatattcgagaggaaaggcagagagttcttctgtatgtttgtgctcacactgcgatcatctacaacgtgttcaggaacaatcaataccaccttcagggccacgccaatattatctcctgcctctgcgtcagtgaagacaggcggtggatcgccacagcagacaaagggccagactgcctggtgattatatgggactccttcacaggtattcctgtgcacacaatatttgacagctgccctgaagggaatggcatcatggccatggccatgacccacgacgccaagtatctggcaaccatctcagatgctgaagtccagaaggtatgcatctggaagtggactttggcagtggaaacgccagcatgcactctcgaactccccacagagtacggtgttcagaactacgttacttttaacccaacaaataataaagaattggtgagcaatagtaaaacacgggcaatatattatgcatggtatgaagagagggatacactggctcacagtgccccactt

SEQ ID NO: 96257 - DNA, 902 bp, Homo sapiens
cctgaaaggcagccctcaggagagcttgaggagaaaaccgaccggatgccccaagatgaactgggacaagaaagaagggacttggagccagaaaacagagaggagggacaagaaaggagagtatccgacatccagtccaaagcagggatctcccgggagtcactggtgtccagcaccacagaggacattctgtttcaaaaggataaaagcaccccggtgtatcccttgaccatgacctggtcgtttggatggaacagttctcttcctgtttactatattcgagaggaaaggcagagagttcttctgtatgtttgtgctcacactgcgatcatctacaacgtgttcaggaacaatcaataccaccttcagggccacgccaatattatctcctgcctctgcgtcagtgaagacaggcggtggatcgccacagcagacaaagggccagactgcctggtgattatatgggactccttcacaggtattcctgtgcacacaatatttgacagctgccctgaagggaatggcatcatggccatggccatgacccacgacgccaagtatctggcaaccatctcagatgctgaagtccagaaggtatgcatctggaagtggactttggcagtggaaacgccagcatgcactctcgaactccccacagagtacggtgttcagaactacgttacttttaacccaacaaataataaagaattggtgagcaatagtaaaacacgggcaatatattatgcatgggtaagcagaaatattttgatttgttttaaatgtgggtagaagtatgtgttcattctttgagtacaaatgtttcagtaatgtaacaatatagtatctctacttaggaagcaatgaatatatattaaaatgtttttatttaactgtagtattta

SEQ ID NO: 96258 - DNA, 3729 bp, Homo sapiens
  misc_feature (2772)..(2772): n is a, c, g, or t
ccaggctccttctctataaagtgggatctatcatgaccagcctaccttatcaatataggagagaaaatcttcatgcctgaagatatacccctgctccctggctccccacgccggctgagccctcaggcagggtccagagggggccagggccccaaacatggacagcagtgtctcaagatgccaggtccccgggccccaggtctgcagggcggttccaacagagatcctggccagccctgcggtggagagagcacccgcagcagctctgtcatcaacaactatctggatgccaatgagcctgtgtccttggaggcccgtcttagccgcatgcacttccatgacagtcagaggaaggtcgactatgtacttgcctaccactaccggaaacgcggggtgcacctggcccaaggcttccctggccactcgctggctatcgtctccaatggggagacaggcaaggagcctcatgctgggggcccaggtgacattgagctgggaccgctcgatgccctggaggaggagaggaaggagcagcgggaggaatttgagcacaatctgatggaggctggactggagcttgagaaggacttggagaataaaagccagggatccatctttgtccggatacacgccccgtggcaggtgctggccagagaggcagaattcttgaagatcaaagttcctaccaagaaagagatgtacgagatcaaagcaggaggcagcattgcaaagaagttcagcgcggctctgcagaagctgagctcgcacctgcagccccgagttccagaacacagcaacaacaagatgaaaaacctctcctacccattctccagggagaagatgtacctgtacaacatccaggaaaaggacaccttctttgataatgccacccgtagccgcattgtgcacgagatcctgaagcgcacagcctgctcccgagccaacaacacgatgggtattaactctctgatcgcaaacaatatctatgaggctgcctaccctcttcatgacggtgaatacgatagtccagaggacgatatgaatgacaggaagctgctatatcaagaatgggcgcgctatggagtgttctataagttccaacctattgacctcatcagaaagtattttggagaaaaaattggactgtattttgcctggctgggattatatacatcattcctcatcccatcttctgtaattggagtgattgtgtttctttatggatgtgcaacaattgaagaagatattcccagcagagagatgtgtgaccagcagaatgccttcaccatgtgtcccctgtgtgacaagtcctgtgattactggaacctcagctcagcctgtgggaccgcgcaggccagccacctgtttgacaaccctgccaccgtcttcttctctatcttcatggctctgtgggctaccatgttcctggaaaactggaagaggctacagatgcgactgggctacttttgggacctgactggcatagaagaggaagaagaacgtgcccaggaacattccaggcctgagtatgaaaccaaagttcgagagaaaatgctaaaggagagcaaccagtctgctgtccagaaattggaaacaaacacgacggagtgtggcgatgaggatgatgaagataaactgacctggaaggatcgtttcccaggttacctgatgaactttgcctccatcttattcatgattgccctgacattctcaatcgtctttggggtgatagtgtatcgaataacaactgcagccgctctgtctctcaataaggctacacgctccaatgtccgggtgacagtgacagcaacagcagtcatcatcaacctcgtggtcatcctcatcctggacgagatctacggcgctgtggccaagtggctcaccaaaattgaggttccgaaaacagaacagacttttgaagagcgcctgatcctcaaagctttcttgctcaagtttgtcaatgcctactcccccatcttctatgtggcctttttcaaagggaggtttgtgggcaggcctggaagctacgtctatgtattcgatggttaccgcatggaagagtgtgctccagggggctgtctcatggagctctgcattcagctcagcatcatcatgttggggaagcagttgatccagaacaacatctttgagattggagtcccgaagctaaagaaactatttcgaaagctgaaagatgagaccgaagctggagaaactgactctgcccattcgaaacatccagagcagtgggacctagactacagcttggaaccatacacaggactgactccggagtacatggaaatgatcatccagtttggttttgtcaccctcttcgtggcctcctttcccctggcacctgtgtttgccctcctcaacaacgtcattgaagtgcggctcgatgcaaagaagtttgttacagagctgagacggccggatgctgtaagaaccaaagatatcggaatctggtttgacattctctctggaattggcaagttctctgttatcagcaacgcttttgtcattgcgatcacctccgactttatcccccgcctggtgtaccagtactcctacagtcacaatgggactctgcacggctttgtcaaccacaccctctcctttttcaacgtcagccagctgaaggaggggacgcagccagaaaactcacagtttgaccaggaggttcagttctgcaggtttaaggattaccgagagccgccatgggccccgaacccttatgagttttcgaaacagtactggtttattctgtcngcccgtctggcttttgtcataatcttccagaacctcgtgatgttcctgagcgtcctcgtggactggatgattccagacatccccacggacatcagcgaccagatcaagaaagagaagagcttattagtggatttcttcctgaaagaggagcatgagaagctcaagctgatggatgagccggctctgaggagcccaggaggtggggatcgaagcaggagccgggcagccagctcagcaccttcaggccaaagccagctgggcagcatgatgtcgtcaggctctcagcacaccaatgtgtgagcagttcagcctgcagcagaggagggcacggcagcagagacacgcacatgcacgtaagcatgttcctacacccacatggcgtgctgtctgtctgcaggggcctggcttgatggggtcttgaagagggggcagtgtgtaaaaagaaagagcctgacagaatgagtgtaggaaggaagagaaatgatgctacatctcagaaacttcaagcttaagtttcttttaggtccccttttaagctgcatccttttgagggattggaaccccactggggtctctccaccccagagtctcaggcaccgcgagcattcccatgtaccctggggcaccctcttgtacttcaccatcatttctgactttgaccagctgtaagagaaatgcagtcaggagcacagcatcccctacttactatcactacaagaaaactgagtcacttgcagtggggctgccacagtctcagcagatgcaaattaagttacaaggctgaatggtgcagccgctggacctgatagtaaggtgcaaaggtccaaacctgggcttgtctccacttcacgtcacaaaaacgtttggagctaaatgcagataaccatcattttatgaaagttcagatttaaaataataaaataaatggacacattctttataaagatgaaaaaaaag

SEQ ID NO: 96259 - DNA, 2741 bp, Homo sapiens
  misc_feature (1784)..(1784): n is a, c, g, or t
gtgctcaggctcctgctagaggtggggtggatctgtagggatggcctcagggaatgtcatgtccctccctttccagggtgccatgaacatagggcagtaggagtgaggaggacagggtgccatggggactgatgttatggaagagggggacttgagctgggtcaggataggatgagggtagaagctggaggatagcacaggagagagggacaacgtgcgcaagtcgagtatggagatgacgataccttagttgggactggtgcttttgcaggattagaaattcactccaacttactcaaataacaagagatttattttaagaaagcaagagacaagctcctgggtgtaggaaatgaaatataaccaggcctcttgggaactggagctagagatgctgtgggaaacgaaggccttccctcctttcagctaccatgttcctggaaaactggaagaggctacagatgcgactgggctacttttgggacctgactggcatagaagaggaagaagaacgtgcccaggaacattccaggcctgagtatgaaaccaaagttcgagagaaaatgctaaaggagagcaaccagtctgctgtccagaaattggaaacaaacacgacggagtgtggcgatgaggatgatgaagataaactgacctggaaggatcgtttcccaggttacctgatgaactttgcctccatcttattcatgattgccctgacattctcaatcgtctttggggtgatagtgtatcgaataacaactgcagccgctctgtctctcaataaggctacacgctccaatgtccgggtgacagtgacagcaacagcagtcatcatcaacctcgtggtcatcctcatcctggacgagatctacggcgctgtggccaagtggctcaccaaaattgaggttccgaaaacagaacagacttttgaagagcgcctgatcctcaaagctttcttgctcaagtttgtcaatgcctactcccccatcttctatgtggcctttttcaaagggaggtttgtgggcaggcctggaagctacgtctatgtattcgatggttaccgcatggaagagtgtgctccagggggctgtctcatggagctctgcattcagctcagcatcatcatgttggggaagcagttgatccagaacaacatctttgagattggagtcccgaagctaaagaaactatttcgaaagctgaaagatgagaccgaagctggagaaactgactctgcccattcgaaacatccagagcagtgggacctagactacagcttggaaccatacacaggactgactccggagtacatggaaatgatcatccagtttggttttgtcaccctcttcgtggcctcctttcccctggcacctgtgtttgccctcctcaacaacgtcattgaagtgcggctcgatgcaaagaagtttgttacagagctgagacggccggatgctgtaagaaccaaagatatcggaatctggtttgacattctctctggaattggcaagttctctgttatcagcaacgcttttgtcattgcgatcacctccgactttatcccccgcctggtgtaccagtactcctacagtcacaatgggactctgcacggctttgtcaaccacaccctctcctttttcaacgtcagccagctgaaggaggggacgcagccagaaaactcacagtttgaccaggaggttcagttctgcaggtttaaggattaccgagagccgccatgggccccgaacccttatgagttttcgaaacagtactggtttattctgtcngcccgtctggcttttgtcataatcttccagaacctcgtgatgttcctgagcgtcctcgtggactggatgattccagacatccccacggacatcagcgaccagatcaagaaagagaagagcttattagtggatttcttcctgaaagaggagcatgagaagctcaagctgatggatgagccggctctgaggagcccaggaggtggggatcgaagcaggagccgggcagccagctcagcaccttcaggccaaagccagctgggcagcatgatgtcgtcaggctctcagcacaccaatgtgtgagcagttcagcctgcagcagaggagggcacggcagcagagacacgcacatgcacgtaagcatgttcctacacccacatggcgtgctgtctgtctgcaggggcctggcttgatggggtcttgaagagggggcagtgtgtaaaaagaaagagcctgacagaatgagtgtaggaaggaagagaaatgatgctacatctcagaaacttcaagcttaagtttcttttaggtccccttttaagctgcatccttttgagggattggaaccccactggggtctctccaccccagagtctcaggcaccgcgagcattcccatgtaccctggggcaccctcttgtacttcaccatcatttctgactttgaccagctgtaagagaaatgcagtcaggagcacagcatcccctacttactatcactacaagaaaactgagtcacttgcagtggggctgccacagtctcagcagatgcaaattaagttacaaggctgaatggtgcagccgctggacctgatagtaaggtgcaaaggtccaaacctgggcttgtctccacttcacgtcacaaaaacgtttggagctaaatgcagataaccatcattttatgaaagttcagatttaaaataataaaataaatggacacattctttataaagatgaaaaaaaag

SEQ ID NO: 96260 - DNA, 2381 bp, Homo sapiens
  misc_feature (1424)..(1424): n is a, c, g, or t
actttacagagattattctatcagctacatgcaggatgggttggaaggctgaaagtctggagtcagctaccatgttcctggaaaactggaagaggctacagatgcgactgggctacttttgggacctgactggcatagaagaggaagaagaacgtgcccaggaacattccaggcctgagtatgaaaccaaagttcgagagaaaatgctaaaggagagcaaccagtctgctgtccagaaattggaaacaaacacgacggagtgtggcgatgaggatgatgaagataaactgacctggaaggatcgtttcccaggttacctgatgaactttgcctccatcttattcatgattgccctgacattctcaatcgtctttggggtgatagtgtatcgaataacaactgcagccgctctgtctctcaataaggctacacgctccaatgtccgggtgacagtgacagcaacagcagtcatcatcaacctcgtggtcatcctcatcctggacgagatctacggcgctgtggccaagtggctcaccaaaattgaggttccgaaaacagaacagacttttgaagagcgcctgatcctcaaagctttcttgctcaagtttgtcaatgcctactcccccatcttctatgtggcctttttcaaagggaggtttgtgggcaggcctggaagctacgtctatgtattcgatggttaccgcatggaagagtgtgctccagggggctgtctcatggagctctgcattcagctcagcatcatcatgttggggaagcagttgatccagaacaacatctttgagattggagtcccgaagctaaagaaactatttcgaaagctgaaagatgagaccgaagctggagaaactgactctgcccattcgaaacatccagagcagtgggacctagactacagcttggaaccatacacaggactgactccggagtacatggaaatgatcatccagtttggttttgtcaccctcttcgtggcctcctttcccctggcacctgtgtttgccctcctcaacaacgtcattgaagtgcggctcgatgcaaagaagtttgttacagagctgagacggccggatgctgtaagaaccaaagatatcggaatctggtttgacattctctctggaattggcaagttctctgttatcagcaacgcttttgtcattgcgatcacctccgactttatcccccgcctggtgtaccagtactcctacagtcacaatgggactctgcacggctttgtcaaccacaccctctcctttttcaacgtcagccagctgaaggaggggacgcagccagaaaactcacagtttgaccaggaggttcagttctgcaggtttaaggattaccgagagccgccatgggccccgaacccttatgagttttcgaaacagtactggtttattctgtcngcccgtctggcttttgtcataatcttccagaacctcgtgatgttcctgagcgtcctcgtggactggatgattccagacatccccacggacatcagcgaccagatcaagaaagagaagagcttattagtggatttcttcctgaaagaggagcatgagaagctcaagctgatggatgagccggctctgaggagcccaggaggtggggatcgaagcaggagccgggcagccagctcagcaccttcaggccaaagccagctgggcagcatgatgtcgtcaggctctcagcacaccaatgtgtgagcagttcagcctgcagcagaggagggcacggcagcagagacacgcacatgcacgtaagcatgttcctacacccacatggcgtgctgtctgtctgcaggggcctggcttgatggggtcttgaagagggggcagtgtgtaaaaagaaagagcctgacagaatgagtgtaggaaggaagagaaatgatgctacatctcagaaacttcaagcttaagtttcttttaggtccccttttaagctgcatccttttgagggattggaaccccactggggtctctccaccccagagtctcaggcaccgcgagcattcccatgtaccctggggcaccctcttgtacttcaccatcatttctgactttgaccagctgtaagagaaatgcagtcaggagcacagcatcccctacttactatcactacaagaaaactgagtcacttgcagtggggctgccacagtctcagcagatgcaaattaagttacaaggctgaatggtgcagccgctggacctgatagtaaggtgcaaaggtccaaacctgggcttgtctccacttcacgtcacaaaaacgtttggagctaaatgcagataaccatcattttatgaaagttcagatttaaaataataaaataaatggacacattctttataaagatgaaaaaaaag

SEQ ID NO: 96261 - DNA, 500 bp, Homo sapiens
ggctcctgctagaggtggggtggatctgtagggatggcctcagggaatgtcatgtccctccctttccagggtgccatgaacatagggcagtaggagtgaggaggacagggtgccatggggactgatgttatggaagagggggacttgagctgggtcaggataggatgagggtagaagctggaggatagcacaggagagagggacaacgtgcgcaagtcgagtatggagatgacggtgaggggatgacccagctgtaatgtgggcatgggatatatgttgtcaaatggcaggatgagcgattcagatagatagttcgggctcgacatacatagtcctggaatccagagagaagaacttagactgtaaggagccattgaacatgtaggcaggtagtgttggcacccttcctctgcccactccttcaatgcccaaatgccattgtccttcaaaaatcagctcggatgcctcctctggcaggtagcacttctcttcgcaggccc

SEQ ID NO: 96262 - DNA, 1103 bp, Homo sapiens
ggaagagtgtgtgacttggtgaagcagctcccaagcacccaagatgcccaggagcctctggaagcagcagttggtccccagtgtcttcccctgaacccctaggaacatgtagggttcaagggctcagtcccagtctcagaggggaaaaggcatgtgagcgtgcaactggcagccagaacctcgtgatgttcctgagcgtcctcgtggactggatgattccagacatccccacggacatcagcgaccagatcaagaaagagaagagcttattagtggatttcttcctgaaagaggagcatgagaagctcaagctgatggatgagccggctctgaggagcccaggaggtggggatcgaagcaggagccgggcagccagctcagcaccttcaggccaaagccagctgggcagcatgatgtcgtcaggctctcagcacaccaatgtgtgagcagttcagcctgcagcagaggagggcacggcagcagagacacgcacatgcacgtaagcatgttcctacacccacatggcgtgctgtctgtctgcaggggcctggcttgatggggtcttgaagagggggcagtgtgtaaaaagaaagagcctgacagaatgagtgtaggaaggaagagaaatgatgctacatctcagaaacttcaagcttaagtttcttttaggtccccttttaagctgcatccttttgagggattggaaccccactggggtctctccaccccagagtctcaggcaccgcgagcattcccatgtaccctggggcaccctcttgtacttcaccatcatttctgactttgaccagctgtaagagaaatgcagtcaggagcacagcatcccctacttactatcactacaagaaaactgagtcacttgcagtggggctgccacagtctcagcagatgcaaattaagttacaaggctgaatggtgcagccgctggacctgatagtaaggtgcaaaggtccaaacctgggcttgtctccacttcacgtcacaaaaacgtttggagctaaatgcagataaccatcattttatgaaagttcagatttaaaataataaaataaatggacacattctttataaagatgaaaaaaaag

SEQ ID NO: 96263 - DNA, 194 bp, Homo sapiens
ctccaatgtccgggtgacagtgacagcaacagcagtcatcatcaacctcgtggtcatcctcatcctggacgagatctacggcgctgtggccaagtggctcaccaaaattggtactgtgtcaccgagacttctggctgtcctaggccctctttaagtcaatgcgtgcaaggcttttggtgataaaataaaaaaaa

SEQ ID NO: 96264 - DNA, 702 bp, Homo sapiens
aggtctgtctacaggctccacatccagatcctaactaaaatttagaagtctttagatgtctgtggatattatcatctggaaaactgggactctaatagtttctgagtctagtattttccccatatagctactcagttttttctagtatatatgtcaaataaaattttgaaaaaattaccccttcccacaatctttgcaaattaatcctcaaatgaaaaggatttaatttagctattccatgataaataaaaaatatgcaattttattgaataaacttaaagtaattaataaattcaatgtactgtcagaagttttctgttttgttttgtttttaaaaatgtccattaaaatgctacctatgtgggttaaaaagcctataatacaatttctaacttcaggaatatgtgacaacatgtagaaagggtatattgggctgtgcaatttaaattttcatcacctacaggttatggcataagactgatatgaaaatgaatgagaattaggttatatgtagagtcttttgtcttttgttctattactataaaatatttcatttaaaaagtagggaaaaaattactaaggtggtgaatttgcctgatataccaataagcacagttgttttggaagttgcttggtaccactgactttttgcttctttaaataagtatttctttccttagcaaacacttctctttatgagaa

SEQ ID NO: 96265 - DNA, 358 bp, Homo sapiens
gctgcctgaggatcctgtgccgacattttacagggatactttggagaagtcattgttaggtactttcatcattgtggaagcagagtgcgctgacgcagacctagacagtggagcagctgggctgtgtggtgtagacagacggtggagcagctgggctgtgtggtgtagacagctggagcagctgggctgtgtggtgtagacagtggagcagctgggctgtgtggtgtagacagtggagcagctgggctgtgtggtgtagacagtggagcagctgggctgtgtggtgtagacagtggagcagctgggctgtgtggtgtagacagtggagcagctgggctgtgtggtgtagacagtggag

SEQ ID NO: 96266 - DNA, 747 bp, Homo sapiens
gggagctagggcttcaacctatggcttttgggggatacagttcagtccatagcagtggggaaaggatgtgactcagtctagagagactcaaggagggaatgcttagataggagcatggagggcgtgcctggtgaagggaacagtatggcacagcttcagaggcaagggtgagccagcagcaaggggctggctatggccggtacaaaaagcatgtgctcgtgggaaataggcaccaaagaaggcccagagaggtttaacaacttcctcagaatcacacagcttccaaatggttgggttgggtttacatttaggcggtcttgctccagagccagtgctcctaacctttgcaagccacgaacctcaagaaagtggagaaggaaacgctgggaaatctggaagtcagacatgcctagtttatctcccgggagctgacttcatttctaaacgtataggggtttcttagaggagcttcagaatactaatcatcgctagtgagggcacttggacactttgcttcacctcagccagcacctcttttcccagctgtaaaatggtatgataataagcacccctaggaatctcaaggatgttacgagggaaaaatatgcaataatatacaaagcactttgagcttctctgaagacagacgcatataaatggaaggtggtattataaggtggggtaatcactggttacctcccccccttttttatttaattaggagaaaaccagtaattaggaagcatg

SEQ ID NO: 96267 - DNA, 323 bp, Homo sapiens
gtaaattggtaaaagaaattgttcgcgaaactctagtaaagtcaaaactttgtatatgctgtgtgacccaactgagtataatcctatcagaaatgtgttcatatgttcatcaaaaacataaactggaatgtgatatatacacacaatggaatattattctgccttaaaaaggaagaaaattctgacatatgttacatggatgaaacttgagcacattatgctcaatgaaacaaagcaatcacacacacaaaaataagtattgtatggttgcatttacataaggtaactagagtagtcagattcatggagatagtagaatggtg

SEQ ID NO: 96268 - DNA, 544 bp, Homo sapiens
agtgaagcctctttagttcttactttttgtgctcattaagatcttagccttcttgaattatggaactccttgagaatctgatgattgttacggacctgctccagagaaatgcacacacatagtattttgcctacaatttgagagtctcttgaattttaaagccgttgcaatttaaatgcatcaggaagacttgacagcagagagtttcttgataaaaatgcagtattcctttattgctgcttgtttggttggtttaaaaatatgcgatatttcttgtcctaccctagcatttctggtgccagtatcaccaatttaaacaatctccctggtaattctaaagttcactaagatttgagaagttctgccctaaagactcagcttatcttcatagtctatctcatcttctgctcccagccacttaactcctgctacaggggttcaaactctggagtcctggttgttatctaaagggaacaactgccttcctgtagggctaaagtgaagccccttcatggagaagcactagagtctgacagtgggccca

SEQ ID NO: 96269 - DNA, 728 bp, Homo sapiens
agcgggctgagcccgggtccgagtgacgcgtcctgttggccgcggcggtttgctcagctcctggtcccgggccgcgccaactccgcgcagtgcagctgaggcgccgcccggctctgcaattccgggtgttcccgggcgtccccgcccccgccttcccctcagcaggcgcctgggcgccccccaactcctgtccagcctccttcggaccaacgacccgccccggcctccctgcatcccagagactactcgcggcgccttctctctctaattcttctttaccccctcagctcacctcccgaggagcgtccaacgggtcttgggggctcgcagaactgagccgcgaagcgcgggggaaaggcggcgagcgcttcccgcggcggcggggaggaagacgaagacttgtgcgctctcaaagttaatgtgaaaacatcttccaaacttctgggctgcagcccgaaacgcggggtagccggaaggctcccgtagctgccgtgccctcccccccggggtctgggaagggctcctaggcgcctcagagcacccggggtcggcccgcgggggaggccgcatagacgcgcccccaccctgacgaacggggaaggggcaggcgcctgcgaccccaactaaatccttcggcgcctcggtctgatgtatacacctgccacaggctctaagtgcctaagaagtgtaaaccaattccatcttcatgctgacgggacccgagtgaa

SEQ ID NO: 96270 - DNA, 305 bp, Homo sapiens
agtgttcctcccacctcagcctcctgagtggcacaagtgttatcctagacatgtcaaatctttgtgacagacatggtttcaaggcagatttataagtatttagaaaaacgttacaattttataccattaccaatatgaattctagaaggattagagatttaaattctcatcaaaagaaaccataaaaatactaagagacagtgttggtgaatagaagtaggaggagggttgaaagtccttttaaagcattacaccaaaggtgataatcaccaaagaaaaattgtgataggtttgatcacataaat

SEQ ID NO: 96271 - DNA, 750 bp, Homo sapiens
aatttctacccttttctaatataaatttttagaaattttgtttctcagatgtgaggcaaataggttgatctatttgtttattctttgacagagagactgactagagttagacagctttttaataccccttccagtcaaaaagtaacattgttatattagtatttagtagttttaaagtctgatgacataagaacagtaacaatttgttaatattcaaaagattgaaattgaaaaaaaggggtcctgcattctgctctcctagaatttttttttgtgttgaaatcttcttttccatattgtcattattgcttctttatcccatgacattaattttctggtgaggtgaccctgaatttagtcattttcgtcagtaattttagatttaagtaacttatcatgcttgttttaaagtctctctcagctcacccatgaagaaacaaattttttttcatttttttcttcaaaaatcagcaagtattgctgaatctaacaagtatcagcattcaggtttaaccgtgttatttgattgaaataaatcaaaccatggaaataatgggcactgtgtctgctcaagagtaaaattacccaatgaatgattatgtcaactggatgtcttttatatcaattgatgactttttaaaaaatctgtattttaaataaaatatggagagaacagtattggtccctacaacattccaatagctttgtcatgacagccatgtcatatgaaataacttactctgaatggct

SEQ ID NO: 96272 - DNA, 317 bp, Homo sapiens
gtgttgccactaaaacctgatttaccaaccataacctatttggggccatgctctgagcccacagtctttctgtaaccttaggatgtgtatgggcttctgtaccccactggggcttgggtcttcattctgaaggctcccgcgaatacacgttaaataaatgtgtgtgcctttttgcctgctcatcaatttgcctcatggcagtgattttcagcaaaccttcagagggccaagcggaagctctgccttggcccctacaggaggttcaggtagtggggacttcccagccttctccagatgttctcccactaccctgtcat

SEQ ID NO: 96273 - DNA, 587 bp, Homo sapiens
gtcctactgactaaatatttttttttaatcaagagacttaggtacgcataagcttcctgctaaattctgtagacaccttctatttatgggttacattatctggttgttggaattattgtgatctaacatttttcatgtatggaaactgttctatgtactgttgatctctgtagaatttgatcttttccagaatgtatttgaaggctgacctttcagtaaaagaaatgcaagcttttcagccatgttaatttatcactgcatcttctttgtaatatatatggcagttatgttaaaagtaaacatgtgtttttccttattctctgtgctcaggccatttatcatttagggacaaaaagttttatatagatcaaaagataaaaacttgggcctaaggcttagtcattgtaaggcagtgattccgactctttttatacttccttagggcattttaattaaaatccatcatgagatatgaaattatcaaactttgtataaccttttattttagaagaaagttttatatatatcttattaataaggagatactgataaatctagtaagtgctgttcccgctggggtcctctga

SEQ ID NO: 96274 - DNA, 681 bp, Homo sapiens
gtcctactgactaaatatttttttttaatcaagagacttaggtacgcataagcttcctgctaaattctgtagacaccttctatttatgggttacattatctggttgttggaattattgtgatctaacatttttcatgtatggaaactgttctatgtactgttgatctctgtagaatttgatcttttccagaatgtatttgaaggctgacctttcagtaaaagaaatgcaagcttttcagccatgttaatttatcactgcatcttctttgtaatatatatggcagttatgttaaaagtaaacatgtgtttttccttattctctgtgctcaggccatttatcatttagggacaaaaagttttatatagatcaaaagataaaaacttgggcctaaggcttagtcattgtaaggcagtgattccgactctttttatacttccttagggcattttaattaaaatccatcatgagatatgaaattatcaaactttgtataaccttttattttagaagaaagttttatatatatcttattaataaggagatactgataaatctagtaagtgaagagaaaccccctaaaatttgaagagatcactgctatagaggagcaacacagtctgtatctatggtctttggaacttggtagatgtccagtgaagttatgctgaatgaatcagcat

SEQ ID NO: 96275 - DNA, 727 bp, Homo sapiens
aaagtgcaggaattacaggctcgagccaacaggctgggacggctgcatcctgttttgacctgatcctgtttccatcagtggggtcgtgaccctgtgactggaaaataacttctctggcctcctacctcatcttcatttccatattaatagttatatccaagtagttagtgtcctgggtacaaatagttatctacagcactaactcattatatccacaatagatacgactatagtgttgagaagaatattgtttcaacttcctggattgatcaacttttcttcagcagagaatttagtgttgaaaagaacgtgactggcaacttcctgccttcaactagctattctggctatttctggttatttctaggtgggtcaactcttcaaggagaactgtaaaccactgctcaacaaaataaaagaggacacaaacaaatggaagaacattccatgctcatggataggaagaatcaatattgtgaaaatggccatactgcccaaggtaatttatagattcaatgccatccccatcaagctaccaatgactttcttcacagaattggaaaaaactactttaaagttcatatggaaccaaaaaagagcccgcattgccaagacaatcctaagccaaaagaacaaagctggaggcatcacgttacctgacttcaagctataccacaaggctacagtaaccaaaacagcatggtactggtaccaaaacagagatata

SEQ ID NO: 96276 - DNA, 745 bp, Homo sapiens
  misc_feature (442)..(442): n is a, c, g, or t
  misc_feature (647)..(647): n is a, c, g, or t
  misc_feature (650)..(650): n is a, c, g, or t
  misc_feature (659)..(659): n is a, c, g, or t
taggtttaagtcttaacttcatctggaactgattctgtggtatggtgtgaggtcaggacgttctgactcctgacatagctgaactttctcccagcaaaaatggtctctatccacaaacagccacttaactccattctttccagccagtgggctcctctacttagcgccacaagggaaaaagtccaagtcaccaatagctctcccctagggctgccctcctctctctggtctctcctcctctcgcatcagttcttcatagagcaactacagcagtagttttttcaaatgtgctgtcactctgtttataattgtcaacgactacctactgaaaatggaattaagtcctgactccttaccataatatacaatatcccatgcttctccagcctatttctgtaacactcttctctcatccactaaacctcagccacaccggccgccntttcaccctgtaggacaagcccaagttcatttctccctcaggccctttgcacttgctatttcctctgccggaaaagctctcgccatccaaactatggcttcgacgactggctgcctctcatcatttgggtaatgtcttctaagacaggccttcccagaccctgacgccatcccatctaaagtagccccacctcgacgggcgcggntanttcacgccntgtaatcccagcactttgagaggccgaggcgggtggatcacctgaagtcaggagttcagccattgcactctggcctggggaataag

SEQ ID NO: 96277 - DNA, 692 bp, Homo sapiens
acagaaaataccgagtccggtcccaggtatggagcagagctcgggaactcacataaaatactgagtccagtcccgggtatggagcagagctcgagaattcacagaaacttccgagtccagtcccaggtatgaagcagagctccggaactcacagaaaattccgagtccggtcccaggtgtggagcagagctcgggaactcacagaaaatgctgagtccggtcccaggtatggagcagagctcgggaactcacagaaaattccgagtccggtcccaggtgtggagcagagctcgggaactcacagaaaattccgagtccggtcccaggtgtggagcagagctcgggaactcacagaaaatgctgagtccggtcccaggtatggagcagagctcgggaactcacagaaaattccgagtccggtcccaggtatggagcagagctcgggaactcacagaaaatgccgagtcccgtcccaggtatggagcaaggctcaggaacttatagagcttctgcttccctttcccttcccagctacaggcacccttttcccccagcacacacaggttggaaaagagtttaagaacagaatgcctagttgttagtaattcatcacgacacctgacttaattaccaaagattattttaatggccgtgcatactactctcctagaacttctgtccttcctcccccc

SEQ ID NO: 96278 - DNA, 329 bp, Homo sapiens
caccttggcctcccaaagtgctggaattacaggcatgagccactgcacctggcctcttcccctcttacaaagacaccagtcatattggattagggcccatttaatccagtatgacctcatcttaacctgattgcatctgcagggaccctatttccaaataagatcacattcacaggtcccaggggttgggaccttaacatatctgcttgagggacgcagtttagcccacaacagttaccattccgtcgtgggcttattttctgctgggtggcagctactttatctgtcacagttttgaggaggacacttgtcattctgtgtgcctggta

SEQ ID NO: 96279 - DNA, 741 bp, Homo sapiens
gcaaggacagggatacagaacaatagaaagataactgattggttaacatcaggtgacttcaggttactctttgctgtaaggctaaaaacagagagaacttcattaacataccagctgaagattgtaattggcctgttagggaaattaggcttgctcgctcgctctctctcaaacaaggtctcactctgaagcccaggctgacatcagctcactgtagccttgacctcctgggctcaagcgatactcccacgtcagcctccctagtagctgggactataggagctcggcaccacgcctggctaatttttgtgtatattttttgcagagacagggtttcgccatgttgctcaggctggtctagaactcctggactccagtaatccacctccctcagcttcccaaagtgctgggattacaggcatgagccaccgtgcctggctaggctatctctcttgatttctcaagtcagataacaactcagtttcagtttagcgagcatgggtgactccatcttgatttttggtcttgtctgttgggacctagtgctggagtttagtacaaagcaatggcctcctatgatttttgtttagcagagcagggagtgaatactaggtgaggatcactgatggtcatcttggaggtggctagtacaaggagtggaaatactttcatattttgagcacttattctgtaccaggcactgggtacagcagtttttatgtattatttcctttttttttt

SEQ ID NO: 96280 - DNA, 403 bp, Homo sapiens
atttaggtccttaatcgacctggagttgatttttgtatacggtgagacataatgattcagtttcattcttctgcatatgatagtccaattttcccagcacccataattgaaaaattacatgccctgtaatctcaacactttgggaggccaaagtgggaggatcacctgaagccaagagtttgcaaccagcctgagcaacagtgatacactgtctttaaaaataaaaataaaaaattaggctaataaaaaattagcctaagccaggctcacatgtttttaagcattttttttagcaataaataatttttaaattaaagtatatacagtttttagccataatgccattgcacacttagtagactacagtatattgtaaacataactttatatgcactgcgaaact

SEQ ID NO: 96281 - DNA, 704 bp, Homo sapiens
attagagttagtaggataggttagcaaagttgctaaagttaaactgagcaaaaataatatggtagccccctgccttcatcattgggtggtacattccaagatttatcctggttgtcatgtgtggcagggattccttcttctttctggctgaataatatttctttgtataccacattttctttattcattcatctgttactggatatcccttcaattggcaatgtacatgcacaactccagagaagaaacatgcacaagagaggatttgagaggcctgtggagtttctgtctgggctgattggtgggggttttctcctgtaaaagactagttcatgaagaccaggaaaggtggttttttttactaatatgcatgtaacaatatagagacttaagggaaatgaagaaacaggtaaattatggcccaaaggaacagatacatctccaaaaactaacactaataaagagatatataatttacctaaattatatataaataaaatagcatctttatggcagataaattaaaatatcttccataaagatgctcaacaaggtcaacaggataccaaggtcagcataaataaactgaggattttaacagaaattctatgaaaatttaccaaacagaattttggatctgaagaatgcaataactgaattgaaacattcactagaagatttcagcagcagactagattaggtta

SEQ ID NO: 96282 - DNA, 987 bp, Homo sapiens
tttttttagacagggtctcgctctcattctgttgccctggatggaatgtagttatgcaatctcagcccactacaacctccacctcctgggttcaagcgatcctcctgcttcagccagccaagtagctgggaccacaggcgtgtgccaccacactcagctaattttgtaattatttgtagagatggggtttcactatgttgcccaggttggtcttgaactgctggctcaagccatcctcccgccttggcctcccaaagtgctgggattacaggcatgagccaccacacccagcctcttgagaatttcccacgccttttaaaataactgaagtactctgtagtatcattaactgggtatgataatcgttgtacaaagggttttccaaataccttatgagctttgtagttatagcatcagatcctacgatcttgttttccctgtagtatcaagggaaaattagagtttaaaagatccatttctggtcatagtgagagtgagaaaaataaccaaaccttacccacatctccttcatctaacaggttttgtttctaggaggacaattgcaaatagccactttactactccccttcctctagtttagtttccctccatttcatctttctcattgttaacatagtaagctctatttttaaaatatttttttaaatagagatgagggcctcactgtgttgcccaggctggtctcaaactcctgggcttaagtgatcgtcctgccttggcatccctgggtgctggggttacagttgtgagccactgagccaagcctaaaaaatctttgacattgcaccatagttaggcaagatgtttgcattggaggaggttaagtgaaatgtgcagaggacctccctgtgcatttctttgcaacttcctatgaatctataattattttaaaataaaaaggattttaaaaatcagataatattttgcctttgcttcagaatttccattctccattatctatggcac

SEQ ID NO: 96283 - DNA, 840 bp, Homo sapiens
taaagacagagtctcactctgtcacccaggctggcatgcagtggcacgatcttagctcactgcaacctccgactcctgggttcaagccattcttgtgcctcagtctcctgagtagctcggattacaggcattcaccaccccacctggctaatttttgtatttttagtagagacgggctttaccatgttggccaggctggtctcaaactcctgacctgaggtgatccgccccactccgcctcccaaagagctgggattatagggcatgagccactggacctggccaggggaaaataaatttttaaaaaggtcaacttagaccaataaaaaacaggtttttactaaggatctaagtttttaaattattttaaatagttcgatttacagaaaaagaagctatcaatggagaaaagtgacttgtgactcattacctacagcaacctttctatgatttccactggacccctgcactacatgacaagtatacaaattaaggatgatgtaaattagggatgtatttttttctaaattaatatactcatggtcaatgaactaatcataacatgtaagttttgataacatcaaatactatatcctttctgtacataaacttttaaaaatttagttctgtaatatcaatttttcattagaaaaataattttttaaattttaagtgagatttctgatttatttaataatagagttccacaaaagtaaacttactgtgaaacacagattattaaaaagaaaatgtagtagccatatatcccagagtagaaggctaatggaaacagaatcaaatgaccatgtgttatagcataatttctcagataatgattcc

SEQ ID NO: 96284 - DNA, 837 bp, Homo sapiens
cacgttgtcagcaggggctggcttcagactgaggctgaacacatacaggagcccagaccaggtggccttggcccttgtaggcgatggtgagaatactgatttgtattaagaggaatgaaagatttggagaggaagcaattctgattttcaccatcaaatgacaagaactgatcttctgcctttaagtagttataattaggtcattgcaaaattaacaaaattaataagcttatatctgggagacctcttaagacagcagtgtccagctgggtaatggcacggattatgcccacacagcctggccactctgttgggggagcagcccccgctggagcagcctagggagaggatgcaggccttccccatcagctcagcagcttatggctcagtgggtttagatgctggtagtaagctcctcaccctcttgcccaatgtctacaaagggttgttttgttcatgatgtccagaggtctagttgctcatgacaggtggataagtccagtgactccactggggcctgaggcagaattgttgcggcacctcctcgtttctcccgttccctcccctatcccaggcaggtcctggctaaagacgtccttggccagctgggtgtcaggggtaggatcttgcccctcaactcctggccacagggggactttctccttatctacagcccaggccaatagtctctttctctgtccttaagggatttagggaatagccggtcctctctcaccctcgaatggatcacatgttattgatctcatgtgtcaccacccagggtaggtttctgtggcctgcatccaactccaggcaggcgctgctcctcgtctccca

SEQ ID NO: 96285 - DNA, 269 bp, Homo sapiens
cagatataatttttacatatccaggagacatcttaaaattaacttgccctagtattcaagactatgcgtgttggtgtaaggatagagatatacagatgaatggaacagggtaagtgtccagaagtagactcacctgtgtgtggccagttgatgtttgataaaagtgccaaggtcattcagtggagaaaagatagccatttcaataaatggtacttgaaccattgaatatctgcctgcataggaaaaaaatctcaactgttacatgacac

SEQ ID NO: 96286 - DNA, 668 bp, Homo sapiens
aagttacagccaacaacttcctgaaggaatgaatgttggataagaagataagacagcaagagtcaagaatgactccaaggtttctggcctgagcaactggaaagctgccaagaactgagatgaggaaggctatgtggacagagtaggtatgagagagcaggtttgggagggaaaagcaagaattccattttggacatgttgagtgtgagatgtttaagagccattcaacataggcaactggatataaaaataaggagttacggagagagatctgggctgaaaaaattcatttgagagaaaaatattcaaagccagattcccaagtgcctgatcatacctcccagtctcaggaagatatttgcttaccccttagaccaagaatcttaagatcttccccagctatgaagcctatcttggaatgggaaaccatgaaatttgtcttttaaaagaaagggaagaaatagccttacagcccctgttcctccaagtgcacatttagccttaaaatcctgggagtcgggagacaccgtggagtccttacatccacagtgtctgctggtcgtggtcagaaggcagtaatgcaagagtccttttgtgaagagtgtttctatgtagagatgtttatatttaagtagttcttttataaataaaagcatttctaatggcaa

SEQ ID NO: 96287 - DNA, 386 bp, Homo sapiens
gaaaccctctgaaattcagcatctatttttcttaacaattaataattattattcctttttatacaatcactcctttttatacaaatcttaagattttaaaaattttaaaacttaagcctactacttaaaagaagtgttaattgtgagtacatacatatatgtgagacgttttattttggaaatgagaaattcaatttcaaatattcaacaaatactaataaaaagaaaacaactgagtaaatcttattttagttataattgtgaaccaaccggtagttacaatggtctttaaatattgaaacatactattttcaggaaatttacaaaggaaaacaggcttttgaaaaccatattgattgtagacctttacttattatgaaagacaa

SEQ ID NO: 96288 - DNA, 259 bp, Homo sapiens
cctgactttcccgacctcacgccactcggagattttctaatctgtggctttgccacaaagctccctcctgcctcttccctgacccggtttcccccgtggtccctgggcccacctgcgctagagcacgccacagctaccctgacatccagggctccttctctgaatgcactcactcacagttggtagaaaaagcctctggcactttctcttctctgttttctttcagcacatcacacactccctgatggtggaggcttta

SEQ ID NO: 96289 - DNA, 346 bp, Homo sapiens
ccgtattgattttccaggggttctttgtatacagtaatttgcaggagttgtttgttacaaactttataaatatcttctcctagtctctcttaactctgtgctatgatactatttaataacctgggggttttgtgttagtttattatatattgaacatgttccatgtctttaaatatttatttgtttttactacataattttaatggtaataagctggtatttgagaaattgtttcacaaacaaacattaatactgccccctccagcctcatctctcatttccccatctgtgctccagccatccccaggtctcagttgtcttatttgtctgagaacctcagcctggg

SEQ ID NO: 96290 - DNA, 669 bp, Homo sapiens
attagagcttaagcaatgaacaactgtggatagtgttttagatcatacaggagatcccataaaatagatctggagaagaggattgtgtggaaaactgtacctaatgcattctccgggcagttattgaacttttttatagtatgcagaaaaatacagcagaagagagaggaaaaaaattaatgaccctgctgttggaaataaaaataagatccagaccagtgacattctgacatcttaaaaacctgtcagtgatatttttagctgctttaggatccttacaataaggcccatgagtaataggattgtgagggtttttttctttatacataattttacagatattctttaatgggtgtgtattacatttagaatcattattaaagagttatttttaatccatgggagttttgacacagcacatgagaatttctaattatagactcatagaaatacatacctcttaaaaccctatcttcttgttttacagatcaataaattaagtttcagagaagttaagtgattgccatagaacacaatgctagtgactgaattttgttaactaacatgctttcatttgcattgttggttttctcagtaacaaaattacaagcaatactgctttatttcagaagtgaaagaaaatctattggaagtgtggagcaagagaaa

SEQ ID NO: 96291 - DNA, 264 bp, Homo sapiens
attcagcagccttttatttttaccattcccaggtcttgtaggtgacaggtacaggtctttccatcataaatataagcaggcattttctctgggatcttaggcagggacatcttggggtacttcacttaaggattttctgaaggaaaaaggtttaaccaactggaacccatgagtacttccttgagctcctgacctgtctgggcaggacccccgtgttctactccaacttcatcgatcattcagcaggttatccatgatagttgt

SEQ ID NO: 96292 - DNA, 879 bp, Homo sapiens
  misc_feature (5)..(5): n is a, c, g, or t
cgtangctgcagctggcttctcttaaacttctttcttcgcacaaagcaggccctcaataaatgcaatccttagtaaacttttgttttattctgctacttttgggaagaaagaagaaaaaaaaaaggaagaaaggaagcaagggagggtaagaagcatgaaagaaagctagctaactgcattactataaaatggcgacagatatttttaaaaacatattttaaagattttattttataaaagtaataaaaaatgtaaattgtctagtaaaaaacttaacaaaaaaacaaaccacaagacacatgtaaaaacaaggaactaaaggaacgtaagagaagggctaagtagataattaatacaccatgtttcatgtagggagatttaatattgtaaagatgtcaatctctcaaaattgatttacaaactcgatgtaactccagtcaaactccaataggttttcttcataaaacttgacaagccgactttcaaatgtatgcagaaatgcaaaacagcagaaacaaagtaaaacactaaaagaaaaggagaaataatttggccttcacataatagaacttactataaagttacagtaattcagaatgtgtttcttgtgtatagatagataaactgaccaacggagcaaaacaaagacccataaacaactatataagtatcaattatacatatatagatggcatgtcagattaatgggaaaagaagagtctattcgatgaagaaaaacattggttatcatatgcaaacaaaatcacgtaacatccttgtttcaaaccaccccaaaacattagttcctgaatagttaagaacttaaatatcaaaatcaaaattcaaaacttttaatagaacataatatattaatcttt

SEQ ID NO: 96293 - DNA, 359 bp, Homo sapiens
gggaaatatcacatctgatggagtcgcctgggagctggttgctgtgccgtgtgtgcggtgacaaggtgggaggtgagacgcatgggctagaatcccacccacgctcctggaggccatgtgagcaggggcctccctcatcggctccatttcctcaactgatcagtgagaacagtggctccccggaaaggtagaagcaggagaaagcctcagcctcgaatcccgagatgagctggagagccgctgagagcagccgggctcccctgcatgcctgcggttcttctctgctggtcactggggactggagcaggctaggcagggcaagagcagagcctctgggagcaaatgcacaacatcacagg

SEQ ID NO: 96294 - DNA, 532 bp, Homo sapiens
atcctacgtgaggtggctgacactggtgagagctgaatttcagggcaggctgcgatgggtatgcctaagggtttctgacatcctttccgttagggaggaggcagcctcgtttttgcagcccgagtcgtgggagctgcccgtgtccatggtcatgagaatatgaacttcgagaacatctgacctgctgccacctggccagtgtcctgcctttgaggagtccaggatttacaagcctgctgttctcaaccttgtttggcactaacacacccgagaccatcagtaacggtgggtctgcaaggcacagatcttcaccagggatccttggggagaaaccaagcaaactatttcctgacactagacaggcgtatccctccctttgagaaaattcactttctaaaaccataaacaacagctggttgactcttttgttaaaaattttccttttttttcctttgtgtacacatttaattttattgtaacagacaactcgtgcacttttaatgtttaaaactgagcatcatctttcctttcc

SEQ ID NO: 96295 - DNA, 654 bp, Homo sapiens
agcggaggatcaagagtcaggcaggggcagcagcccacgttcagctggaattctgtggcttaacccaggggttttctatgtgtcatgagagataacacaacactctcaccaacgaagttgaataaattatatttaggactcacaagctgatcatgattcttggctatgcaaacctgaggctgatgcatcctccagcagctgaccacggacatgtgcagcatcacagtgacagatggcatttcaaccacttggtttacaccttcctccactgtcaccaccattctgacagaaatgagttccatttgctccattttacataagggcaaaaggcagcattgactcaccaagtttacacagttagggaaaagagcaaccaggtcaggatcagatacaacaaagaagtgattgcagatgttaaatggaacatagctctggtcgtttgataaatattcagtaatttcttcagtttgttaagaaaaattatccaaaatttacaattacagaggaagcaaaattttacctgtaccctatttttttttattctggggctaagaattaaattgacttaagacagacataagacagatcaacagcagaagaacaaatttacttaatacaagttttacatggcaggagagactacataaggaaatg

SEQ ID NO: 96296 - DNA, 484 bp, Homo sapiens
ttggtagagatggagcctcaccacgttgccacgtcgcccaggctgatctcaaacgcctggcttcaagtgttccttccaccttgatttcccaaggtactgggattatacccatgagccacagtgcttggcctgaatgtagctcttaatccatctggatttacccctgtgtgttctggcagagattggcaaactgctttatcaaaccaattagtatacaactaatctacattttccaacccctcttgaagttaggtttgggtcatgtgacttaggaattgcttaatccttaagtggaatgtggatgaaaactatctgagccatttccaggtgtggcccataaaatctcatatctcccactcattttttatgtcttagatggatgcctacctttttaagatgaaggagtaattatcacaattatcagcctaaataacgccatttggacttaagtgatcatcaaataaacatccgttttgttaaacca

SEQ ID NO: 96297 - DNA, 336 bp, Homo sapiens
cttgttgcccaggctggagtacaatggcacgatctcggctcactgcaacctccgcctcctctgttcaagcaattctcctgcctcagcctcccgagtagctgcgattacaggcacccaccaccatgccccactaatttttttgtatttttagtagagacggggtttcaccatgttggccaggctggtctcgaactcttgacctcgggtgatctacctgcctcagtctcccaaagtgctgagattacaggcatgagccatggcaccccgccccacaggtagatatttacataaaactcagcatccagaccctaaggtcgagcccaccctcaagtcttt

SEQ ID NO: 96298 - DNA, 347 bp, Homo sapiens
ccaactcaagatcctctgatgatcaattttataaaaataaacaagaagttcaaaggataaatttgagagatagccaagtattctctccagcttcattggttgtactactgaaaacagagcacctctattcttacattaaagaacttcaggccgggcacagtggctcacacctgtaatcccagcactttgggaggccaaggtgggtggatcatctgaggtcaggtgttcaagaccagcctggccaacacggtgaaacgctgtctctactaaaaatgcaaaaattagcctggtgcacatctgtaatcccagctacttgggaggctgaggcagcagaatcgcttgaaccc

SEQ ID NO: 96299 - DNA, 253 bp, Homo sapiens
ctctgtaccccagcgccactatgcctcatacggttgttgtgaagattaaatgaaaaaatggttacaaagcacttagtatggcttgtgttttacagcctcatgttaaaatgagaaaaggtgattagctgagatgttagacacggactgtcccccctattaagatgccttctgctgattaagtccctccctcattcctcccaagctcagggcaggggctttgcaggaagaggttaatccagcaagtgtggtttgc

SEQ ID NO: 96300 - DNA, 527 bp, Homo sapiens
cttgcttttttttttgtgatagtgcagaaggtcctgagtgccttgtggttctttagagtcatggtcataatcatccataatcattgattattgattaatggtgtctgaagctgattctattttgacttaaggagacccttttatggacaaaatatcacttaataccttattaactttaactgtttccttcaaaatcaggagtcccagcaactgatgactagataaaccaaatgtagtatatattcatacaatgggatattatttggccacagaaaggaatgaagtgctgatgcatgctacaacacggtgaatctagcaaactacgctatgtcaaagaagccagtcacaaaagattacatattacatgattccatttatgtgaaatgtccataacaggcaaaactatatagagggaaagtagattagtggttgcctagggctagagaccctgtgaggattggagtggttgatagctgaagggttcaaggtttctcactgaagcgatgaaaatgttctaaaattggtgg

SEQ ID NO: 96301 - DNA, 1536 bp, Homo sapiens
ctccggccgtggcggtcgcagcgccggcagctcgggcctcagcccctgcctctgtggtgactccgccgcgcttcgacgtcgcccctgtccccgtcccgtcgcgggaagatctacgatggagatctgaaaggacagcgagagagcatgtccaaaggcactgaaggagcaggaagcaacaggagttgttaaaggagggaagaacgacagaagatggtggaaagcggagcaggagagaacgatgaaagtgcgcaagacagaacgagaggggagagcgagactgggaaaagagcgctgacactgaacacgaactgggcgcaagaggcaccacgtgaaaacgacgcaacacaacgtgcactgaacacacacagactaaatgcagcgagagaaccaagcctcgcacaccaacatatcgagggggcaccggacacgatacagcaggggaacactaacgtcacggacgcagtaacaccggcggagacaaacaaacacacagcaccagtgcacagctgacacaaagcgacaaactagcaggacacagacagtactcacattgaagaagcccaataacatgggtacacaccagagacacggcatacacatacagattaacaagtcagacagggggagatatctggagggcaagtggagacacaccggaacacgcacacccgaaataaacagaaagacatccaacagagcaggaccacggagcaggcaaatgtccaacggagggcgtcgctcgacgaccagaggacaaccagacagacgcctccaacgaatgagccggcggcagcagaaacgcaggagtacaggaaacgaaagcaaaagtggaacaagggcgtgtcggcagagaccaacagcaaaggaggtccccccgctcatgagtcagcacacaacacagtaggacatgacatccacgcgtgagcaacaccacacatacggcacaaacaggccatcacagccggggtcgcacacaggcagcagccggccaacagaaacaaagtgagcagcacatcgcatcatccgacacagccgggctaacaaccgaaccgcgaagcaccagcatcccacgcccagagagggagcatggactacacgcacaaaggagcgcacgcacacaccaacaagcgaaggaccaactagacaaccagcaccacgggtgccacacccaccaccacgtgggagaccacaagaccccagaaagcgctggaaaaccgagcgagaccaacagacgcacagcaaggacacaaacaaggcagcacaacaccagagcagcaggaaacgccagaagaccacagaacaacagcggagccacacacacgaccacaagagtacgacactcaccaacaacggccacacaacgactaaccaccgaacgtcacgcgcgcacaccacccggacgcagagacacactcaaatacacaccaagccgcacagaccacacgagaggcacacgacggaacaggccaggccacacagacacagcacaacaccaccacagctaacgcgaacacacacaccacgagcagccacaca

SEQ ID NO: 96302 - DNA, 730 bp, Homo sapiens
gcccagggatgcccgctagagactcagcgccctgggtgtttactgggggcaggtcctgtcagcgccctctgccaggcaggtacctaaatccccgactcccagcagcagagcgggtgctcacgtcaaccacgttcttcctacaaatggcctaggtgcagggaccgacctgaccactagagaaagtgtcactgtggcaagggaacttcaccagccaagggccaaccttgccagccggtggcctcaggcctgctggttactctcttttgcaaaggggtcttggttcttgtgagtgggaccattgggtcaaagggcagggaggtttctgtggttctcattcggtcctgcttctgccctccagacagatggatcagctgccaggggggccccagccatcccagcacagtaagcggtcaaggtgcacttggggcagccagcagggcagaggggaggggagcttgacccaggctctgatgggcagagggaacccgtgcagggtgtgggggcagtatgcaggcaggcgcggaggggagagccaagcagccaggcctgccaggcagagttggggtgactggagaagggccgtgtctgcctgtggccagaggccacccaggacctggacagatgcacccaccattgtccctgcagtgaggctgtggaagggcttggtgtggtgggatgaggccagaccctggaaactggaggttaagggagctgtaggggggcaggtgtg

SEQ ID NO: 96303 - DNA, 894 bp, Homo sapiens
cggatcgcgtgggtagaaggtcacaccgcagcggtcagtttccctttgtttagattcaatctgggcttcccagctcccccgcgcttctgtacccgggatctgagagtcaacacagaccttgaaatccccgcaccgctccctccaccccgtgtaaattcaggcgtctccgtgagagtccggcgctcgcttccctgtgtgttaaaatcgctcggcacgggtcctgtccccgctcgttctgccttgggccagacacaggagtgttgccatgttgtccaaactggtctcgaaattctggagtcaagcagtctgcctgcctcgttctccaaacgtgctgggattacaggcatgagccacttacgcctgggccaagtatttcggtatttatcaaaatcttacagttagttacacagttatgtcgtaggccatcacattcggtcaccacacactcactgactcatccagagcaatttctagtcctgcaagcgccattcatggattgacttataaacagtcatgctatgtgatgaagaagcccagaagaggaaagcaaaggagtcagggatggctcttcctcagggacgcttgacattcatggacgtggccatcgaattctctcaggaggagtggaaatccctggaccctggacagagggctttatacagggacgtgatgttggagaactacaggaacctggtctttctgggaatctgtcttcctgacctaagtattatttccatgttgaagcaaaggagagagcccttgattctgcaaagtcaagttaaaatagtaaaaaatacagatggaagggaatgtgtcagaagcgtgaacacagggaggagctgtgtattgggaagcaatgcagaaaacaagcctattaaaaatcaacttggatta

SEQ ID NO: 96304 - DNA, 402 bp, Homo sapiens
gaaaccttgttgactcagaaatgaaaagctctattatgctctctggatttgaaatgcgtcctttcttcagatgtaccgcccccttcataatacatcattgggtggcaccggataaccagttctctgttttctcccctgtgcttacaagtcagtagttcttggaagagatctcagtgtctacatattgcatattccctaagcattcagaaggagccagtctgtgggtgaacttgtgagatattattcttgatccatttgcgatatcccctctcttacctaaacacagggtttgggttttggaaatgccccagcacatcttgtttctttctttttattaacaggaatctgtcttcctgacctaagtattatttccatgttgaagcaaaggagagagcccttgat

SEQ ID NO: 96305 - DNA, 853 bp, Homo sapiens
aaccttgggaaggacgaaatgaggcccgcaaactgtgtctggggacctgtggggtggtcttcatgaaacgcccgccatggaaggctttcagctccaagaaaggcaccggcactcacacttggggggctgatgattgccactgtccaggaggctaaaggaagaaaggcaaccaccatctcttatgaacaggacatacatttccaagacaatgggtccagaccagaagtgcaggctgtgcccccagaacacatggaagttgcatacaaacgcagaattagaccacatttaaaacgcggtggaacttggctgatttgctccctcttggccgtccatttgaagtgtgcagtgaggaccccaagtcctgatctcatcattcaagagatgttaaaatgcctgcggtgaatctgactttaatttaccacgactgctaaaacagaggctttggaaacgaaagcagtagcaagtctcccatgtgaggccagagctctcgaggggcatttagcagcagcagattttacgtgtatgaatccaaaaaaattaatgtgtcttaaatatttctagcaaccttccaggttcccagttcatggctcagcaggagaaaggcaaggggctcgttcattcattcattcactataaaaggattaaaatagacctcggtttttctggcttcaacccttgcctcctttttcctttttcttttttcacccctgccccaccccctacttttttttgttacctccccttccgtgaaccctgactaacagacaacccacatgcttataaaaacagctcttgaaagaacagttctgacagttactggaatgagattgctccagtgctcccaagcaggagg

SEQ ID NO: 96306 - DNA, 536 bp, Homo sapiens
ggtctaaactgaagcgcactcgactcagctgctgcagactgtggccatgaaggaggatgggcctaacgttggctggtattctaatattttcacaagacatgtaaagcttttttaaaaaaatacatgtggccgttaaatcgatcaatttttaaattttggtaacattcaggtttttaaaaaacagtctgtttagctgtcaaaaagaaaaaaacatgagttcatctagaaacctccaactccagtccagtctaactctccttgtttcttctttctcctgtagtgaaaaaccttgctcttgttgtctacaatatgtttacttatctgttccatcctagtatacaagtaaaattgtatttgcataactttagtatatttcctctaaatatttagtacttacaaagaggaaatattggagccgtaagtaatatttagagccataagtctaggcctggtgtggtagctcgtgccagtaatcccaacacttccggaggctgaggcaagaggatcacttgaaatgggagttcgagaccagcctg

SEQ ID NO: 96307 - DNA, 712 bp, Homo sapiens
  misc_feature (453)..(453): n is a, c, g, or t
gaatggctctgtgtgccttatggatgtggccaagcgtgaaatcatctgtgcctttgcccctccgggagcctttcctctggaggtcccctggaagccagtgtttgctgtgtctccagaccatccatgtttcctgctccgaggagactattcacatgaaactgcgtccaccgacgatgctggaatccaatattctgttttctattttaattttgaggcctgcccactcctggaaaatatctcaaaaaattgtaccattcctcaaagggacttggataacatggccttcccccaagcactgccactggagaagagatgtgagcgtttcctccagaagagctatcggaagctggagaagaacccagagaaggaggaggagcactgggcccggcttcagaggtactccttgtcgctccagagcgagaacttcaagaagtgaggctgccaccgccctgngatctctgaaaaggaggtttcagccacgaggcagctgctcccaggacactgaggccaagagaaatgtaacagagccacagctccacaggcctgcactctgagtctggggcctctgcagagccagcaaggggaaaagtataatctgggggaccttcaaccactaagcctcttgtcagagccctcaagcaggcagatgtgtcacccaataaacagtgatattgtctccagaaaaaaaaaaatcaggcctgttggccttaga

SEQ ID NO: 96308 - DNA, 296 bp, Homo sapiens
tccacacattctatcttaggccaagttagtcttggtctagttgttttaggtcattgcatttagccagagtgtgagtgagcactgtagtcacctaatcgacagttttgggtagaagttcctaacatgatggttgcccacatcaccttaccccctttgaatcaatgactgtattctcagctttttccaaataggaattctgagatttggctttaattggccttgcccacttgtgttctggtaattagcaattgtaaacttaagttatattggttaaagaaacccattgcaggccaggc

SEQ ID NO: 96309 - DNA, 198 bp, Homo sapiens
tgctctctcatcttagagttccaaatggagaattgatcccttctagccccttagattttcactggggaccctgccacttggctcagagtctcctctgcatctcaactctgcagggaaggcatgtcaatatccgtctggtcagcccacccaatgccctctgagttctttgacctcctccgcgccagtgacctctactct

SEQ ID NO: 96310 - DNA, 311 bp, Homo sapiens
aatacatgacctgatgtgtttgtcaaaacctgtagagctttacaacataaagaacaaaccttcatgtatgcaaattaaaaacatcatttaggaggtcaggggattgagtctagaaaagaaatggccatttctaggactggggaagaaaatatgcaatatgaacctgagcagcctagcaacttgtagtgtcaaaaacaaagaagtgctcaaatttttttttttaaaaaaatgacaaacacattgatgtatgttaaaagaatgcaagagtcaactgaaagaactcttagtagccaaagctggaacaatttgag

SEQ ID NO: 96311 - DNA, 452 bp, Homo sapiens
acaaacaaactggttgccactcacttcacgacccaccgatgaatctcacttgaaagttcttgaaaaacaccaccgtgacttatctacgctaggaaggagaggaacgatctgcctaagatcacatagccaggccaagcagaaactcaagtccaaagccaaagggaaactcagtgagaggtggggggtcggggggagtgtcccactccaggcaagtgagactcagctgtagcaacccaatcacctgacacattcatctcgtggtgtttacatcatctgatcccgccagccttggcaaagtgaagggtcacgcggcccctccccctaaaaaaggagagagcctcagaggctcagggaggctaagtgacttgcctaggtacagggtttcccgggaacatccctgccgatgtgcaggggcaagagcacaagaacgaaagaggagcccaccttcctca

SEQ ID NO: 96312 - DNA, 115 bp, Homo sapiens
acggcggcggctccgcacgatccccaggcagctgtccgcccccgggcggggctggccgcacgccgcaatcctaccggctgctgcggctccagcgggggcggcgggtggcttccag

SEQ ID NO: 96313 - DNA, 399 bp, Homo sapiens
cgtgtatgtccccaagtctatatgttgaagccctgacccccaatgtgatggtatttggagaaggctcctttggtaggtaattagatttatgtaattaggtttagatgaggtcacaagtgtggggtccccatgatgagattagtgaccttataaaaagagaccggagtatcctataacactgtagttaaatatgaacagaattaacaataatacatagatttaaatagctagaatgaagatattgaatggtctcaacccaaagaaatgatcaatgtttgagatgatgggtatgccaattaccctgatctgatcactgtccatcatgtgtattgcaacatcactatgtaccccataaacatgtacaattattatgtgtcaattttttaaaactaaaaagtt

SEQ ID NO: 96314 - DNA, 381 bp, Homo sapiens
gcggtggttcttttccccacgtgttcagtcactgtcttccctagcagggaaacctttcacatgcacctttctcacggtgcttcagggcagtctttcctgcgatttgacatccctatacaagcctcaagagactgcatgcagggctaggcttttagctatgtccattcctttaaatctgcccctccttggactcccctattccctgagacacaacattattgaaattaggccagttactagccctacagtggcctctaagtgttcaagtgaaaggaagagtcacacatctctcactttccatcaaaagctagaaatgcttaagcttaatgaggagggtatgtcaaaagctgagacaggctgaaagctaagcctcttgcacca

SEQ ID NO: 96315 - DNA, 432 bp, Homo sapiens
gcctcataaaaaatataaaatttcccttttccttgccgatttcttttaaacatctgtgtaaatatgtagtttagttcaactttgtatactactctgttacttatttcatttacttaaagatacttatttcatttacttaaagatacacatggctgggcgcggtggctcacgcctgtaatcccagcactttgggaggctgaggcgggcggatcacgaggtcaggagatcgagaccatcctggctaacacggtgaaaccctgtctctactaaaaatacaaaaaaattagctgggcgtggtggtgggcgcctgtagtcccagctactcgggaggctgaggcgggagaatggtgtgaacctgggaggcagagcttgcagtgagctgagatggcgccactgcactccagcctgggcgacagagcaagactccgtctc

SEQ ID NO: 96316 - DNA, 554 bp, Homo sapiens
tcaggcatttatggcataaactcaaatgttctcttctttcgatttcctggaatggtgaacatggagtgtcttaacttgtgtattgagcatggtttaggagtctgttgtcaattttacagtcttttgacctctatatatttggcatgctgagcttcttgccattgatctaaagtaccaggcccattcatacacattgtatactttccacaccttgctgagaattctcttccctttccttttcatctgaaaaattcccactcagttttcaagtaccaattcacatgtctccagcagtgtgaagctttacacttccttttggccggataagttgctcattctgtcctccttgctcacatggcactttgtcagcttctctaaattgtactagccaaacactgtcataatccatttacacataagtctctcccaaaaggtcaatttctgagggtcagggaccatttccagctgtatttctcctccttccctggctcattccctatttctcctcacttccgcttctccaagattgtatcccaataaaatgttagctcata

SEQ ID NO: 96317 - DNA, 768 bp, Homo sapiens
ggtggaaagctaaggcctttgaagacctgggaccccgtagtttcgggagagggtgaggggtgaatggtgctgaggtgcgaggagagggaaggacagtaaagagcaggtgggcaggagggtctccgactccagagacctgagcttttggggcgcgggtgggagcgcgggggaaccctcaagacggctttcttttggcgactgagggtttttctgccacaggaagctgggccgggctgctgtgcctgggaggagggaaggaggaatgagaaagcggtgacggtccctgccccccctcgccaggtgactgtcccacccatttagttgaatgtagcggccagagaggcactcgcggcagcccgtacgggtgggacctctcggtgtccttcgggaaacaggaggagcaagttcgactccagcgagggaaaacggagcctcaccagaagtctttcatctcggtggtccaactcaggatctcagcctcattattttcttacccttctggagtgcatatgtgcctttacagtttctgtttgcaaacgctgtctagcatactaagaggatgttagcaaacctgttccatggacactaaatggcagttgtacatctcccctcatcagtcatagtgacaaccagaaatgccctccatattttccagtgatcccagtcttcaatgcgtctgtctcataatttgtaaacgttattatctggaagtcattgttaatctgtggtggaaagtaatggctaactagacaatctgggcagaacacg

SEQ ID NO: 96318 - DNA, 266 bp, Homo sapiens
ttgacctcatatgtgtgcatgttacgcagttaagaatgatacaagaggaaatagcattaacagccagattttatagtataaaacaataggactcataggatttttaagaaggaattgatcagtaggggctgaagtagtaagggaagatgtcatggaaaaaatgagattcgatttgaccttgtataaaatttggatgtgtggtagggataaaggagaacccaggtggaaaacagaaatgtttttagggaactgtgagcatggcattt

SEQ ID NO: 96319 - DNA, 725 bp, Homo sapiens
caaaaaacctactgatagcatcattagtatattaaagatgacagactgaacactttctcccaaagactgggaacaaggcaagaatgtctctccctactgtgattcaacatatcattggaacttctagacagagcggtaagtcaagaaaggcaacaaaagtcatacagattggaaaggaagaaataaaactgtccctattttcaataacacaattatctacaatgaaaatcccaaggaatctataaataatgattaccagaaaaaaatgaatgaattcagcaaaatagcaggatttgtgatcagcacacacacacagaatcaacgcatttctgtataagaacagcaaaaatttagaaatcaaaatttaaaacacataccatttataattgtttcaaagaaaattagattcttctgcataaatctaacaaaacatgtacagaatctgtatactgaaaacatatgggatttgtatatgtaaacatgcagatgaaagaaagaaaagatgatataaccaaatggaaagacataccatgttcgtggatcggaaaactcaatatggtaaagatgtcatttctccccgagttgatctttaggcttaatgcagttcctatcagaatccaagcaaggagttttgtctttgattttgtctctctagacatacataagcttattacaagatgtatccagaaaggcaaacgacctagaatagcttaaaacaatttaaa

SEQ ID NO: 96320 - DNA, 205 bp, Homo sapiens
gacagacctcctaatggatcagctgtgtgtgcaagaggagaggagtcggggcagcacccaggtgtagctgcagcaaagagatgaggcagccttgggggggcccacacaagtggcaggtagcacaggcctcagtagctcactgtagactgagctgtgaggtgaccatgggacagccaggtacaggagatgtggaaggagcacgggc

SEQ ID NO: 96321 - DNA, 213 bp, Homo sapiens
ctggacttttgttctattccaatgacttgttattctcttcatgtgccaattctataatgttttaattagtcaagctttgtctatgttgtaatttctggcatggcttgttcttctctgctttatcaaaattctcttggctattgtttaaaaactaagctgaaattaacataaaatagacatgtgcaggtttgttataaaattaacaaatgaaaa

SEQ ID NO: 96322 - DNA, 317 bp, Homo sapiens
ggaaaaggccttgaaggcatttcatagctccacttcacagcactaattttgtgtacaatcataaagaaagaggtgtaattggctcacggttctgcaggctgtaaaggaagcatagtggcttctgcttccgggaggactcaggaagcctcccaatcataccagaaggccaaggggcaaggaaatgcttcatgtggcagcagtagaagcaagactgagagaggaaagaggagcccgccctgttatacaaccagatctcatgagaactcagtatcacaaggtcagcatcaagaagatggtgcttaaccactggtgaagga

SEQ ID NO: 96323 - DNA, 774 bp, Homo sapiens
tgcagttccttatttggtagcttttgacaggactagcctttcttgcaactaagcatcttgacatacattattcattaagccctggagctcgggagagaaagatgcagacccttagatctttagatattcctttatcacgtggattttctttattcagaatagttgctgaattttgtgccattctggagtcttacaaatggcatgtattcgatgggaagacggctggatgggatttaatgcgaggctttcttatgtatacttaattaccaaaaatctttaaaaactcatactctgcgtggcttgtggaggttgttaaagtgtcgagattttgaagctaaatacattttagagctgtctatatatatacatatatatatatatatacatataatcaatcaaaaatgcctgaagcaaactatttactgtcagtgtcttggggctacataaagtttaaacacggatgcttaatcgggagctcacccatctctctgaacatgagtcggtctggaaatcaagtgtcacgagtttatatcaaacacattcttagatacagcaacatgacgctggcacaacttccttcctccaactcagcaaggcaccacggacgacaccacgcccaacgaccaactgtcctcacgaatcagggggagtccaacaaacttcgcatgccacagactctcactctgacctacataccacgtcatcccaaggtcgggcagtcaaccacctcgacaccacgacagatgtcctcggcccggaaccaacacgacgcga

SEQ ID NO: 96324 - DNA, 931 bp, Homo sapiens
ttcatagatgaggaacccgagcatgaggagagtcagcaagccgtggagctaactcagatcttgaccgctgctttggaggaaagttgtgaaatatcctgctgggctagaggaattgtaggctggagtctacatagagtaagagaagaaggccaatcaccgacctggaattcctagcacccctttgacccggccttcaggaagccatgcagcaagttgtgtccctgactcctggagaaagaaacagccgcataatgtggatttgctgtgctgcggtccatgccttccttggccttctctggcctgacaagaatgggagaagcatcaggacgctgtagaatgctggaaggtctgagacacggacctggatggacacatttgtccaaaacctgaattccttcttaccaccccagtacacagtcagatcctccctcagggcggttgtagctgcagcccactccaggcctgttcagttggtgcttctggttccttccattcccaggccatcatgacatgggagtgggaggtgccctttgcagatagccaactgccgattccatgttttttcttcactgtcctgttttgtccccagttctcagaggcctgtttttcttatgtagctttttaactcaagtctgcattttactaaaagactatgaaacctacttataattttattttaccccatcactttttatgattcaataggaataatcctattttgttccctcttttcagaggcctatatttcttacatacatttttaactcaagtctgaattttactaagagactatgaagtccacttataattttattttatcccatcactttttataactcaataggaattatccttttaaaggaaccccagggattctctgacacctgtcactagagtagagataaaacatgtttaatggctatgggaccag

SEQ ID NO: 96325 - DNA, 453 bp, Homo sapiens
ctcaaggatactaagaaaaaggagaaagatgaagggaaaagtagattaagaaagaggaaaaataaatgtttgaatgcaaagtgtaatagaaatacatttgcaactagaatttgaggtttaaattataacattaaattggttgtcatgatggtatataacagcgtcttttgaaaacatttattttttattgttgttatattgtcacctcagctgagaaagtcttggaattggaaatgggctctgaaatacatttggtgttcaaaatgtatttccatcattggtagctacgattctggttaacctctctgcttcttgattttctcatctaaagttggggccactactatgtctactgcaaaagtctttgggagggttaattgggtaatgcagataaagggcttagaactgtgcttgacaccatatttgccttccttaagtgtaactattattata

SEQ ID NO: 96326 - DNA, 475 bp, Homo sapiens
tagaaagaatgtaccccaacataataaaataaatatatggcaaacccatcgccaaaatcatactgaataaagaaaagttgaaatgtcatcctctaaaatctggagcaagacaagaatggccactttcatcacttttattcaaaatagtactggaagtcctagccagagcaattaggcaagagaatgaaataaagagcatacagcctggataggaggatgccaaatggtctctgcttgcagatgacatgatcttgtatatagaaaaccctaaaaggaccaagaaaaaactcttataactgataaaggaattcagtaaaggcacatgatacaaaatcgacatacaaaaatcagtagcattcctacacatcagcaacaaattagtaaaggaagaaattgagaagtcaatcacatgtaaaatagccaccaaaaaaaagaataaatttaaccaaagaggtgaaagatctctaccaaaaaa

SEQ ID NO: 96327 - DNA, 854 bp, Homo sapiens
gataattaataatattaaataatttagtaagaataaataaaaagtggccgcatcacggttatttaatatagttatggagttccaattaaagttctaagtggatccctatatggtttattacaaaggagatcacataatagcagctaaataaaatgcaggtcagatcttctattctttcatttaaaaaaacaatgtttattagaatagttggcaagatggccgaataggaacagctctggtctgcagctcccagtgagatcaatgcagaaagcagatgatttcttcatttccaactgtggtacctggctcttctcactgagactggttagacagtaggtgcagccaacagaggacgagtcaaagcagggtggggtgttgcctcacctgggaagtgcaaggggtcagggaattccctcccctagccagagaaagccatgaagactgtgccgtgaggaatggtgcattctggcccagatactaggcttttctcatggtgttcgcaacccgcagaccaggagattccctccggtgcctacaccaccagggccctgggtttcaagcacaaaactgggtggccgtttgggcagacacagagctagatgaaggagttttttttcataccccactggcacctggaagcaagacagaaccctttattcctttggaaagggtgctgaagccagggagccaaagtggtctagctcagcggatcccacgccgacagatcccagcaagctaagatccactgcattgaaattgtcgctgtcagcacaggagtctgaagtcgacctggaatactggagtttggttgggggagggacgtctgccattactgaggcctgagtaggtggttt

SEQ ID NO: 96328 - DNA, 490 bp, Homo sapiens
catgacatttcacccctaaatacttcaacatgtatctcttaagtacaagaatattctaagtaatcaaatcaatttaatattgaataccatgttatctaatgtataaaccatattctaattttcccaactgtccaaaaaatgctctttatagcttttatctgctaatctaagatccagccaagatcactacttagtttagtttaaagggaagagacatggagaaatctttagccttgtgtaggagggtacgccctgaacactaacgctttttcatttggaaaaggtgcacgtctagagataagttacatcactcaggacaggacagaggttcttccctaagatccctttcttgtctcaataaactgtgctttacagggacagaagataggaacaggaagaaaatactccatcaaaaactcagcacctccaggctaactagtcttttatggctggctggacctctaaaacatggtatcatgtagtcacagtg

SEQ ID NO: 96329 - DNA, 175 bp, Homo sapiens
tgctggtattacaggcatgagccaccacgcccggccatgactgtcattgtgtgttgaggttgtcattgcacagaactggtgattttcatgggactgtgtgttaccctgacgctggtgaccattcaggcgtatgttggatgcttccacctctgcaggcggctgcctgtgctggtaa

SEQ ID NO: 96330 - DNA, 176 bp, Homo sapiens
acaatccctagcactaggtttttattttaaaaactatttaccaattcaatatataattttttaaagtttcatctcaattttatttccttgaggtgatactttcatatgattattagccaattcagccattcttattacttcctcaaactgatccctactcaccattactaccagtt

SEQ ID NO: 96331 - DNA, 265 bp, Homo sapiens
tgagattgcgtcactgtacttcagcctgggcaacaggcggagactccatctcaaaaaaaaacaaaacaaaaaaccagcacattggtctctggtaagccgggtagagatttttcaagaaggaaaaaatggctaacagtgtacaatttaaagtgattaagtgaaataatgatacaaaagctactgctggactttgctattgagacaaccttaacaagatacatatttatgtagtgattagggtagaagccaaattccaatagaagag

SEQ ID NO: 96332 - DNA, 428 bp, Homo sapiens
attcctagttctaggtaagtcgtttggctttctgtaaaggggtaggaacctttttattccttaaaggtatgactatctatttgccaattaattccatgttccaaggatcccctcatggagaaaatgttgcactgagttaaataaggaaataactggacgaatacttgagattattcccttcataagaataattactaattgtgaattgatggtttgaataccatgctaaaatgattgaacctcttttctcttgtgaagtgattgtgaagttacttgtacctttatgtttttaaaatttgatgataatagcaataaaagctttagtgcttttatgatctctttatttggtttgtagttatggcacatcagaaactcgcatcaaaatagaatcaagattattgtaaaagggacctcaaacgtagatttct

SEQ ID NO: 96333 - DNA, 491 bp, Homo sapiens
attcggcacagggcacaatgtgagaaatgcatgagccaattggaaattatttaaagaaccatggatcattagccccaaggtgtgtctagtccagaatttcccagttagccgtcactgcatccactataccagaacctccaggggaccttataaatgcatatttccaggcctcatctgctgagtcagaatctctggggtgaggccagagacttgctttatcccccatattttacaaggctgttgtgagtttcccgcataaggagaagatctggggtttggcttgagtttttgagtcaagagactgcacctggtagccttctctccatcaacccaaaagatgcagggagctgcagccaggtccctgagcaaatgggagaaatgggatgtaagacccatccttaaatactcgaagaaactgcccttcgaaagtggatttggcttctgcatgtccctggggcagaatgaggaccagtgggtgcaatttgtgaaag

SEQ ID NO: 96334 - DNA, 659 bp, Homo sapiens
gcagaacataaagcagaaatcccactgttgaaataataaatagaatctcattgaagataacttataaaataacactcttacaaacaatatagatgtatctcctctaaatagactatttatctgtgtgtgtgtgtgtgtgtgtgtgtgtgtgtgtagaatgtacaagaacatacgtatgtgtacacagtacaaatcaaaataaactgtatttggggcagtagaagtgttctcctcctttgtattaaaaaattttaaacatgcctcaactgccaaataacattttctaatttgtgatatatacctatttatctcatcttcatcaaaactgaaacccccaacataaaacttttgttaaaaaacaacagggccaggcgtggtggctcatgcctgtaatcccagcactttgggaggccgaggcaggcagatcacctgaggtcaggagttcgagaccagcctgaccaacatggcaaaactccatctctactaaaaatacaaaaattagccaggtgtggtggcgtgcatctctaattccagctactcgggaggctgaggcaggagaatcacttgaacccaggaggcagaggttgcagtgagctgagatcatgccactgcactccagcctgggagacagagcaagactcggtctcaaaacattagaa

SEQ ID NO: 96335 - DNA, 468 bp, Homo sapiens
gctcagaagtggacgtgctgggcatgtggaggcgctggccgtggtcgtcgtacgtcagagactgtgactgggagacaccatccctagatacaccctaaaggagaaacttgcagtaccaatttgtttattacaaataatctcacaaattcaagaaaattggagagatcagcctgtattagtaaaaataattacaagaaatctttaaagatgcaacataagctggttttgaaccaagttatctgcaggtaggaggattgctatacttttttttaagtgacacagtgatacacagatatgtaaattgttggctgccataagtttttaaagagtgaaattacttctaaaaaggcacattttgaataaataccagaatcataaagtattcattttttaaattatcctttttttcaagtctgcaatatcaagtttcacaccctggccatcatgaccacactgaaaacactcacc

SEQ ID NO: 96336 - DNA, 450 bp, Homo sapiens
catctaatttcctttcccatagtgccatattcactaagccactctctgattttaatatggtttcccctgtagacttttgtataaagaatagaaagagaatgctggattcctctaaacaattatatttcttgcaatttaacacataaacccaagtaccagtctattgcactggattacagaaaggctagaaattcccacctgaaatttaaaattaggatcactgtttcagttaacatgattttgatgtggtccaagattagaggtagagaaggatgagctgaatattcttagaaattccatccagtttatcaatttgcattaaaatggctgaaaccaaatgtctcacaggaccagcaaaggaagcagggactcccatttttgccagactccgccttgccttattttttgtttgtttgttgtttgagatagagtctccctctgtcacccagg

SEQ ID NO: 96337 - DNA, 569 bp, Homo sapiens
ctctttcaagacaagtaataatatctgccaaagaatggggaaaaaagatgcagaaaaagaatacaattagcatactaccaagaaagcaaaaagcgaagggagaggagaaactaaaaaattacatgcggactcacacttatttctaaagctgtgctaatatctttttgcttgcgtctaaggcaccaattttaaactgttactgggggaaaaaaaaagagagagagacagagagaaagaaaaaagcaggcctaaatcttaaagtaaaacttttagcatagaagataagaattggtgagaattccattcccggttatttaccctataggctaaagagctgcctctgcctctaaggatcagggcattctgtgtttgatggcagaacctaagtcagaatccagcacaatccctgacaagtgagaacctcagggtaagttgtcctgaccttgagattgcttctctacctcttcaattaaaaaatatatataagggccgggcacggtggctcatgtctgtaatcccagcactttggaagactgaggcgtgtggataacctgaggtcaggagttcga

SEQ ID NO: 96338 - DNA, 328 bp, Homo sapiens
gggaattacctaccaaaaagaacatgagacatcgacatctcacataggaacatgataggtaactctcagcctacaacagcctggactttccaagcacaggacagagtcatgactaagaccatcagatacatagaaatggcaatgaagtctccttgttcatccagagacccagagggctctgcacgagataggcatcaatgcagccaaaaaccggccctcctgcaggctgggcaccctggccctcccagcattcctgctccccatgacctgactaggaattagctcctaggattttgctctcctgcatgaacacccacgtggtttcgac

SEQ ID NO: 96339 - DNA, 162 bp, Homo sapiens
atccgcccacctcggcctcccaaagtgctgggattacaggcatgagccactgcgcccggccttgtaaattctatattatttctaaattttatattttggcttttttttcattgagttggggtctcgcgctgttgcccaggttggtgtacagtggtgcgatca

SEQ ID NO: 96340 - DNA, 985 bp, Homo sapiens
ggcgcgcgcggaatcagttgagtctcttcggttcccggctctttctcctgcggtgggtatttgtccggctgctgggcgacctttcccgcgaaggaggttgtgccttcattcggtcgcgccccgggctggggaggcacctccctggtgcgcaggaaccgcaggggcgggtaggagcctggctctgcctgagctccggagggagcagagctggcaccgcgcaagggcccctgcctcccgggagactgggatttctggcctcctcacctcgggaccgctgactgtggagtgtcaaagacggaacagggtttagtgatcttgtccaaccccctccccgcttttcacagactggggaaatggacgcctggagaacggaaatccagttatcaaaattgactccagaagagagaacctaacagaacaataacaatggaagaaattgggaatattatcaaaaagctatcattctgttaaactccaggcttggatggtgttacaggtttaaaaaaaaaaaaaggaaaaagtccttcatgaaaaaagaagaacttaagcaacatgatggattcagaagctcatggaaagagaccaccaatactaacatcttcgaaacaagatatgtcacctcatattacagatttagtgaaactgaagcattacttgtgtggctgctgtgcagccttcaacaacgtcgcaatcacatttcccattcagaaggtcctctttccacaacagctgtatggcatcaaaacgggggatgcaatacttcagttgagaacggatggatttcgaaacttgtatcggggaatctttccccgattgatgcagaagacaactacacttgcacttacgttgggcctggtatgaggatttatcctaccttctccacaagcatgtcagtgctccagagtttgcaacctgtggcgtggcagcagtgcttgcagggacaacggaagcaattttcacttcagacattgcttcaagaccacaa

SEQ ID NO: 96341 - DNA, 693 bp, Homo sapiens
ggcgcgcgcggaatcagttgagtctcttcggttcccggctctttctcctgcgactggggaaatggacgcctggagaacggaaatccagttatcaaaattgactccagaagagagaacctaacagaacaataacaatggaagaaattgggaatattatcaaaaagctatcattctgttaaactccaggcttggatggtgttacaggtttaaaaaaaaaaaaaggaaaaagtccttcatgaaaaaagaagaacttaagcaacatgatggattcagaagctcatggaaagagaccaccaatactaacatcttcgaaacaagatatgtcacctcatattacagatttagtgaaactgaagcattacttgtgtggctgctgtgcagccttcaacaacgtcgcaatcacatttcccattcagaaggtcctctttccacaacagctgtatggcatcaaaacgggggatgcaatacttcagttgagaacggatggatttcgaaacttgtatcggggaatctttccccgattgatgcagaagacaactacacttgcacttacgttgggcctggtatgaggatttatcctaccttctccacaagcatgtcagtgctccagagtttgcaacctgtggcgtggcagcagtgcttgcagggacaacggaagcaattttcacttcagacattgcttcaagaccacaa

SEQ ID NO: 96342 - DNA, 916 bp, Homo sapiens
ggcaattggtacaggtctggagatttatggatttcaggtcgctgcccctgggcttggtgtgagtgcacctccctggtgcgcaggaaccgcaggggcgggtaggagcctggctctgcctgagctccggagggagcagagctggcaccgcgcaagggcccctgcctcccgggagactgggatttctggcctcctcacctcgggaccgctgactgtggagtgtcaaagacggaacagggtttagtgatcttgtccaaccccctccccgcttttcacagactggggaaatggacgcctggagaacggaaatccagttatcaaaattgactccagaagagagaacctaacagaacaataacaatggaagaaattgggaatattatcaaaaagctatcattctgttaaactccaggcttggatggtgttacaggtttaaaaaaaaaaaaaggaaaaagtccttcatgaaaaaagaagaacttaagcaacatgatggattcagaagctcatggaaagagaccaccaatactaacatcttcgaaacaagatatgtcacctcatattacagatttagtgaaactgaagcattacttgtgtggctgctgtgcagccttcaacaacgtcgcaatcacatttcccattcagaaggtcctctttccacaacagctgtatggcatcaaaacgggggatgcaatacttcagttgagaacggatggatttcgaaacttgtatcggggaatctttccccgattgatgcagaagacaactacacttgcacttacgttgggcctggtatgaggatttatcctaccttctccacaagcatgtcagtgctccagagtttgcaacctgtggcgtggcagcagtgcttgcagggacaacggaagcaattttcacttcagacattgcttcaagaccacaa

SEQ ID NO: 96343 - DNA, 401 bp, Homo sapiens
tcccccgacccagatccccaagtagggtaaccctgctctgccaagtaaaagtacccgggactttggggcaaaaagcacccgggttgtggtcctagctctgccagttactacgtaagctttaaaaagccacttaatgtctctaggtctcagtttcctcatccataaatggggccatgtacaagtttaaagagcatggctacagacacatactcaagaaattgatcacagagtccatgcagcaaggcagacagaacagagctgaatgaaaggctgtatcctggtggttaagcaggagggctctggagccagatcacctgggctggagtccaggttttactaggtgaccctgggcaagcaacttaacttgtctgagctctagtttcctcatctataaaatgggg

SEQ ID NO: 96344 - DNA, 459 bp, Homo sapiens
tcgcactctgactcgtggaaatagactgcctggaaatagactgccagatctgtcatttcctaattgtgtgacctaggacaggttacttatttctctcaacttcagctgccttgtttataaaatgaagataacagtacctagagagttaattaattaatgtaaagagcttacaacactgccaggtacacccaagtaccttaaaccaaaagttaaaacatgcttgaatttaaattccagctccacctctgagtaattgtattatcttgctattatttttataagcttgccaagtgtcaaatatgatcaagactggctgcaggttcagattctaccaattgttatttaatccatcctactcaaccactgttgaggtccaattatcttcgtttcacagatgaggaaactgaggcagagagagctgaagatttgaaggctttttcccatatacttcccctgagg

SEQ ID NO: 96345 - DNA, 446 bp, Homo sapiens
accgaaatgttctctctgtggaagtcataaatggtttcctttctggggaaaccagagtatagtatggccaattaagaaagaaaagggactaactattgagactgtgtgtgatatgctgttactttgtacacatcaaattgtttattccacataatgatcttgtgaagtagggacttactaaagtccaggttatttaccttcccttcaactttacagctagcaaataacagaactccattttaaactgaagactcatcccaaagccatgccccactcaatataccatacttaccatactgctagtaagattaaatggctcaaagtgcataaatatactttttgatgtaagaaattatttctgttttggaatcatggggcatgaagtttctaccaaagcaaaaaggttgcataagtgtttattgacagcaaatattctaatttctttc

SEQ ID NO: 96346 - DNA, 686 bp, Homo sapiens
atttacagtctgtcagattggattgtctgaggttttccgctattgaaggagaggcaaacgaagtatatagcccattcttgtaacttctatctcttccctacaacgtttgggattttggactcagaattctccttccaggcttccagtgttcagtttttgaatcagtatggcttcaactataacaagtttctcaaaaacggaatcccatatatgaatgaagaacaggagaagaaaattagacacgatatcctgactgggaactggagagttcgcagctctccggataaagaccaaatcaaggtggtgattgacgaagtgacgcggtggctggagctggccaaggaaggcgactggatgactcttcctgggatcactggcttccaggcctttgaggtccaactggtgctgaggcaggccctccccaacatctggacggtgctgaaagatgaggggcccttagtgggacataatatgatgatggacctgctgcacctccatgagaagttcttcagacccctcccagaaagctacgatcaatttaagcagaatatccacagcctatttcctgttctcattgataccaagagtgtaacaaaggatatctggaaggagatgaatttcccgagggtgtcgaatctttcggaagtctatgaagtcctgaacaggtgaggacggcgattcctgga

SEQ ID NO: 96347 - DNA, 1483 bp, Homo sapiens
  misc_feature (1465)..(1465): n is a, c, g, or t
  misc_feature (1475)..(1475): n is a, c, g, or t
agttcctcttggaaaagatatagcaaccattggggaatgaccttttcatttcagaagtggatgaggaaggtggtgtgagcatcaggtatattctggaccatttcaagtgctggtgagaagaaaggaactctttgcctgaactgggcttggttttccaagtgctgctttggaaatgaagacccagagatgcagagcttatggtagttcataaatcttcatgttctattatctttcatctgccaataaagttcattttcaataatgtccaccattgctgtgcccagaataaccacaggcaaacaccaaaacaatacgcataagttagacaagattaaatcttgtctgatatctgcacaaacagatatgcaccatgttggaaacatgtgttttcctagtcccatccaggcttcccacaagaaagccatgatgtgggtctaaaccatatgttttgagtaaaggagaatagaagaaggggagtgtccgcaaaatggaaagagatgaagatgttccaaggaagtatgctgaaacagaacagtgaatgttttgcccaaaactacaaaaataaaagaaaaaaagaaaattgcaatacatggctactaagtctttgatcataagtcgaatttatagacctggaatttgccatcctagtctttcctttttagtaagacttctgtcctctggcagtgcatatggtaggtctctaatgtttcttcatctccaggaagatgcagatccttatttttgctgggaaatccttctaaatagaaatgtaacatttttataaaaacagattaatgtgtttttcacttagtaaatgttttcaagagctgaattgagaaggaaagagactggagtggttaatggtgatttgatttctggcattctgagttttctgctacaattagctgcattacttggtgccaaagagcagtggggaattgttgagttgctgtatcctttaaaaaaaaacaaaaaacttgttattttgaaagaacttaaggctcacaagatgttacaaaaatagtagagtggccttaccctagatccagttttccccatttataacatttcacttagtccattttcggaaccagaaaattaacattggcataatgctattaactaaactacagaccttttttcaatttcgccagtttttccacacatattcatttagttgctggatacttttaattcttgctgatttgtaaactggccttgcttggatacaacaggaaagatactatctggataaagttctacagttttagagagactattaacacattaatgtgttcctttgtcatgagcaataccctgcctacactgcttctaaattttctgatttgtttggctgtttggcatctgaaacaatccaagacaaacttagaaagattaggcaacacaaaacacagtaagacctgttccatagcttggttgccctaggaaaacccggttgccgggntattcctagnatggcttc

SEQ ID NO: 96348 - DNA, 144 bp, Homo sapiens
tgctgggattacaggtacaaattgctacacccggcctgtatacttttaaattctttagtgtagggcctctgtcttgagtgcttatcagcttttcgctggtgaagtgggttggccaggataaaaagtatcatcaagatgccattt

SEQ ID NO: 96349 - DNA, 220 bp, Homo sapiens
cattaactgtgtgagctccaactccagtcaaaaccatatactgtgtgagctccgcctcctgtccaagcattactgtgtgagctccgcctcctgtccaagcattactgtgtgagctccgcctcccgtcagagcattaccgtgtgagctccgcctcccgtcagagcattaccgtgtgagctccgcctcccgtcacagcattaccgtgtgagctccgcctccc

SEQ ID NO: 96350 - DNA, 766 bp, Homo sapiens
aagtgcttttctggttttgcttttgtttgtggtggttggcattgctgtggtttaatttttcttttaaaaagcagcttccctctctgcctcaggaactcgcaggcctctgaagcatcgcctgcaaagattgaaggctctccctcagctgggtgggagtccggactgaaagcctggaggaaccctttgcaagctgtactcccttataagacacatacttttcacctggtgactctcttttcctgatttcgaagcatttcttcaggacctacatatgcccgagaggcaagcagtcacctctgcgttgtcaaccaccccacaattagagcacgtggtcactgacccaaggaaggaatgagaattcactaggtgctctgcttccattcccaccccgtttatctcgatgacggatttcaccaatcccacagagcacgttttacaaatgagacagccgtggctcatagcgtctgtattcgaatttgcctctttctgaacaaatcaataaaacacgctctttcccaccacccgacgatctggcttctggaggtgagcgccagttccctgccaagcttcccgttcctcggctttggctcacgagaaggttacattcttccgtcccgtcccactgagctggaaacttacaactcgaggagacagcacctctgttccagaagcgggcttagaccaagaacgcctcccctcatcccacctgctaactccaccatctgctgccgccaggaagcccgagccgctcggcacgaagaggaga

SEQ ID NO: 96351 - DNA, 698 bp, Homo sapiens
ttaatcgtaggagctgtaagagtttgttgaactctttgtgctctcggcaaaattctgttgtctctgtaccttatggagagggaaaatggcacagtcaatgcagacagccccagcttcaagttctggctccgcttcttactgtgtgagcttggcaaactctctgcttgctccgtgcctcactttcctcccctgtgaagagggaactgctgaaggatttcaggagctaatgtattggagagtaattggcatgcagtaagcacacaatatatggggctactattagtagtagtatctcatttaatcgttccaacaatcctgtgaaataggcaccttcattcccattttacagatgagaagttggaggattagaacaatgaggagtggttggctgggtaactttgggtgagtcacttcccctttctgggcttcttttctcatcagttgttgatcatacagccttagaaccagaaggcctcttgaagaagaggctaatccaaactctctcatttgacagatggataaactgaggcccagaaaagggggaaatcttggctagggccactggttagattgggcagagccagggcatgaactctgcatccaggctccagctaaagcccttttctaccagccatcagcccagagacatgccctcccaacgtaaaagccagcactgttgcctcttcccctccaaaccg

SEQ ID NO: 96352 - DNA, 318 bp, Homo sapiens
tggctctctctcttgcttcctctctcaccatgtgatgcacctttttccccttcaccttttgccatgattttaagcttcctgaggccctcaccagagcagatcatggctccattcttcttgtagtctgtagaattattagccaaaataaacctattttccttataagttacccaggctcaggtattcctttacagcaatgcaaaatgaaataatacatatccaaatgaaataaattgttttaccaataagacacatgcacttgtgtgtttatcgcagcactgttcacaatagcagagatatggaatcaacctaggtgcc

SEQ ID NO: 96353 - DNA, 705 bp, Homo sapiens
agcgggggaacgcggggcgcgaggccgcctgacaggaacgcggggcgcgaggccgcctgactgacaggaacgcggggcgcgaggccgcctgactgacaggaacgcggggcgcgaggccgcctgactgacaggaacgcggggcgcgaggccgcctgactgacaggaacgcggggcgcgaggccgcctgacaggaactcggggcgcgaggccgcctgacaggagcgcggggcggcgccctcccggcctccctcagcccggcgccctggccagcgggtgccgctcgcagacgggggagcccagagcccacgcgccaaggccgccaggcctttcctccctcgcgttccctcaggcgcgtcctccacccgtttcccccaggcagggggaagccccgagaagccgccgcgccgggctgagatcgggccccaggctctccgcggagccgtctccaacccctgcaggccgacctgggcagccaggcggggagcgcgcagccacagcccgcgtttccgggctccgtgtccttctggaggccgctccttggccatgggccctcggtcctcgccctgagcagcgcgccggggtataagggacgccctcagaggcctccaccccagactccaccgcgctctgccaaccgggacaaggtgttttgctgaataaataaattaatacataataaaggctgcgtccaaccagatgaggaca

SEQ ID NO: 96354 - DNA, 708 bp, Homo sapiens
acagtctactctttccccactgaactgtgtgtcttcatggggagtttgactttgcttctctctctggtgccttctggagcctggaggctctcaacttccatttcaactgcctgacctgggccagccatatctccatgacccatctcccacctggacccattgctagggtgggcggatcccagaggccaggctgttggatttctgcatgactggcctttttctctttgcagtttaattgtcgggacatcagactaacagtgacaataacacatctctgcaaaatataggccacagagcgctggtggaggtagaggtgggggcaggtgtatgtgtcttgttggagggtttcaaaaatggaagacatttccctaaagtttgatcgtcaatgaccttgtcttctagtgatcttcctttaagtttcttgtgtgcatatctgatttctccaactaaactaattaatttatttgataacgcatactacttggttagcattgtgataaatttttaaaggtatttactttttatgtttaattctagcaacaaatccctgatttgttggtagaatcggtacagttaacatccccattttaagatgagtaaactgaggcctgtgggtgggaaaggccgacttcaaaatgaggcagaacgcttcaccactatattgcttcttgcattaaaccttttcctgctctgagtgagcggggtgga

SEQ ID NO: 96355 - DNA, 380 bp, Homo sapiens
actagtcgagtttacaaataaaatattcagattagttaatattctaataacagtagtaatggatttttccatgttaatcattttttccactttatggcattgtgagtctgtctttgttgttgttcccatagtgaaatatctctttactttgtgtaagtgatctttacatatttgcaaagaaaattccctccttttaagtttaatgtaaattgcctgcccatcaaatcagcattgttcaatagtttttaaggtgctctctctgtcctttgataacaaagggaattcagttctggacaaaaactcaagataatgagcttggcaacataaagcatcttccttttatgaaatccactcacaaaataatgtggtatgaaatttaa

SEQ ID NO: 96356 - DNA, 564 bp, Homo sapiens
tggagctcctgctcaccgcttcctccacgcgtgttgtcagctctcgtgggagcaagggcttcccttgcccatgtgtccctttatttttatatgcacagcgtgtggctcctgctctgtgtgcacctgtgggccgtgttttcttgtctcttcacccgtctcatggctccttgttgtctctgggctttgtggcagatccctccgagggactgcagattctgtttgggtttttgttctggtggtcagttaccctggctggattcagactccagctctgtctgcctcccttgtgagagcagcagccgacatctctgagcagctgtgtccagcctttcggcatctgttgtgctcagtggagacttccctgcagggtggagctcaggccttccagggatcagcgtcactgggacccaagttttcagactcggcctgctgtggcccctccttccctaggtctcatccctggctgggcagcagcacaggtggcccaaacttcatcctctggcttcctgagccagcagcactgtgccctgtgctgtgcctgtgccctgctcacgggggcagtgc

SEQ ID NO: 96357 - DNA, 282 bp, Homo sapiens
tcctcattcagatcagataccataacactttcttatcagaccttaatgaatagaaatgcaatttcttataacttaaattctgaaagaattacgtgacatgagacagaagaaggaaaaatgtattgaacaaaaaaagcctgatacatcctcataaagttattggtcaatattccaaaaaatagagaaataatcattaatatatgccttttttttctggatataaatagacttcacttcaggctgtcatcttcactgtgttctttttttttttttttgagatgg

SEQ ID NO: 96358 - DNA, 245 bp, Homo sapiens
aatgcggtattttctcttggattacaagccccaggatgcaaaggcagagagaagcccctcccccttccctgtagctgagccactgcttccgccaggcctagaagcaggcagaatccccaagctcagctgagtccagaacaagagcttctgcctttgatttttttttttttttttaatcgggtctcactcaggctcaggctggagtgcagtggtgagataacggctcactgcagccttgacctccc

SEQ ID NO: 96359 - DNA, 381 bp, Homo sapiens
agatcaatgcatgcgtgaggggccccttcccagcaggctctggtggctacaaactggttcacgtgtggaagatcataccactttacctttggtttttctttgaaaagcaaacaatgaaagacagctgaaaacaagaattctaccagtgggcaggcaagaattctcgttgggaaaagggatgtttgtggctgttccccacattgggcttgaaagagcttggctgcagtgtggttattattaaaatgtccacagaatagaagatgctcatgaggctgcagtggaaagggaatgcttgtacactgttggccagagtgtaaatcagttcatggaaaaattaatgtagaaaaccgtttggagatttctgaaacaatttaaaacaga

SEQ ID NO: 96360 - DNA, 510 bp, Homo sapiens
ccaggggagtcagagacacaggagagaaccagggcagagtggcattctggaagtcaagagaattcaacagggtaacaggactcaatgccacagaggataagtgaggattttttaaatgtccactgaatttgacaagtaggaggtcactgatgacactgcagaagtggcgtcgttagaatgtggggacagatgccagattatagtgggtaatgggaggaggaaatgcaggccttgagaaagaatatgtttttaagaactttggcactcgaggggaggattgttctgtgacagcagccagcagggaagcaggacccagagagaacgggtggttttttttctcctactacctcttatatttctaacaatatcctaatttttcaggtctttgaaaaacaccttacagatactttttaaagttttcatttgctagtgataaataaaatgtgcttgtatgtgtaatttgtatagaagattttcttatacttactctatgtccagctgacataaaag

SEQ ID NO: 96361 - DNA, 335 bp, Homo sapiens
cttctcctaatagaagcttttggctgaaacaagaaacgtttttgaaagaagcatattgtcattatccttttgtgaaattttaatagccagatttgtattcttattcatatgtaacaaaaaccttgctagcacagtggtgataacagaggtacctgcaagtaaaactgagggttttttttttgaagtaaaagaaagaaaaagcagctttgaagcaggtacttacacaaatactaccttgatttaccacatatctgtaatggatggcctgggagtagtgactgcagcctgaaaagtaatttagggcatggggtattaactgatgaccttatccataa

SEQ ID NO: 96362 - DNA, 297 bp, Homo sapiens
tctttttctccttctctcttactgtttgtttatccctatgttgcctttttctaaagaaaggcctctgtctgcattgaataatagaagacattacaatggattagagtgcaagagaagggttatttgtgacgttcattagatgtgatccatgttttatctgtgcaacagaatattaatgaactgtggtacatttagaatcctctctgcagaatctccagccactgcatgcaatgtgtttacctagttgagctgtgtgtttgcttagctgtttttttttttaacccattaactcatctg

SEQ ID NO: 96363 - DNA, 285 bp, Homo sapiens
caaagcctgacttctggctcctcttgggaatcagaagctctgcctccctggcccacacgccatacttttagaagccccactgccccagagccctatttgtccatgaattcctgactcattgtctggagcctgcttgagggaggctgggcagggtgtgagccaccaggattaaaggttgtttgtagcctctgcctccaaatagttacctgcaaaaggggacaagtgaagccacaaagattctactttaaaaaaagaaaaagaagctcattaaagttcccttaggtg

SEQ ID NO: 96364 - DNA, 440 bp, Homo sapiens
ctaatgactatttcagactacaggtcatgtttgaaaggctgtaggaggtttctttctattccctaaagagaggaaagctgaagaactgggatggataggttattactgactgatgtgtacatatttggatcataacttttttggtcaatactaaaaggagttgttaaatagattatctgctggaaagcaactaaaataaattaatagaaattcggctgagtgtggtggcttacgcctgtaatcccaacactttgggaggccaaggcaggcgaatcaccttgattccaaggcaggaggtcaggagttcgagaccagcctggccaacatggcaaaaccccctctctactaaaaatacaaaaattagccgggcatggtggcgggcgcctgtaatcccagctactcaggaggctgaggcaggataattgcttgaacccaggagg

SEQ ID NO: 96365 - DNA, 392 bp, Homo sapiens
agcaccatattacatctcagtagttgttacagattttcaaaagttagagattgtttccagctgtgatgatcaggaagctttgacagagagggtgcagattaattcggtttctcaggatacaaagggttctaataagttgagagaaggaagacaaggttctaatttggaaaggaaagacacaagttggtgtgtaaagacaaagagaagaggagcacatgcattctgaaaaattgaatatactggtatgtctagagcagaagggccatctgaaagtagtttgaaaataaatttgaagagccaatagcttaagagtatagaaggatttgcatgctttctgatggtttagaatctgctcttgaatagactagatttacttgaaagctttttgggga

SEQ ID NO: 96366 - DNA, 240 bp, Homo sapiens
gactgcaggtggagctgtttcaacacacatcatagctctcagggcttcagtaaccaccctaacagggacagaaatcacccacagaacctgatagcagcatcaggccaaaagcatttcataagaagctatgaatgggagaaacagcccagggaatgaaagggactccacccatcaatagctgtcgtcctggaaaggcctccccaggtgcatctctctgccctggttgcactcccacccccc

SEQ ID NO: 96367 - DNA, 103 bp, Homo sapiens
atctgacttcctactctgggtcacggtctggactagattcttctaagatcctttccagagccaagattctacaatttgatgccatctttttttttttttgaaa

SEQ ID NO: 96368 - DNA, 693 bp, Homo sapiens
taaattaatgtattaatgtatattattgactcagccaatgtctaattacccttaaatttttttctgggggagaaaacccatccttcttcttttttttttgaggctttgaattttctatttgtgaatctgtccttttatttgaatataattttttaaattgcatttattttgttttatgatcaagtgaaatttatggaaaaatatactaattaaatcatcctttgttagctttaaatcaaatagattattgtacataataaagtttatagtttatgataaatgtattcttttaaaactatgggatgatccagttcttctctagttgtctggaggacttttgtgtttcaggctattgagtgaatgaattagctaatgaatactttggtttaacttagcaaaggagacacaaaataatctaacatggcactatagcatttattgctaattttagaaggaaaatgattttgatttctgtcatttatatatacaatattttatgaatgggatagtacaaaataatcatttgtaaggtccaggatgtgtttctgttttcagaaaaaaaggaccatttactccatctatttgatggtatacttgttccttacagtaatctcattttttggatctaaacattttctttgacctaccacagtgttgtcagaaaatggttctgcagtggcttatacctgtaag

SEQ ID NO: 96369 - DNA, 639 bp, Homo sapiens
agcgggcatcctcatttaatagagcttgaaattactataatctgtaaagtacagcgagaagaagaagtttcacctgcctgcacatctgtcgttgactctccatctgacttggagggactctgagggaccaacctgagcctgagaagaggcaagattccccttcaaggacacactgggaacttacggacctctttctccatggtgcagagcgcagaggctacctgagaatatccagagactacagaggtcatcaagttgacgcatcaatgtttacatgtgaacaaacagacgcataatagctcttgagcttgccattgggaagtgaaaatcaactgcttgaataaatgtaaggactcaggtagacatcaccttgtgactcaacagcagccaataagatggaaataaaggccatgaagttatcggatggcatctacaaggaatacttagatgaggaggtgactctggtagcaattgttcttttgtctttctcaccttccttcttgtcctgtctgggatgctgaagtgatggctggtatacagatgccctgttgtgatgttgagataaacatgagaataaaagtcagcgattacagatggcagagaagagagagaaagataggatgtaggtggatattgacg

SEQ ID NO: 96370 - DNA, 415 bp, Homo sapiens
cgtgcccagccctacgtttgttttttttaagatatgattaaacaataataaaaaatcatttacagcatcattaaaaacttctgatttaatcaatcaggttttagacctgggtctggagtaaagtgtacgttagatccaatcgtagacaaaataaactgcctagacaaaaaaccagaagtttttactgatgctgggattgcaggtgtgagccaccatgcccagctactttccataattagattctaacttctcatagcaaccttgacaaatcccggtctcaaacattacaaatgacggaaattgagaccatagacgctttgaacgttccttatgtaatactactacctactacttgggaccgtaaacctatattatatccctaaacactcgagagtgtcatccatgaggtaaggcg

SEQ ID NO: 96371 - DNA, 444 bp, Homo sapiens
cgtgcccagccctacgtttgttttttttaagatatgattaaacaataataaaaaatcatttacagcatcattaaaaacttctgatttaatcaatcaggttttagacctgggtctggagtaaagtgtacgttagatccaatcgtagacaaaataaactgcctagacaaaaaaccagaagtcataaattgctctaccagaagtttttttgttttttgtttttgttgttgcttgtttgtttgtttttgagacacagtctcactctgtcgcccaggctggagtgcaatggcgtgatctcggctcgctgcaacctccgcctcccgggttcaaacgattatcctgcctcagactccagagtagctggaattataggtgcctgccaccatgcccagataatttttgtatttttagtagagccagggtttcatcatgttggccagactagcc

SEQ ID NO: 96372 - DNA, 122 bp, Homo sapiens
tacctaaaccaagatccctttgtgttcctctatttctagcctcgtccttgtttccttggactgtcattgtttatggggatacctcctccactcacctgaatcctgcaagcaagtgggcggcc

SEQ ID NO: 96373 - DNA, 357 bp, Homo sapiens
tgtctgtttaccagtgtaccctgagcacatgaacgaggcctggcatctaatgtgtgtgttctgaataaacaactatgttttaaaaacccttaacaaaacagagtaagtggaaacttcctcataccaaatcctgcagcagatgtatatgtaaatgctaaattaattgcatataagatctattaacactaccagtgtctgacataaaaaggcagtgcaggtgacaccaaagggaaagaacaatgtgagggtcaaactgttcccacctgcatctgacacaatcatttacttaaaaacagactcaattagcaactaaaacacaagagtacaaccagactgctgaatttgaaatcatgttac

SEQ ID NO: 96374 - DNA, 1404 bp, Homo sapiens
  misc_feature (1287)..(1287): n is a, c, g, or t
gagccaccacgcccagccactttttgttctttttaagcattttattcactgatgcctcccaagcgcttgccatagtgcctggcacatactaggtgctcagtcagtatttgttgaaggaatgaatgcggtaggggttatttgacctgtttcacaggtggcgatattgacacagagcagttgggtgtcttgcccataggcatgcaccattgttgaaaacagcttttgctcttcacacacagatcttttttttcttttaacagattttttttttacaggtataaaatggaagtcattagacctaagtgatgggattgtagagtgtaatataacacactataaataccccgtgtctggtatacaatgtcaacattcagtaagtgactgtgtttgttgtggttggagcttcttttctgcatgtgccctcattttgggtagggttgccacacagataaggaaacttgaaaatttgtgagccatggaaaccttttaaaaacatgtttaattaatgcagtgtttctatctttgctatactatccatcaagcaatacaagtagtcaaattggtgataggagttcacatctatcctgagcaagtcgacaagtgggttatgactggcaagatttgattaaatgatatttgcattttccctgtttacaatcgtagagcattgcactggaaggggcctcagggaagcatggttcgtttcttttccttatacctccttagcttacaggtgaggaaagtgaggcctggagagatgcagggggcaggcttgatgtggaactctggacttgcatgtcacattctcttagacatcagctcaccctgccaaatccaggtgcctggacgggcttgtatgaacttttgtggtggagccacaattattcctactatgatgttagtagcagattgtatcaataatccaccaagagccaatacatcaaaatcaggactgtttaaacattgttttttacccatcataaaatgttcttagccaggcaccatggcacacccgggaagtcccagccacttgggaggctgaggcaggaggatcgcttgaacctgggagtttgaaatcagcctgggcaacattgtgagactccatctctaaataagtaaatgaatgaatgaatgaatgttcttattcattgtacataataagaaggaatatgaagaaaaaacaagttatcctaaattaagattataaatagtcctaaggattaaaaattattttttcatcagaattttaattatttcactgcaccacgcccagccactttttgttcnttttaagcattttattcactgatgcctcccaagcgcttgccatagtgcctggcacatactaggtgctcagtcagtattgttgaaggaatgaatgcgtaaagcttgggatcctctaga

SEQ ID NO: 96375 - DNA, 593 bp, Homo sapiens
  misc_feature (476)..(476): n is a, c, g, or t
gctcggtacccaagcttttaccgcagcctccaataacaactacagtctggccaagtgtggtggctcacgcctgtaatcccagcaccttgagaggccgaggcgggtagatcacgaggtcagaagttcgagagcagcctggccaacacggtgaaaccccgtccctactaaaaatacaaaaattagctgcgcattgtagcacgtgcctatagtcccagccacttgggaggctgaggcaggaggatcgcttgaacctgggagtttgaaatcagcctgggcaacattgtgagactccatctctaaataagtaaatgaatgaatgaatgaatgttcttattcattgtacataataagaaggaatatgaagaaaaaacaagttatcctaaattaagattataaatagtcctaaggattaaaaattattttttcatcagaattttaattatttcactgcaccacgcccagccactttttgttcnttttaagcattttattcactgatgcctcccaagcgcttgccatagtgcctggcacatactaggtgctcagtcagtattgttgaaggaatgaatgcgtaaagcttgggatcctctaga

SEQ ID NO: 96376 - DNA, 171 bp, Homo sapiens
attgtgttatctgtttctccctatcatctcctctgctactaacagcagacaccttttgtatctcattaattgctgtatccacagaacctggaacagtggtggcacaaagtaagtgctcaggaactatctgttgaatgagtaagtacatactgtggtatatgaagcacatag

SEQ ID NO: 96377 - DNA, 449 bp, Homo sapiens
atttcttagcccagggtccaaccccattccctctttaaaaaagaaagaataggccgggagcagtggctcatgcctgcaatcccagcactttgggaggccaaggcaggtggatcacaaggtcaggagtttgagaccagcgtggccaatatggtgaaaccctgtctctactaaaaatacaaaattagctaggcgtggtggcaggcgcctgaggctgaggcaggagaatcctgctagtctgaattacaataaggaaattaaatgaaggatttatctttaatagagccaggcattgctatcaacataacatgtttggttttcccctttaaatagaaaacaccaagcagggcctttccagacaaggtagtctggaacccaggaggcggaggttgcagtgagccgagatcccaccattgcactccagcctgggtggcagagtgagactccgtctc

SEQ ID NO: 96378 - DNA, 526 bp, Homo sapiens
ttgggtgctgttaaaagaattcaggtttatgtatagacaaaggtatggttgggaattggaatttatgtttaaaagggaaccagagcataaaagtttgaaaactttgaagcctaacaatgtgacacaaaataagaacccacttcctaaggagaaattcaagccagctgcagaaatttgcatgagtaacaagaaacaaatgttagtcaccaaaactgtggggataatgtctctagggtatgtcagaggtcttcacagcagcccctcccaacacaagtctggagacctagaagaaaaaaaatggtttcatggaccaggcccagggccttgctgatttttgcagtcttgggaattggtgccctgcatcccagccatagttaaaaggggccaatatacagctcaggcaatggtttcagaggtacaagccccaaactttggcaatttccacatggcgttgagcctatgggtgcacataagtgaagaattgaggtttgggaacctgcacctagatttctaaaggatgtatgaa

SEQ ID NO: 96379 - DNA, 408 bp, Homo sapiens
actccctttattccttcattccttctttttttcattcagtatttatatgctaggcctttttccaggcgctggggatacagtagtgaacaaaataagcgaagatccttgcctttataaagtgtataatttaggaggggaaaacagataataagtacaggttaagcattcctaatctgaaaatccaaaatgctccaaaatccaaaacttcctgagtgctgatgtgatgtcacaagttactctgaacatgttattttttcactgtgcccggccctcttttccctgttttgaagggaaaactttccacatttcacctttcagtaccacggtggctataggtttttttaattgagttttttgattgatttataactcacatatagtacaatgaacaaatcttaagcatacagt

SEQ ID NO: 96380 - DNA, 455 bp, Homo sapiens
tacccccagaggcctgcagagatttagtactaactccctgagtagctcaatgagccattttccttctggtttcttgctctaaaggaaaccactgcaggcctcggctccctttcccattaaaagccaccggggccatagttttcaattagctctgtcagcccatcaccctgcagccgcccaagttcaatacgtcctcccttcccccagcttctggtctccaccaagcacttcacacctccctattgtaaacctgtccagagcaattaccctgcctgcacttggacagcctcaatactgcacttctgtctaatttatagctgcaaagctccgtcggcaaaggcagacctgcctcggaacagaggaaatgcagagaaaacggtcaggctcttccataaatgcatatgcacagccaatttccttaggttacaggagagcaaattctcccattctcctag

SEQ ID NO: 96381 - DNA, 607 bp, Homo sapiens
gtcacgcccacaaggactgtcacgcccacaaggactgtcacgcccacaaggactgcttgcacggaggtccttctttcctctgtacgccaacccataggcccacctccatgccacactgctaaaatatcacagagaagatgcagtacagtaagtccacacttaacattgtcaatcagttcttggagcctgtgacttaaaacaaaatgacatataccaaaaccagtatttttttttctcaatgttataacaaaactacattgaaagaaatgacgttatttgaggacctggtgtatgttgttttgcttaaagttgtagtttccaagagcctactggaggtcattaagatattacggtatagctaaatacttctgagcatttaataattccatttagctgccatatttccaggacattcaacagccatgagcactggcatgtggacctcacctagtgtaccccttaccctagtgagcagagattccattcttgggaaaaagggcagtctgtctctcagaggcttattcctcccaatcctaaggtccagggaaggaggcagagccatcacaaactcaggactggcagatgtttgagctacagggtgggtact

SEQ ID NO: 96382 - DNA, 750 bp, Homo sapiens
aatttaatgatagattcagggatttgggtctgccatatacgaacaagatcagaacccaaatagatgaaaagcagtttagtatgattagaagaatacagactgtagagacagatggaggtggtttgcatactgagtcctcacttactagctgtgtgaccttgggtaaatagctgaacctctctgagcttcagttttattcatctttgaaatggggataatattcctactttatgggttgtgagaattaaatgaatttaaatgaaatagagaaagcatgtggcatatttcaggacacagagtgaacactgaatacacagcacctctcattaaactcactatgggataggactgacaaaataaataccaaccctgtctctcaattcactcacccaccaaacaaagggaaatggagtgtgctgatgacattgctgagaatttaatctgccaaaatggccaaaaggacagccctttcagggacattaaatcaactacatcattgctgggttttctatcgaaaacagtctctttaaagtttggttttcatgtatctgaataaaccctggcctaaacgggtacttcctatattcaatgaatataggttaaatgaatatctgtatgaatatgggaaatgcaactaattacgtggatatttccaaatttgtttggaaatgcttgaaaacaagcagcagagatctgagaaacaccagctcactgtgggtttttgtctttttctccccgtgcccaccccca

SEQ ID NO: 96383 - DNA, 238 bp, Homo sapiens
ggcgggggcgtggagggcgcggggagggtcgccgcgacgcggagtctctgggatggagggagaggccggccggtcgctcgcgggcttctccccattgaggtgtggagagcgggaccctccccggcggcgcagcccgggcctggggacgccgcgaagtgccggcgcccgccgccttctccacgccggctgtggtcgtcgcgcggcccctcggctggccggggccatgcacccgagcgcc

SEQ ID NO: 96384 - DNA, 625 bp, Homo sapiens
agccgcgatcgtgccaccgcagcgagaccctgtctccaaaaaaagagacagaaaaaggggagggttaaggaatcatttcagactcgaagagaatatggcctctcaaattaaaatgggcagtttccgccgaactttcaaagccgcttggtttggagagggagcaggacggccgtgcttcccaagggtctcccggcgtcgcggcccagcccggcgttacctgcagttcggcccgcagccgcttgttctccgtgtccagcttggcctcgcggcggcccatggacaacaactcctggttcttgctgacgcgaaagatctcgtactccttcctgagccgctcgtactcggccgccgcgtactccagctctggcaccgacgagccagtggacttgaagctggcccccagcagcccgcccgcgcccaccccgcggggcagcgacccgggcccggcccctgctgccgcccccgcgcctcggcggaacgagttgcgcagcaggcgggccttgggcttcacctccaccgggatctcgcaggcctcgccgccgcccgccccgtacgtgtcctcgatcacttccccgcccgcggggctcacgagcgacgaggcggtccccatggcgtccgttgccgc

SEQ ID NO: 96385 - DNA, 388 bp, Homo sapiens
acggaggagcgcggggagggcgaggggaggaggaggcgcccgcctggttccctgcaaagcggccttatttatctgggcacagcctcagcctccccggtgggaggcttggggcggccgatcctctcccaccggggagctcctttccgtgcgtccccatgacgggaggtcgcccggcggacagcgtggcatgagccaggagcccgggccgagagcgtgccaggaagatgtcgagcccgggcatcgacggcgaccccaagcctccatgcttgcctcgaaacggtctggtgaagctgccgggccagcccaacggcctgggtgcggccagcatcaccaagggcacgccagccaccaagaaccgcccctgccagccaccacccccacccaccct

SEQ ID NO: 96386 - DNA, 497 bp, Homo sapiens
acggaggagcgcggggagggcgaggggaggaggaggcgcccgcctggttccctgcaaagcggccttatttatctgggcacagcctcagcctccccggtgggaggcttggggcggccgatcctctcccaccggggagctcctttccgtgcgctgccgagggggcccggccaggacgggacgcggggcgcagggcgcggccgggccctgccggccagtccagcaccccggcggcccccgcgcgccgacgcccatgccgggctccccatgacgggaggtcgcccggcggacagcgtggcatgagccaggagcccgggccgagagcgtgccaggaagatgtcgagcccgggcatcgacggcgaccccaagcctccatgcttgcctcgaaacggtctggtgaagctgccgggccagcccaacggcctgggtgcggccagcatcaccaagggcacgccagccaccaagaaccgcccctgccagccaccacccccacccaccct

SEQ ID NO: 96387 - DNA, 389 bp, Homo sapiens
ggcaagggcagggccagagcaaggtaagggtcagggccaaggctagggtagggacagggcaagaaatatggcaggaccaggggcaatgccaaggccaaggctgagtcagggctgagtcagggcagggcagggcagggcatggtatggccagtgcaggacaggacaagagccggtccacagagagagcagggctgatgccaagaatgagccaggctagtgccaaggctgaggcagtgtcagagcatgtccagggcagggccggggccagggccagaaccgagccagggcacagccaaggcagggtagggcggggaaatagcgtggccgggtcagtactgggacagggcagagcagggcaaggcgatggtaggggcagggcagagacaggc

SEQ ID NO: 96388 - DNA, 810 bp, Homo sapiens
agggatccatggaaagagcattcccagaagcggggccaggcagtgcgcacagtgaggagagcaggtgtgtgtgaggttgaaacaaaacgttcaaagccccctcggaagcccatccacaggtgtgtgactgtgaaccgcatcgtaatctcctagaaagcaagaacatcaggcttacattttccacttgcctctcacggctcagagctctgcagtatatacattgaggaaactgggccctgagacattaacttgcccaaaagatcacagtgggcaacattctagagcacagtggaagccgacagcaatgtcagtgaagatggaaaacagaacgtggagagagatgtagcttactagagccctgtggcttcaatccccaccaggaatgtcgtttaagaggaaggtgatctagcacaaattcacatttgcttgaggaagaatacaaatagaagcagcctcggggagcgggcggggctggggaatccctggcctccctcctttccttctggctgatcttctgcagaagacctcacaaaagggagctgaggggccaggaagcctgtggatgccctgaagaagaatgagtagatctgaaagggcagtagaacagaaccagaatccagtgcaaaggccctggggcaggagttcgcaggagaagcggggagaaggaaccagcctatgatccaggaatgcagtgaacaagatttgggaagttgacagagaatatgaggcctcctctccaaacagaaactccaggacgcttggttgagtcactgacacatgcacagtgctgagcatagtaccagacaccag

SEQ ID NO: 96389 - DNA, 728 bp, Homo sapiens
agggatccatggaaagagcattcccagaagcggggccaggcagtgcgcacagtgaggagagcaggtgtgtgtgaggttgaaacaaaacgttcaaagccccctcggaagcccatccacaggtgtgtgactgtgaaccgcatcgtaatctcctagaaagcaagaacatcaggcttacattttccacttgcctctcacggctcagagctctgcagtatatacacaatgtcagtgaagatggaaaacagaacgtggagagagatgtagcttactagagccctgtggcttcaatccccaccaggaatgtcgtttaagaggaaggtgatctagcacaaattcacatttgcttgaggaagaatacaaatagaagcagcctcggggagcgggcggggctggggaatccctggcctccctcctttccttctggctgatcttctgcagaagacctcacaaaagggagctgaggggccaggaagcctgtggatgccctgaagaagaatgagtagatctgaaagggcagtagaacagaaccagaatccagtgcaaaggccctggggcaggagttcgcaggagaagcggggagaaggaaccagcctatgatccaggaatgcagtgaacaagatttgggaagttgacagagaatatgaggcctcctctccaaacagaaactccaggacgcttggttgagtcactgacacatgcacagtgctgagcatagtaccagacaccag

SEQ ID NO: 96390 - DNA, 996 bp, Homo sapiens
agggatccatggaaagagcattcccagaagcggggccaggcagtgcgcacagtgaggagagcaggtgtgtgtgaggttgaaacaaaacgttcaaagccccctcggaagcccatccacaggtgtgtgactgtgaaccgcatcgtaatctcctagaaagcaagaacatcaggcttacattttccacttgcctctcacggctcagagctctgcagtatatacacaatgtcagtgaagatggaaaacagaacgtggagagagatgtagcttactagagccctgtggcttcaatccccaccaggaatgtcgtttaagaggaaggtgatctagcacaaattcacatttgcttgaggaagaatacaaatgacatatcacacaccaaccgtgtgcaaagcactctacctaaagatcagcgctaacagaggaataagcagaggcctccaggagcaaagagtgaaaagtctcccaaggattcaagtacgggggaagtgggtggagctttcaccgtagaatctttcctggagaaaaagcaaagagtgggacaacaatgaaggcattaaaaataactgtcaagttgaagaaaaaatctgaagtttatcaatacatgatctcctcaaaaacgaaaggaataaaacaagtatctgcaatttgctgagaacttaatatgtgtcagttgcctgcaaaactcatcattctttagactttcaaatacatctgtgaggacggtattgttgtttccacttacacatgagaaggcaagagacaagcccacggtcacccagctggaaaactaagctccatgagaagaggggacttgcccatgtggctcagggctctatgcccagtgccctagacagtgcctgactgtgtgtgcggaatgaatgaataaccttggtgatccacccaatggcactggcgctcagtgacctcatctgaaatggaataaggattttatgaaaatgcatgtttgttgaataacacaaaggagaatattatcta

SEQ ID NO: 96391 - DNA, 194 bp, Homo sapiens
ttgaggaaactgggccctgagacattaacttgcccaaaagatcacagtgggcaacattctagagcacagtggaagccgacaggtaaataagtagatgggtagagtgcaacagacaggcagacagattgagacaaaaatgggaaaactgggaaatatggaaaagaacagggaatggatgaaaagtagtcctaagc

SEQ ID NO: 96392 - DNA, 554 bp, Homo sapiens
  misc_feature (530)..(530): n is a, c, g, or t
aattcgatgtgggaccagagctatatatacagcaggaagctgcgggaattgcgattcaaactttcaggcctgctgtctccctgggaattctgttctcactgcctccatataaagaaatacacgtgcaggaggcagcccagagcaccctcctctccctcccaaaaacccacacagtgatcctggccaggccccctgggcccaggaggagccgtgtccccattaggcatctctgagctgtgctttcacattggggtcccccccaccagggctggtggaacacaaaggggggtggccaaggcagagaaagagcccgacaggccaggagccggcttttctccctgctttcttcctcccttgcttctttgttaagctccctttcagctgaaccggcagagcctgggtgttccgagctgacaataattgctgcgtctagacagtgtctggtatgaggcctccctctccgcgcctcaccggcctccccgaggctcctattcccagccccgctggcccctgctctgcgccctctgagnccacagtcgaagggatcctctaga

SEQ ID NO: 96393 - DNA, 863 bp, Homo sapiens
aattcgatgtgggaccagagctatatatacagcaggaagctgcgggaattgcgattcaaactttcaggcctgctgtctccctgggaattctgttctcactgcctccatataaagaaatacacgtgcaggaggcagcccagagcaccctcctctccctcccaaaaacccacacagtgatcctggccaggccccctgggcccaggaggagccgtgtccccattaggcatctctgagctgtgctttcacattggggtcccccccaccagggctggtggaacacaaaggggggtggccaaggcagagaaagagcccgacaggccaggagccggcttttctccctgctttcttcctcccttgcttctttgttaagctccctttcagctgaaccggcagagcctgggtgttccgagctgacaataattgctgcgtctagacagtgtctggtatgaggcctccctctccgcgcctcaccggcctccccgaggctcctattcccagccccgctggcccctgctctgcgccctctgtttcccacacccctgcccctatctggctgcccagggtgccctgtcctgcctccctgctgctctaggcctccctcgaattttcaatccttgcatctcttcctccctccccagccgcaccccaggcgctggccccattccctcccacggcctgaaattcagggaacaaaggtggttttgcatctggctgtggctgggagaccttcgaaggagactgagccaggcaaaccctcccctcctggctcttggccccctaggagccagagactcacattgctggcttctgagctgagctgggaagttctgggattgatgcttgagacacccttaaggctcctt

SEQ ID NO: 96394 - DNA, 745 bp, Homo sapiens
aatttagtgaagtcatgatacagatggagaaatagtccccctgaggtcttgcgcacagattttaagatgattctcacttacaagaacactgagtggttaccaactgcccaacagatacgtcaactgcaagatgttctatcaagcaattcactacttcctcccttctcaatcttcaggctctgcatatggaaatgaacatttcattatgaccctatgacctacaaagctccctctctgtcactccttatcatctttcctagggaggcaatcaaaatgaaatgattttaagattctagcactcccaactctaagatgaaaatgatgcagcaatcatgaactcctgtgttatctgtcactatctcataagtcacatgatttgaagagaagatcattcggagcagtggaaaaatgaaatcaaacatagctgctacctcagattgaagagatgtcctctccgattctttaaagtatttcctattctcctacccacctcctctgttgtttgcaagactcaaaaagataaatttatagtgaaataagaatcctccaacttacatattagagcttctgcaattaaagaaaaacagaaatcaggctgggcgcagtggctcacgcctgtaatcccagcactctgggaggccaaggtgggtggatcacctgaggtcaggagcttgagaccagcctggccaacatggcaaaaccccatctttactaaaaatacaaaaatcagctgggtgtggtggtg

SEQ ID NO: 96395 - DNA, 298 bp, Homo sapiens
tatagtcgtctccatggtgaggcactcttgggtgcccataccatagcttctgtgccagtggactgtgcttgaccagtggagagctcagcaatgtggcccctacaggcatgcatcagcctgcacattgcctctccatactgcagctcttctttatatggaaacttcctatatcactttgctggtgtgtgtctacacaggtgggttttgctgtacttgccctaccagcacacgggagtgcagccacacaccccaacacatgtcaactgctattgacgatggaactatggtgggcacagag

SEQ ID NO: 96396 - DNA, 379 bp, Homo sapiens
ctgcgtagaggctgctttgtgtctctttgggctaattcaataagcccatattgcggggctgtggcccagagtttggaggaatgtgaataattcagaggcgacttagatgcagcctttggagggcttacgggttaatgggagacacacacattcagtaatctcaactttcggtggcccagctcagaacaacgccaggtggaggtggtctggagaaatccggagaccgcctggattgagttctactgcgattggaagggagattccacagcccacatactttggactttaattaagtaaccatggcctgtgattcaatgttgattctgatttcaagacatctctgcctcgagacagtggaaaaccacatgccttgctccaa

SEQ ID NO: 96397 - DNA, 126 bp, Homo sapiens
ggaggcatcacactacctgatttcaaattatactataaggccatagtcaccacaaccacgtgcttctaacttttaaatgagcacaaatgactgctttgcttctcctacctcttcttccttctgcct

SEQ ID NO: 96398 - DNA, 512 bp, Homo sapiens
gctccttctaaaagatgtgaattgaaaggcaacacaagccattagtggaccgttttcagttttcattatcaataaaatggaagatcagcattttcatgctgtgtgaaggcttcaaggatgtgcattgttgctgttattatctttaggccaggctgctgcctgcccctactaatgcagatggaatgatgagcccatcaaaataaaaataaaacaatgaaacggtcagtcatagagtgggtggctgacctggactgtcgtatgaccccttgaaaatgtccctttgaatttagtgaaggctggatggtaaagaccacagatcatgacagaacataaattcgcctcataataagattagaagacaggcaaaatcgatgtcctgctgttacattagaggcagactctaatctggcattttcctcggaaatgatcatttcccttgcaacgggggaatcatggatgcaactagcttaaatccgacaggctctgttttgccatgtagttatttttcatct

SEQ ID NO: 96399 - DNA, 1188 bp, Homo sapiens
aggtccatcctcataaatgtgcaaactgcagaatttgcacagtcagctttggggacacagttgcaaattgcattgcattctactcagggctctggcttagagacaaaaagagctcaaactcaaacagtccaagcatagcacagatccaatagcagcccaagaagggtcctcaacccttatccttctttctggagtgctacaggcagacccagtattgtagatacatagagcaacaaaaagggatttccaggaagcaccatcctgctcagttcaaggttggatagaggtttccagaggctccttagtggttttcagggatggtctctctggtcacatccaccctccttgggaacgtttgctgccttccgggccttccacagacagggttattgattcacattagggggctgtcacgaaacacctggcagtgagcaagagaaaatgatgcaatcttgggtgtgattccaactgaatcctcctttagacagagcgagtgagtttgtggaaagataagagaccttccaagagtttcctaaaccaggacagttttgtgctttgtgccttgattcattctctgtatatgatgtcacagaagagccaggtctgttccccaggttgatgctaaagtttgtgtttctcttacgtcccctcagtgagggaggacgctggggagcatgggtagctgcggagagttggctgagatttatattcccttttcaacttctgttctctgaacacagctatagaattgaaatgaggagaagaaagaataaccaaaacagagttataattcgtattattatattgctgatacatatgtcaatatttatagagtactgtgtgccaggaactggaagaaatatggtctgaaggacgcctcatttaatccacgtgacagcttccgaggtgtttttaccgctatttccctgcagccttgaggggtcagttggcttctctgagccgcacaggtggcaaatcccagaacatctggtgcctgagccagtgcttgtcaataacaccctgcataaggaattcacaggcacacctttccattttccagtgtgatttttttgttttttgtctttgcatattaagttaaatgttattacaaaagagtcaaaactttaaaaaatttaaaagtagataatggaaaaaatgtgacagaaggttaagattaatttattatta

SEQ ID NO: 96400 - DNA, 210 bp, Homo sapiens
acttgggcatgtattttctttggggaggattggcgggatcattggtgtctggttgcctcactccacctccctgcctaagccagcctctagtcatcagtcaggaagtcagcaaccttgagaaattcagcctttgaagctgtgccccccgttccctgctttctgacagaaagtcactcagtgataaagtcaagcaaagctagatgatgcttg

SEQ ID NO: 96401 - DNA, 246 bp, Homo sapiens
agagggacaggagggcctgagggctgcttcatacagggtgaggatggaggggttctgaggagggaccatgttgggaggctccacggaggacagtctggaaggactgaaggacagccaatgtggccaaagagtagtgagtgtgagagagggggagccaggtgaggttggtggggaggcggtagggacgccacgctcctgctgccctgactgtggggcacagggtggcagtcaggcctgtgggtcacc

SEQ ID NO: 96402 - DNA, 316 bp, Homo sapiens
gcagacctcaaaacagaatgccaaagtgatcttaaaattcaaaaatgagtttactttctttgttaaagttctcttttgatgcatatcccccattcatggaatggaagcattatcttgggtgcagcattacacgtagagttaaaatgtggaaacaacccaaacatcctgatatggtttggctctgtgtcaccacccaaatctcatcttgaattgtactctcataattcccatgtgttgtgggaggaacccagtgggagataatttgaatcatgggggcagtttccctcatactgttctcatggtagtgaataactct

SEQ ID NO: 96403 - DNA, 425 bp, Homo sapiens
taccacctcagccaagtgatcaaggtgaacgtcagaagtactccatacagacatcagatagctgagacactgggaaggacacatggcttttatggtattcttcccaataatgtgtaaccttaaacaattaaaagtaatggcaaaacaattaaaagtaatgacaaaaaccgcattcatttttgcaccaacccaatagtcatgagaaaacattaggtaggcctcaattgagggtcattctctaaaatcactgacctgagccagacatggtggtatgtgcctgtagtcctggctctgcaggaatctgaagtgggaagatcacttgagcccaggagttcaaggctgcagtgaactatggtcaccattacactttagcctgtgtgacagagcgagacccatctcaaaaaaataaacagtgtttatttaaa

SEQ ID NO: 96404 - DNA, 465 bp, Homo sapiens
catgtgtttatccccagctatgtatgcttcactgctcttctttgtgttatggctacagtttcctcactgttctcttcatgccatgtaatttcacttggactttctaggctctgatgagaagtttggaatttttaatgtatattgtttttaactggcgtgtttgagattatagcttatcaatgcaacattcagatcatgtaattgaggtaagactaattcactgtccacatgtaagaggattaagtgagcaccgtttttctctttgtaaaagaaaaattgtatgagaatctaacacaaagtgtgttaaatgtaacataccttaatatatattaaagcataaatataagttggttgcagattgtaagcaccatatgaagaaacacatcagaagtttgaaatctcttaaaatatatctttgaaataaaatttttaagacttaatggtagatgaagaattttacatata

SEQ ID NO: 96405 - DNA, 616 bp, Homo sapiens
agcggagtgggttcgaaagttcctgtgtgcagaacagaaggctggggtgagggtgggagtcgggtgctaaatatttctactaggctcctgcaaggctagtgatgcagcgggccccccgaccggcgctcgcccgggttctgcgcctaagagttggccgtgagcgacccgcgccgccgggagcctgggtctaggctctcccgacaaggattccaaggcgagaacactggtgcctctgcctgggccagggagggactgaaatcagagcaggggaggcgtttcccccatgggctgtcacccttaaggggccgggagccgaggtgggcgagctcgagagcagagttggagaggtggctgctgtgagttgcatcgggcgttgaggtatctgatgtctgcaccgtttatctaccagacgacgaggcgatttatgcaacagtatcctgtttcagcactgccaaggctatgcgagaacgcggccaggacagcctggcaggactcgtgctgtatgtaggactcttcgggcaccccgggatgctgcacagggccaagtacagccgctttcggaacgagtcgatcacgtccttggacgaaggtagctccggaggctcggtcgggaaca

SEQ ID NO: 96406 - DNA, 791 bp, Homo sapiens
attagtttactaatctgtctctttcttaatctatagtagattctgttaaaaatggttattatcaaaggacagctctcctgtgttttttgacccttgttaaaaatcaaattttgacaaattttacttaaagatcttttattagggattcatgaattgggcagcatcccatctaaagacttcaaaagccactccaatgagctgaacaaaggaggtacttataagtagaaaaaggccaaggaaagcagaaagaaggagcaaaaaacagattggtagttacaaagttactttccttacaggattcaaacaaaggagacttctttaccatgccagctcaggtaaactgggcctctactgattgctgtgaatctctggatttttggaatattggctcattttagagtttgattaattacattaatgagtgactccattctggtttggtctggccagttgagcctagtccaagtactcagtccaaaacaatggcctcccataatttttatgtgacatcctctttatttgaattgaatatgtatacattaagtatctatttttaacctatcccatgaacaaatggtcttattcctgttttaagatcagaagcttttatccaccctgtgtataaaccacagcagatttaatttaattccagattaatttcccctggatacctgtagatatctgggccatcatgtgtctttaatgaaaggtattagtaaaaactaatttttaaagtttgttttagtcatttgagtaataacaataacaaaataataataatagaataaata

SEQ ID NO: 96407 - DNA, 664 bp, Homo sapiens
acaggatattgcagtcaagttaaacaagaaggttcagatagggtcttactctaaatgtcttatattgaagtatgtaaaccatattgtggagaaagagtgcttatcaatttaagattcactttctatccttccttctctcaagatgaaatcttttagtaggtcacaactagtggatctcagtcagttaattttacctcagcaagtagttggctgtagttcatatatacattaatgtaaacatcaatattgcctataggggtttcttgatttttggaagcttcactttcttccttatattttattgctccctccccaggtctgccatatcatatttctgttctgtcactctcacggtttcttggtaaatgtccaaatatcttgcctgtttttaaaaattgtgtcttaaaattaaaacttttgttgtgacatggctgtagattcacatggagtaagaaatattaaagagattccagtataccctttacctacccagttcccctcagtggtagcatcttaggaatacaatatagaacaatatcataaccaggatatagacattgatacaaccaagatacagaacacttccataaacacaaagatccctctgtttgcccttttatagccacccttacttctctcccattaaccccttcctcaagccctg

SEQ ID NO: 96408 - DNA, 140 bp, Homo sapiens
ggtgatgctagagtggcaggctggctgaccccattaattgtggaaagagatggcgaggcccccagaacagcagggatcaggatggagggagggaacaggtctgagaagtctgtggaaggctgcgagggtggaggatccct

SEQ ID NO: 96409 - DNA, 493 bp, Homo sapiens
tgactttagagggtccccccaaagagtgggactccatttttaaaaaaaaaaaaaaaaaaaaaaacccactggaaatccattatattccagtattcagccaccatatcctgcttctagtctaacactgtatgtatgatagttcatgtgtatttgacttacatgtttgaccatttgaccatgtttaacaaatctcttgctacactgcaatgtctattctccccgtttgtgttcactcaaagccaaagaaatggtggtggggaagaagcaagcactttggaatccagacagacctgagtttgaatcctgactcagctactatttatttgctatcactttgctcaaattatttgaccttttgagcccccgtctatagtttagttttaagatcgtatgtaaagctcttggagtcaaaggaactcaaatgttaatttcatcatatgtatacaccataatgccttatttaaataaacaatccagtcagtcgttactacca

SEQ ID NO: 96410 - DNA, 417 bp, Homo sapiens
ggtttagcaccatttatttgtgatctcagctgttgtagtagttgctgctgtcagcctgttctcaaaggtaacatgctccttacatgtttgaccatttgaccatgtttaacaaatctcttgctacactgcaatgtctattctccccgtttgtgttcactcaaagccaaagaaatggtggtggggaagaagcaagcactttggaatccagacagacctgagtttgaatcctgactcagctactatttatttgctatcactttgctcaaattatttgaccttttgagcccccgtctatagtttagttttaagatcgtatgtaaagctcttggagtcaaaggaactcaaatgttaatttcatcatatgtatacaccataatgccttatttaaataaacaatccagtcagtcgttactacca

SEQ ID NO: 96411 - DNA, 929 bp, Homo sapiens
ggatgtctttccttttttaaaactgaaatcatgttttagttttctctctttttagaatttaattcttgggaatctttcaagtctaacacacatgataaataatgcatatatatgtaactatatgcaacattcccttcattataaatcttgactgttttaaaaaatggtttgaatacagaatatttgcatcagttttttcctttaatttgaaatactagagtagctgttcttattgcttcctttaaaaactacgattgaagtacacaaacagtatcaaatgttctactttgggcaaaactagactttactgtatcagaaaactggaaatccaggccgggtgtggtgtcacgcctgtaattccagctactagggaggctgaggcaggagaatcacttgaacctgggaggcggaggtcgcagtgagctgagatcgcacctctgcactccagcccaggcaacagagtgggactccatttttaaaaaaaaaaaaaaaaaaaaaaacccactggaaatccattatattccagtattcagccaccatatcctgcttctagtctaacactgtatgtatgatagttcatgtgtatttgacttacatgtttgaccatttgaccatgtttaacaaatctcttgctacactgcaatgtctattctccccgtttgtgttcactcaaagccaaagaaatggtggtggggaagaagcaagcactttggaatccagacagacctgagtttgaatcctgactcagctactatttatttgctatcactttgctcaaattatttgaccttttgagcccccgtctatagtttagttttaagatcgtatgtaaagctcttggagtcaaaggaactcaaatgttaatttcatcatatgtatacaccataatgccttatttaaataaacaatccagtcagtcgttactacca

SEQ ID NO: 96412 - DNA, 647 bp, Homo sapiens
tgctcatagctgattccagaggataaaccacagtaccgacagtacggacagatcccacaattatcgttttaatcaaaagctagaaatagttaagcttaatgagaaaggcacatggaatgccaaagaagcgcgacatctaagccttttattacaccagtcagccaaattttgaatgcaaaggaaaaattcttgaaggaagttaaaagtgctactcccatggacacacaaatggtaaaaaagcaaaacagccttattgctgacatggagaaagttttaacggtctagacagatcaagccaaccactacattccctaaagccaaagctttaatccagagcaaagccccaactgccttcaattctatgaaggctgaagaagtgaggaaagctgcagtagaatagtttgaagctagcagaggttggttcatgaggtttaaggaaagaagccatttccagcacatattaagtacaaagtaaagcaggaaatgcagcaagttattcagaagatttaactaagacaactgatgaaggtggctgcactaaacaacagattttcaacatagacaaaacagccttctattggaggaagatgccatctaggatttttagagctaaagagaagaagtcgatgctgtattcaaaatttcaa

SEQ ID NO: 96413 - DNA, 456 bp, Homo sapiens
gttttgacctagccattgagggaggcagtgggcacagagagaaaagagcaggaaggccttcgttagtgaggggaggctcaggcagagacgcatgtgccagtcgctggattggcgtgtgaggaaaaagaagggaagagaattgaggctggtgagataggaagtgagggaggagctggggttaggacccaatattatataacagtattgcctaggctggagtgtagtggcatgatcatagctcactgaagccttgaacttctgggctcaggcgatccttctgccttggcctcccgagtggctgggactgcgggcacgtgccaccacacctggtgagtttttttgtagagacagggtctcactgtgtttcccaggctggtctcaaactctcggcctcaggtcatccttctgccttgccttcccaaagcattggaattacagacatgaaccacggcacct

SEQ ID NO: 96414 - DNA, 299 bp, Homo sapiens
ctggcacctgtatatgttattcatgaacctagagactgacccacttagaactgtgagggccctcacgtgacatccaagggcctgacgatagatgtgcctcgccctcagctaccacctccagacactgttggagtctaggcattggctggccatacctgcagctgctgacacacacacacacacacacacacacctttcaggggctcaataatggacctaccttgcctgccactggcacctgtgggcacttcccaggggcccagggactggctcgtccaccctgcctctaccactattgt

SEQ ID NO: 96415 - DNA, 311 bp, Homo sapiens
aaaattccactgaggcaatgagaatagaaggggagagaatagatgtcaacaaattttcgaaagatgagagtggtaacagacttagtaaaagaagtgattttttaaaagtgccttcagaggtgatctaattagaagacaatgggtttctcttagcaaaaagccctttttcaggttgtatggaaggtgggagtgaggattgtggctaaaaatcaagattctgaagacaagtatctatgcagcttagtgttgattccattctcacaactctgccatacaaagataagctatgactgtttccattcatcttccca

SEQ ID NO: 96416 - DNA, 466 bp, Homo sapiens
tgaggttgggagttcaagaccagcctgaccaacatggagaaaccccatctctagtaaaaatacaaaattggccgggtgtggtagcgggcgcctgtagtcccaggctgaggcaggagaattgcttgaacccaggaggtggaggctgtggtaagccaaaatcataccattgcactccagcctgggcaacaagagcgaaactccgtctcaaaaaaaaaaaagaggacctagaatagtttgaaaaggatgaccaaaatttgagaacttatgctactcaattgcaagacttactatgaagctacagtaatcaagacagtgtaggctttggggtaaagacaagacatgtagatcaatgaaacagaatatagttcagaaataaacccaaacacatgtggcttaaatctttacttgattttaaaaaaatatatttgtctaatgtatacttcttttaaaagtaaacgccatctga

SEQ ID NO: 96417 - DNA, 419 bp, Homo sapiens
ataggcacattttacaaattaaaaaactgtattggcaatgccacattttagttgtttggagaaattggttattttatgtaagtacattttcccagtaaatgaaataaaatttttattaaaatgttactttgtttctcctcccttttattattaccttttctcttttagttattcagtcccattattatggctgtgtttccataaagtaatgtccttagaggccttgatgtgtttcatcattcacccctgggtcctctctattccattctctcatctcaattagttttggagtaacttagttgtaggaattgccagagcaaacccagcaacaaaggttgttaaatcaggatgtctaattatgtacatcagtggctctcaaacttcagtctgcctcagaattacttggaggcctagttaaa

SEQ ID NO: 96418 - DNA, 409 bp, Homo sapiens
gtagaagattggaattggtactataaattagacttctagaaactagagaaaattcagcctctaaaatatttgtgtcttttcaaatatttagatacattattttactgaaccccttagacatggtattctgatacttgatttaatctaatcagatgaattccttcttgccttctcaaaaagagtgatgatgttgccattttaataataaatatagtgaaatgtaagatgagacaatgtcagggagttatgaacaaatatgcctctttctctaaatagcccagtttttagtggtatctatttttgtgtagccatgcactgaaaatatcacttgagtgatataatttcattgagtgagtgcttttctgtatttttaaaacccaaagctcttttaggggtgtgggatagatag

SEQ ID NO: 96419 - DNA, 361 bp, Homo sapiens
ctatgctcagagtagagaggggttttgtgctgaccctaatccggtctctcaccagttgcataatcttgggtaagtaatttaacctttctgaagcttcagtctccccatctgaaaaatgaggataataagagtcttccaggctgagtgcagtggctcatgcctgtaatctcagcactttggaaggccaaggtgggcagatcacttgagatcaggagtccacgaccagcctggccaacatggcgaaaccctgtctctactaaaattacaaaaattaaccaggtatggtggctggcgcctgtaatcccagctactccggaggctgaggcaggagaatcgcttcaacctgggaggtggaggttgc

SEQ ID NO: 96420 - DNA, 433 bp, Homo sapiens
acctcaacctctgtcccaggcaggcagtaggagttaaaatttcctgctggaagtttggtcttcctttgtacttccttactggtgcataaaggtttaatgatgtttatgtattatataatttatctctgtataatcaccctttgttctgcataatgctctttgctttaaattatccttttaataccgcccctctttcctttgattagaattccagtgttatatctttggcccaccacttattttcaacctttgtcattttgtgtcaggtgtacttcatacaaactcttgtattttatttcttaagagaacaatactatttttatttgaatagggtaatttttgcctttgcatttcctgtttcatgttatactttgacttgtcagccaatttttataaatacacatacagatttatttgcttcctttaaaaatca

SEQ ID NO: 96421 - DNA, 177 bp, Homo sapiens
tgctgagattacaggcatgggccaccgcacccggcctataataagttttgagagctgttggtgcaactgcccttaacttatttttcttcagcagtttctgggctattcttggcctttgttcttccatatatatttcggaatcagcttgccaagatccataaaaaaacacttctgaga

SEQ ID NO: 96422 - DNA, 729 bp, Homo sapiens
ttgcttaagatttccttggctactgggaagtgaggagcccctttgcccagctgctgcccgtctgggaagacaggagggcctctgcccagctgctgctccatctaggaagtgaggagcgcctctgcccacccccggcatcatctaggaagtgagaagcacctctgcccggtggccaacatctgggaagttggagcacctctgcctggccactgcactgtctgggaagtgaggagcgcctctgcccagcgccgcactgtctgggaagtgaggagttcctctgcctggcctccacactgtctgggaagtgaggagttcctctgccctgccgaggccctgtctgggaagtgaggagcgcatatgcccggccgcccccctcgtctgggaagtgaggagcccctctgccctgccgcccaactgactggaaagacaggagtgcctctgtctggccgccaccctgtctgggaagagaggagtgcctctgcctggctgcccaccttctgggaagtgaggagcacctctgccctgctgcccaattgactgggaagagaggagcacctctgcccagctgcccaccttctgggaagcaaccctccaagtgtgaagtgacagccttgtgtgtgatctttctgccctccccaagtttgcattttttgacactaaagtttactttttaattaaaaaaaaattcctttgctattagggctttttagttccatacgaattttaaaa

SEQ ID NO: 96423 - DNA, 420 bp, Homo sapiens
tgttaacaggataaaagaaattatagatatgagctctttgaactctctgatagaaaagtattccataaatccaaggtattattactactaaggtggtaaaaacagttcacaatcactgaaagaaatggctagaatttaattaaaatacgcctgacatcctactactaaaaaggagatttagccaaacaagaaaactggtgttggtaatctctgcgaagaaacaaaaaattttgcttggataacagatgttttatgatagtcacgaaggaaaaagaaaacccaaacctatgaaaatgaaaaaaaatactcatactattaaaaaaaatactaacaatgatggaaaaatcaaactactacaaactattttagatccctatttagcaagccaagggaccacacctacagaaaaattttcagagt

SEQ ID NO: 96424 - DNA, 189 bp, Homo sapiens
ttagctaccaaccagtgacctgacatagattttcttatgctgctgttttcagtaacatcacttccctgtaatcatttaaaaatatgaattaaaaagaaggataataatagtaatggatgctgatcttttttcatacatgatgaactctggtcttgaggattttttacatttttcgcgactctatattat

SEQ ID NO: 96425 - DNA, 648 bp, Homo sapiens
atggggagatccgtctaaagtctgagctgtaggctgggagttgggtactgagcggtcgtgtcagaacgtctgtgagagggagaggccgaaggggctctatggagtggaggattaggggtggggagactatcgggggttggatcaggcacctctgctgaccaagcagcttctggtgacacagcttcacttggaaagactgtcccctcatatgatcccacccaatccagatttgtgcttcctctcctgaatgaacaaggaaaagtacttcctttgtccattcttcctgttttatgtgaatggagttaacactgtcaggaatttgaaagtaaacatggttcctgccctcaggaagctcacagtctgcaggaagacatggaacaaaacaaacatttaccatgcagtgtgataatagcccagcacagagacacctaacaggcctgggaggtgtatggaaaggctttctgaagaaataatctataagagttagctcttgaggaggaaggggaaagtgatccaggcagagggaaagcctttgaagtagaaagaacatgcagctttctggtaacaaagtgatccaaggtgagtagagagaaactaaagaggaaagtggaagctttcaaatctcttcaactgcagactttttcctga

SEQ ID NO: 96426 - DNA, 401 bp, Homo sapiens
ttcagtgtgcccttgggcagcttactttctgctgctgggcaaactgatatttgcccatacataacagcattggaaaacagaaagtcctgaatgtcataggagagttatgggtttcaagaactttccaagagctagcaaggaagtttgagactagacccaactgaaagcaaatgtcctatttgaaaaggggaaagtgttaccatgtgtcatggcatggtgaaaaggacaagaccttgaacaaggagagcagccacaatttcaaggctgacaccaaggcagcagtgcgaggtcaggcagaccctcttaaacccaatgaacttcagctgtccctactgtaaaactgtccaggagtatgctaactttcaaagttctataatattaggagtcttatgatatctgct

SEQ ID NO: 96427 - DNA, 395 bp, Homo sapiens
ccagcactttgggaggccaatgcaggaggatcacttgaggttggaagtttgagatcagcctggccaacatggtgaaaccccatctctaataaaaacacaaaaattagccaggcgtggtagtgtatacctctaatctcagctacttgggaggctgaggcaggagaatcgcttgaacctgggaggcggagattgcagtgagccgagatcgcgccactgcactccagcctgggtgacagagtgagactccacctcaaaatagaaaaaaatttaaaaaaagagaggtgtagttgataggcctgtcaaccctggtcttccccaggagggtgggcagcggaaggaactgaagacagatctcaggtttctgactttcatcagcctccgatttctcaaagagc

SEQ ID NO: 96428 - DNA, 572 bp, Homo sapiens
cgggcgactaagaggatcccgtcgacggtactcaacataataaatgccatgtattaaaaacccacagctaacttcacatttaatgatgaaacgtcatagcttttcctataacatcatgaacaagaaaaggatgcctacttttgtcaattgcattccacagaacactgcaagtcctatccagagtaattagacaagagaagcataaaggaggcatcctaattggtaatgaaaaagtaaaattatctctgtctgctgatgatagtatctaatttgtagaaaacattaactatcccacaaaaaactattagaactattaaaacaattcatcaaagttgcagcatgcaaagtcaatatggagaaatcagttgctagtgtaaaaaatagaaaaggaaattttggaaacaatccaatttaacagcatcaaaagaataaactacttaggaatcagcttaaccaagcaggtggaagacttgtagagtgaaaacttcaaacaccctttaaagaaattatagatgacataagttattagaaagacatcctgtgtttatggattggaagacttaatattctta

SEQ ID NO: 96429 - DNA, 490 bp, Homo sapiens
atgcctatatgtgatctgtgtgtgtgtgtgtgtgtattctgatggcatggttttataaacactataccaggagaaaggaggtgtttcatgcccactttgctggtgatgaaacttgctgtgtgaccttggtggttcaatcctctctggtctccatatgtcatccataaaagtaggaacatgatgggcgtggtctctaaattctcttccagttccagcctggctctgctgcatgatactgcctgcctcccaagggatgcgtccatatatggaggacctgccacatcccttcctgggctgccctctttccaaagatgcctgcgcttctcctctgtctaaggaacagacttgtcacaaaggggtaaattacccatacctgctccaaatgtctagacaccttgatgctatgactcaattttctttgccagccctgcaggccttcgcagagcaggcacgttcatcttcctagcatggcccagccctgccaggcatt

SEQ ID NO: 96430 - DNA, 235 bp, Homo sapiens
agatcaggctaaataattgtgacagctgctaagataatggaaaggggctgggtgtggtggctcacacctgtaatcccaatactttgggagggtaaggtgggcggactgcttgagctcagaagtttgagacctgcctgggcaatatagtgagacctcatctctacaaaaactaaaaatgttaactaggtgtgctgtcccatgactgtagtcctggctactggggaggctaaggtgg

SEQ ID NO: 96431 - DNA, 279 bp, Homo sapiens
tagccagatatggtggtgtgcacttgtaatctcagctactcgggaggctgagacaggagaatcatttgaaccctggaggtggagtttgcagcgagcagagattgcgctactgcactccggcctgggccccagagcgtgactctgtctcaaaaaaaaaaaaaagagagaccaggtaacttaactttgaggcaatcacttttagcttacttacaatggtagcattgtttctttgtgaaaatgaaattttctcagcttatccactaaattttcagcaacatc

SEQ ID NO: 96432 - DNA, 607 bp, Homo sapiens
cctgcaggtgcggccccgtggcccgcgcgctgggcccaggcaggaagtgggggaaggagagagtcagggcggcgggaagacatttctccgagttctcccgaagggagccaggcgcgagcgcgacctggggaaagtccagagtgccagccacggggaagggcgggcagtgcagagtggaagagaagccagcaagttagacacagcccctctctgggaggccgcctctaaaatggaactagcggacgtaccttggtttgtacatttgaccatggacacacgtaaagattttgaaaaaaaatctttgaaaaaaaatttttttaacgcaattcctaaacttttaactaacgcaattttgtggacctctgaatcttaattcaaatgaactggagaacaactataaagcaatttcgataatatgatcagtgacattttatattgcagaattgtaaattttgttgtcattatactgtaattttatttctttaaaagaccctttttagagccacaaatatttgcagatgatacctgatttcttgaatgtttcagattacgtggaaagtggaaatatacatgaaacaagatgtgctatgaactagtaatttttatt

SEQ ID NO: 96433 - DNA, 544 bp, Homo sapiens
actcaggacattccgttgggctagagagggagaaccactcagctggcttaatgaaagacacgggtgtgggactttgtcagcagatgcaagcctggagccaccacacagcagagaggagtaggaaaccagagtatggaagccccttcctctcctgcaccaaatcactcacagcaccatgatgggcagcagtagaaggattagaaaccacaccgccctgataggagttgaacttttcttcaactggctcttaagctgacatgagattgcgctagttggaagataccaagatactcttaaaagagaagatgaagttctcatgtttcaacccctattactattgactgtcaacttcccaaaagaccccagaaaaacatgttaatggaacaaaactaagtttattagatttactgtagtataagagaaaaccaccttggtagagtcttgatagtgcctcaggttgacaaagtcagggtctgcactgggggacttctaaggtagcttttgcaaggtggggagtagcttgggactgggcagggtttctacc

SEQ ID NO: 96434 - DNA, 374 bp, Homo sapiens
gtatagtggtgaggttaaggggttgggtgatggacggcctcaatgagaaggtaatgtaactggagcaaagacctaaggataagaggggagtatcttcatagttaaattaactttatcaaaataaactgtatcaacagtataaaccagagaaacataattaagtattttatgatgttaaaacaaaagttaacactttgaaaatttaaaattataactttatgaagtacacatgtagaggtgcgtgatattagcactattattaggccatgaatttaaatttttttgttgcttatcaatttagcaaatgtttatcaatttatgctatttgtaggacttttttctgcgtttttagactcttaaaaaatactacaatg

SEQ ID NO: 96435 - DNA, 449 bp, Homo sapiens
ctctagaggatcaacgcacgaggcgaggccaagttcccaagatcacacagctactaagtagcacagctggggctcaaaaccagagccatgtgatcagatggcccatattctttttgttccctcccatcaaccaagcccaggcccatggctgagcatgatggccaagcagggaggagggtcagctcctcttcaaggaagaaaacagcatgctgttctttatatatgtaaatgatgttctgttcctcacccatcaccaatcacacaggtacttaggttgcaaggtgtggggactgccatggtgatgatggctctccccaccagtcctcaatgggaataccagcaagacgccagtccacagtaagggattctgtctgggccctccagacacccagagggccacgatgagatccactccagaggagtaattgtaccctgccccaaactaccag

SEQ ID NO: 96436 - DNA, 553 bp, Homo sapiens
gagaataagggggagagagagaatggaataatttaccaattaagtagaatacaagataattccccagaagtgacagatacgagcttataaactgaaaaaaaaaatgcaccgagtacttagcacaatatattttaaatgaccacacactaagccagacacagaatgtcatgtgttatattgttttatttatatgaaatatctagaacgggtaaatccatagagatagcaagcagatgtgggactgccagggaccggtgaggtggaggtggggaataaatgcttaatgggtatagggtttttgttgggtaatgaaaatgttttggaactaggcacaacatagtgaatatactaaattctacagcattgttcatatagttgttttatgttatgtgaatttcacctcatttaaggaaaaaaaagagaaaaaagagactacacactgaggaatatgaaatttaagagcaccaggaataaagagaagattccgaaaccttctagagagaaacaaaggatatcatatagtcataataagctaaatttataatatagtaat

SEQ ID NO: 96437 - DNA, 328 bp, Homo sapiens
tgtttccctttgtctctactaaaaataccaaaattagccaggcatagtgaaaggcgcctgaagtcccaactactcagggggctgaggccggaggatcacctgagccttaggagttcaaggctgcagtgagccgtgatcataccaccgcactccagcctgggccacagagttaaaccctatctcaagaaaaaaaagagaaaaaagagactacacactgaggaatatgaaatttaagagcaccaggaataaagagaagattccgaaaccttctagagagaaacaaaggatatcatatagtcataataagctaaatttataatatagtaat

SEQ ID NO: 96438 - DNA, 386 bp, Homo sapiens
ctgcagtggcatgacagggcagagtcaggaaactcagattggccgggagcctacaagtggacccgtggctgccttcccctctgcactccccactaaggcaaaagcagggcagcctggtagaggctgctgcaggctaactcctctaagtctctttgtcagctgcacctgtgcccataccacaccctatgtggcatccacagctgtgtccaggagggaagatgttgccctgtcttacatcgttcagctctgtgctttcttggaaagggcagttatcaatgttgtcttcaaatttcccacacctagttctccccagcagtagctccattgagaatacggtcttggactctatctaatgtacagagagattacagtgaacacgcccctct

SEQ ID NO: 96439 - DNA, 485 bp, Homo sapiens
  misc_feature (218)..(218): n is a, c, g, or t
atgaatgaatactatgtgataagtgttggacacagcatttacataaaatatctaacttaatatttacagtgattctaggaggttttcattattatttttgtctctagtttacatatggctaaatgaagctataaagtggctaagtcaccttttgaaattctcgcagtaaatgatgatgctgggatcccgagtcggatctgttgcactcctagaccccnaaagtctgttgaggaaattcatatttcttttggcctctactgaagagtgagtttgatttttttttccctagaaatcatgagaatagttaacattttttataagcaaacttttgggggttaacaaatttgatgttataataaacgttcctgtccaggcacgggtgtcacgcctgtaatcctagcatttttggaggccaaggtgggcagatcacttgagttcaggagctcaagaccagcctaggcaacatggcaaaaccccgtctctac

SEQ ID NO: 96440 - DNA, 600 bp, Homo sapiens
agccacatcccaggactctacccacaggacgccagtagcaaaacctccttcccagttatgacaactagaaatgtctccagacactgccagatgtcccctggttaggggcagggaggggcaaagttgacctcagttgagaactactgttctagaaattcttcaggactaacttaaattgagattgactgtgttactgataaatttctgcggagggacattttcttttataataagccccatcccaatctgaaaatccagaagtgtctagatgtccactggccaagggattgaaatcagttggcagatgacaactgagtgtgtgccttttcacgattttcacactttagcagaagccttgttatctgatactgttgggacctgtaggtggttgggtaattgaaaaaggtcagttaaattgaagcagggaatgatttaaaaagaatcatcttaagttttaattaaagcttataaaagggattcaagctcaggcctttgtgaataggaccacagatatgcactccttacattaacctcagccttgatgtatcgtttaaaacatttctctcagtttgagaaaaaatagaaataaaaaacatttaa

SEQ ID NO: 96441 - DNA, 134 bp, Homo sapiens
aggtgagctcagatctgacctgtttttctgagctgcagacttgtttatctaattgtctaattgacatccacttggatgtctgatagttatcccagatctaacattggccaaatcgctcttttttccccccaaat

SEQ ID NO: 96442 - DNA, 320 bp, Homo sapiens
  misc_feature (41)..(41): n is a, c, g, or t
taagtattaataatttattaatatgaatggtaagaatatantttttgtaaaacgacaggcgctaaatatccctgctgaccgatccggagcagcgctgcctgcattggtccctcctgtctgagaaaaacctggcgtgccctccagaccccagcaacgttcgctaccttgctgccttgcagcttctgcagaaacggggagtgcaaagctacaaatccaaattcaaagccaaggagccaagatctcctgtgatcacccgaaagcatgttctcccaaaggccaagcaggaaaacaggccccaaatgctggagaccaaagttttc

SEQ ID NO: 96443 - DNA, 429 bp, Homo sapiens
ttgaattaagggtaattgtttcggataactttgaattatctgatggtatgtctaaagattgcccatgatttatttaatgttataccagaactcatatctaagttaatttattcacctgtaaaaaaggttagaatttgaaggctgcatgcgaagcttagaatttgaaggaaccttatagatcctcatgtcttgtgcttttcaaactgttttgactgtaacctcacagtaagaaacacattttacgttttgatcaagcacacatacacgtctgtatccacatacctgaagccaatgcttcacaaaacagtaatttttctatgggcagcacacatagcagaatatgttgttttatttcactttttttttttttttttttttgagacggagtcttgctctgtcgcccaggctggagtgcagtggcgccatctt

SEQ ID NO: 96444 - DNA, 355 bp, Homo sapiens
aaaaatgacctgtgctccacctattcatctctccccctaccctaaaatcttggcaaccagtgaatttttacagtttctaagtttcacctcacccagcctgtcatatagttgagatcatacaggatgtagctttctcagactgctatttttcacttagcaatatacattccttcatgtcttttcatggcttgatacttcatttctcttttttcttttctttttttatagagacagggggtctcactatgttgccaggggtggtctcaaactcctgggttcaagcaatcatcctgccttggcctcccaaagttctgggattacagacgtgagtcactgcatacggtctcatttcttt

SEQ ID NO: 96445 - DNA, 958 bp, Homo sapiens
acactttcgcagagtgggtccccgtcgcgcggcgccgcggaaaggctggaacggcgcgggtgggtgttagtcgagaccggggggcgcggggcgtgccccttggtcggcgtcgcagcccgatgggctggctggttgctacctccgggcgaccaggggcctggggacttcgtgcctgggccagggtctctttcctttcgcgggcacagtgaggagactgcgaggtgaggtgcgtccgggtggatcccgggctgcggcgactgtcacattctccccggccagaccggaggtggagcagaactgggggcgacgagcttgactgggattgcagctggacgtatttaggttcaaaacatcctcctcctggctttcttccgctccactctttggtcaggaagactggggcggggtaccccccaacccatgccctcaaattgctggcctagagggcacagcgcctttctaaaagctgcagttgggttgcctctaaaataatgaagctaacccttgctaattgtggggaaaagatagccagaagcagcaaatttctgctgtggacgtccgatataaactgatcctcttgagatggttaatgcttagttggctatacctgccccccgcccccgccgcttttttttcctttatccgttttttttttcttttttcttgagacaaggtcttgctctgtggcccacgctggagtgcagtgtcatgatcatagctcactagccctgaactcctgtgctcaagtaatcctcccgcctcggcctcccaaagtgctaggattataggcatgagctactttacccagcctgttttttcctgtgcaaataaatgcacatgtatttagatcagtttcatttttattgttaacagcattttccaccagatgcttatggttgacaactctacatcaagtgttgctgtaggctaggaatcaacaaaactttttgtataaaag

SEQ ID NO: 96446 - DNA, 743 bp, Homo sapiens
agtggctgggtggagggcaggaggacacccggggcctgacctgtgcacagcaggaccttgctatcccaccagaccggagtacacaggctgcatgtgaaggaagaggctgatctttgggctttccaaaagctgcagttctgggacctgggggaaaattggagtgcctggcttccaaacaggcataatggctctctgcaagaccaagtatgtacaaacatcccttgagcagccctgcaagcctgatgcttcaccaatgggcacccgggcttcataactgctgaaaatcatggtgttgattatcagcacagtgacggtgccaggtgctgcggaatcagcttggattttgattttgcttcctttatgtgaagccaggagagagcttagcgcccagtactccgtgccccacccccaccacatcgcagcctcccacagtcaccaggaaaagtgggggctttcagcggcagccagaaggaattcagaaacatcacatttcatttcgggaagaattggatcagcaccagtttggtgttgaggccatgagattgtggcatttttatcccaaatttatcctcccttggtctctctcagtgtgtgtgtctgtaggaagtcatcgtgtagcattatgctatgaagaaagcatcccacacttattcaattgcatcgtcccacattctggatcgggagacacagactcaagtcaacctgcagctgcctaattttgcagggaagcagccatcctgatg

SEQ ID NO: 96447 - DNA, 546 bp, Homo sapiens
attagacaaacaccaaaaattaacaaatatagaggcaaaatctactctctaataaagagaaataaaaactaagacattaacatgactgtgagtcatttggagaagaggataaaataggatgatttctaaataatagtaatctactaaacaaggtcactaggaaaatcctacaacatgaattaaactaataaggttagatacatgagcagggaattaaaggaaattcaattttaaaatgtgtaaactaaagcatcaatgacataagctatgaaataaactattagactgcagtgaaaaacctgaaagcagaaagagacttgggctgagggtggaatgggaaagcaaatgaagtgcaagttagaatatggcctaacacatttaaaagagattccaattacttcctccatttggtgattattactaggcatctgccatagtaggacactgtctgggctctggaatttttagtaaaccatctctcccgcttaaagaagaggcaacactctacctgggagcaggcaggggcatttacctgactctgcctga

SEQ ID NO: 96448 - DNA, 481 bp, Homo sapiens
caaatttccctggggggcaaaatcatccccatttgagaaccactgatctgcacgaactagaaaagaggtaccactaaaagtatacaggtagcccttcctctctggatgtaatacagccccctgccactgccatcatcacacaaaaacgcgatgagtatgatgtagcaacaacaaagtcgagcttaggaattgttaaaatgattactcaagaagtccatgtgtccatctgggagttagcttgggagcctttgccagtctctgaaggagattatgtttggaggactccatgcaatgatgggaaaagcttgttagacatccaggaccctcttctcccctgactgtatccagagtagtcccacttagagccaaaagaaggaactggaacagcacgttagatcagcaatacagcttcccactttggcctcccttgattacttctctttcctttcctttttatagttccacccggacctcaatttaa

SEQ ID NO: 96449 - DNA, 526 bp, Homo sapiens
cctgtgagatcacgcaggttggagctggccgctctgagccatcagggcagtgtggcgtccggcagcagatgtctgtgactgggcagtgcagggactcagatgggagaggtagccacaacatgggcagtctgaggtcagcagcagaatcagaatggtcagaaacagatagcacatgggacggcactcaatattcctccccaaggaacagctgcctgaaaatataattatctggtggtgagagaggcgtgtcaagggccaccagccctgagtctaaaggctctgagtctgcagggagagtaccatttctgagatgatctcaaagctcaacagagggtgcaagtcccaagggcttagatggttccattctaggggtggaaaacaggcagtggccatcccaactgctttgccaccctttctgcctaaggcaagcctcctttctgcagggcttcagttcctcgtaggaagtcccaacaggctgagcagagccaagcatgctttggtcatgtacagtttgtgcacagataga

SEQ ID NO: 96450 - DNA, 423 bp, Homo sapiens
ttcaggcatgcaaatccccagtttcttctctatgtggtttatatttaaggtgaacaagggagtctcatgggtcggaaagtcaccgtctgatatgatccagacctttggctgcccgtggttaatgagtaacctggtgagaaatagtggcaatgagaatgccatatgagcttaataaaaagtctggggtgatacacccaaggatttgcttctaattgcatttaccagacagggcagtgttgagtgcagacaactttaaaaggggcaattacccagcctgctaaacctgctataggtaaaggagtgtgctgggcaaggtgccagaacattgtataaaatgatcattatagattaaagaaacacaggcatacctagggccgtgggcatttgatacatcagatctaaaagaataatacatatgcttca

SEQ ID NO: 96451 - DNA, 806 bp, Homo sapiens
agcagcccgtcaccttgcaacggatggtgtagggcttgccgatcttgttcccctagtaacctctgcgcatggggacaatggagagctaggccaggatgatggccctgtggatggcagtggccacctccttggagcacttaacacccagaccgacgtgaccgttgtagcccgcaatggccacaaacgccttgaacctggttcgctggccggctccggtctgcttctgcaccggcataatcttcaaaacctaggcctcgagagaggccccccaggaaaaaatcaatgatctcagattccgtgatgggcagggagaagagacagatctcctccagggaagtgatcttcatgtgcttgaccaggcagcccagcttgctgacgggcatccactccttatccttggccttgcctccgcgagctccgtggcttcggccccagcctggtccacggcagtgaccccggcctcggatgccactgccgaaacctccacggaagccaccatggttccccatcccagggccccggggcctccgggactccccccgcaacccaatgccggctgcgccggcgtcatccgccatttggtgttttctcggagaagaagctacatgtggaatatattaacgcaacaaattgtgcgtacttgctagacattaggcatgatagcaagtgctagggttacaaagtattgcttttctggggaacccatggttgttggggagaaaccagaagatcagtcatcacagtgcggcaagatcagacttgtggtttgttcaggttctgggagccgtcactgcagtgagcaatgg

SEQ ID NO: 96452 - DNA, 715 bp, Homo sapiens
gttatgatggatgtcaagttccgagacgttattgttgtcaaagctggagaggtccttaagataaatgcagacattgcagggcgacctctgccagtaatttcctgggccaaggatggtatagaaattgaagaaagagcaagaacagaaatcatctcaacagacaatcatactttgttaacagttaaagactgtataagacgagacactgggcaatatgtactaacactgaagaatgttgccggcactcggtctgtggccgttaattgcaaagtacttgataagcctggtccaccagcaggaccacttgaaataaatggcctcactgctgagaaatgctctctttcctggggacgtccccaagaagatggtggtgcagatatcgactattacatcgtagaaaaacgtgaaacaagccaccttgcatggacaatatgtgaaggagagttacagatgacatcctgtaaagtaaccaagttactcaaaggcaatgaatatatatttagagtaactggtgttaataaatatggtgttggtgagcccctagagagtgtagctataaaggcactagatccatttacagttccaagtccacccacgtctttggaaattacttctgtgaccaaagaatctatgacactttgctggtcaagacccgagagtgatggaggtagtgaaatatctggatatataattgaaaggcgagagaaaaatagcc

SEQ ID NO: 96453 - DNA, 308 bp, Homo sapiens
ttttgctgaaagggcagatgcggtctctccaaaggacaacttggaactctgttgttattgacacattacaggcacattagagagcaagagcctccctggaagccccaggtcattaaataataattaattgctcactactgttttgtccttgtctccatagtatccatatggggtgaggacaaagggtgagagcagatctgtaattctggggtaatggtttggttttccatcaaactgtttcaagtagaattctttgatgttatgtgaagggaaaagcttctgtgctcaaaaaatctggaataaacaaa

SEQ ID NO: 96454 - DNA, 394 bp, Homo sapiens
acaggcgtgagcccctgcgcccagcatgaattttttaaatctaattaatctttaaggagaatgaggttttctttttaaaatgctgtttagagattctaaaatctctgcaggtacagttgatcattatttttattcttgaagatagatcctaactctccccattactcctctgctgggttatatgtgataaggttttcccacttgatacgaaactttcaatgcttctattactctacagatcaaataaaatttctgactagaatcatttcagaatctgtgttttaggagttggtttttaatttttaagattttttcctatcatgcttgtttcctaatgagttgaattttttaaagggaaagttcaagatatgaagataaaagggatagtgtgctg

SEQ ID NO: 96455 - DNA, 2034 bp, Homo sapiens
  misc_feature (226)..(226): n is a, c, g, or t
  misc_feature (989)..(989): n is a, c, g, or t
tttggttaattatttttatataatttcttgaactataatcttttgaagtggatttaaatgttacagacgtgttatgaggttttagccttaatcatctcatctatgccccccacaaccccccaccagtgctagataactttaaacaaacagcttactagttccctgatgagaaccaataggtcatgtagtaggaaccaaaagaaattggggatcatcgtttttactntcttttgaagagtgaaataaaagaattagatttttttttaatggaagaggactttaatatttattccctctaatcttttgtttttattgctaagaaaaaatcttgtaatccatacttcctgatactcagtttttttagtgttaaaacccatttgcctatgcaattataagtaaataattgaattattggcattcttaatatctcttcacttaaaagtgttaagagtgttgtcaacttgttagcaccaactttttgtataggtctttatcttatagtgatctgaaaccataattataattggctgtttcagtataggaagaaacacacacacactcatatatatatatcttcctcataatttaaaaaaccgttttgaaataattggaatagttgtaaaagtagagggagtaataattaaaaagagaagtcttcatttttttttccttgtcaaccaaacacagacatttttacctatatcacacagcaagcccttacacattgctggcaagtgttaaagtattcaataatttcaaatcgaaacagagtcttagatcagttacatctttttttttttttttttttttgagacggagtctcgctctgtcacccaggctggagtgcagtggcaccatcttggctcactgcaagctccacctcccaggttcatgccattctcctgcctcagcctcccgagtagctgggactacaggtgctcgccaccacacccggctaatttttttgtatttttttagtagaggcaggntttcaccgtgttagccaggatggctaactgacctcgtgatccatccgcctcagcctcccaaagtgctgggattacaggcgtgagccactgcgcctggcctagttacatctttttagtcttgattcagagttgtggctattcaggcatctaatctgaagaaaaaatatttgagctcagcatcgtctaatcataatagttttttttaaatttgctaattattttatttaaagtatatttaagttaaaaagcattaagttcaaacgtgcatgcttatattttaaactgttttccattcatgacatgccaaacttttcctccccagctaactttgcctttctcattaacagaattatgttttaatggttttcattgtcacttgatgctgtggccaaggaattgaaacttactttaaatgataattaagtcaaatacaaatacgttttgaattgttatactgctttttattaccacaggcactctagagctgagtttatgttgtgctcagtaggctagtctctttttctctactaagttaatgaatggtggcctggacttcagatggctagacagttatgtgcagtatctggagggtgtgatgaagcccagaaatattcccagtccttgaatttcgctagttggtaaaatgcgagctccgtttacccttgctaaggctgcctctgcagggtctctccctttataccttcatacccagtcccccaccaagatgaatgctggctggggagcagggctgcctccaggtgaaagtgtcaccagctctggtggctttggactccaggagccacaattgtgtgtaggcactaggcttctgttgggtgtttggatggtgcatttatatttacccacggtaaatataaatttacctttataaatttggtcaagcttcatgccttgcaaaataattggggtgactatatgaggacagaatactatatagtgagccattcaagtgccacttaagtgcagatgtttaagaagatacataaagtgatgaaaatgaatttaacttgaagaaaaaaaaaatgca

SEQ ID NO: 96456 - DNA, 198 bp, Homo sapiens
atatggcagctctgttggaaacttcaagtggaagggatgattgacaatgcaggattttggcagtcctgggtcttcttgtaaaaatattcccttataccatagcaatttcatagcaagtcctaacaggggtcagagaagaatcaagtttccagagccccggtaataaagtcagtcctgtagtgctggagattagctcct

SEQ ID NO: 96457 - DNA, 441 bp, Homo sapiens
aatattagcttatttttattggtaaaacttggctggacaacataactagccccacatttgacttacccatgcagtcacaggtagagcagctgaagaattgaagcctcctctcagagaagaagagcattctaggaagtctgcctattacatgggaagaaagaagcatattcatgagcaagcagtaggagagatcaagactcaggagccaggagtgtttggttttgatcctgccaagtgcatgccctactcaagggcaggcaagctcaagaaagggcaagaattattaactgggtgggattgagccacattaagcaggaggctttaacacattaaccctccgcaaaatagaaacagactctcttcttccacagctaaataagtcattagctcccccaggtcagagacccagaaggcaggtggaaaaaatagctgcagctgttc

SEQ ID NO: 96458 - DNA, 1365 bp, Homo sapiens
attacattctccttgatcgttcttgttattacgctgttttgtgaacctgtagaaaacaagtgctttttatcttgaaattcaaccaacggaaagaatatgcatagaataatgcattctatgtagccatgtcactgtgaataacgatttcttgcatatttagccattttgattcctgtttgatttatacttctctgttgctacgcaaaaccgatcaaagaaaagtgaacttcagttttacaatctgtatgcctaaaagcgggtactaccgtttattttactgacttgtttaaatgattcgcttttgtaagaatcagatggcattatgcttgttgtacaatgccatattggtatatgacataacaggaaacagtattgtatgatatatttataaatgctataaagaaatattgtgtttcatgcattcagaaatgattgttaaaattctcccaactggttcgacctttgcagatacccataacctatgttgagccttgcttaccagcaaagaatatttttaatgtggatatctaattctaaagtctgttccattagaagcaattggcacatctttctatactttatatacttttctccagtaatacatgtttactttaaaaattgttgcagtgaagaaaaacctttaactgagaaatatggaaaccgtcttaattttccattggctatgatggaattaatattgtattttaaaaatgcatattgatcactataattctaaaacaattttttaaataaaccagcaggttgctaaaagaaggcattttatctaaagttattttaataggtggtatagcagtaatttaaatttaagagttgcttttacagttaacaatggaatatgccttctctgctatgtctgaaaatagaagcttttattatgagcttctacaggtatttttaaatagagcaagcatgttgaatttaaaatatgaataaccccacccaacaattttcagtttattttttgctttggtcgaacttggtgtgtgttcatcacccatcagttatttgtgagggtgtttattctatatgaatattgtttcatgtttgtatgggaaaattgtagctaaacatttcattgtccccagtctgcaaaagaagcacaattctattgctttgtcttgcttatagtcattaaatcattacttttacatatattgctgttacttctgctttctttaaaaatatagtaaaggatgttttatgaagtcacaagatacatatatttttattttgacctaaatttgtacagtcccattgtaagtgttgtttctaattatagatgtaaaatgaaatttcatttgtaattggaaaaaatccaataaaaaggatattcatttagaaaat

SEQ ID NO: 96459 - DNA, 865 bp, Homo sapiens
attacattctccttgatcgttcttgttattacgctgttttgtgaacctgtagaaaacaagtgctttttatcttgaaattcaaccaacggaaagaatatgcatagaataatgcattctatgtagccatgtcactgtgaataacgatttcttgcatatttagccattttgattcctgtttgatttatacttctctgttgctacgcaaaaccgatcaaagaaaagtgaacttcagttttacaatctgtatgcctaaaagcgggtactaccgtttattttactgacttgtttaaatgattcgcttttgtaagaatcagatggcattatgcttgttgtacaatgccatattggtatatgacataacaggaaacagtattgtatgatatatttataaatgctataaagaaatattgtgtttcatgcattcagaaatgattgttaaaattctcccaactggttcgacctttgcagatacccataacctatgttgagccttgcttaccagcaaagaatatttttaatgtggatatctaattctaaagtctgttccattagaagcaattggcacatctttctatactttatatacttttctccagtaatacatgtttactttaaaaattgttgcagtgaagaaaaacctttaactgagaaatatggaaaccgtcttaattttccattggctatgatggaattaatattgtattttaaaaatgcatattgatcactataattctaaaacaattttttaaatacccccgctgtcgtaacaaggattattcaggatatgggggagagagagattatattgaagtgttcacgaaggagatttctcggttgaacactaagacggtatctaagacggtgg

SEQ ID NO: 96460 - DNA, 257 bp, Homo sapiens
gagtttggagttgggaaagtccagatgaacttccttcatttactgagttcggaagccacccatatcatcaccattcactgtctaaacaccccaaggtggacaagcacacaaacaagtggcccaggattgcctattggtttcaagggatggaatggccagatttttaaagtaaacactctacttgaacctaaagtgctttcagatgactgcaagattcaagatggcagctggcataaggcaacatttctttttcacac

SEQ ID NO: 96461 - DNA, 323 bp, Homo sapiens
ctgcaaaagtccctgaaaaatgccactttactcaagtttattagagaatgaaggattcttacatagaattagaggttttaaaaggacgtttaagggagatggaaggtagaatatgtcccagggttaatatggcacaaacttataaaaagccttaaagtttagcataagctgagctgacagcaaatgccacaccaccaataacaacaaaactcactctttataacatgtataggaagaaattcaccactactctaatattaaaggtaaaatagaaagcagaactatgactcctggcttgttgcatcttctccttgaatggacat

SEQ ID NO: 96462 - DNA, 477 bp, Homo sapiens
cacctcggcctcccaaagtgctaggattataggcaggagccacagcgcctaacctaattttttaaaaaagaaaaaaagatcaagaccagcctcagcaacatagcaagaactcacctcttaaaaaaaaaagcccccaaaaaaagttaattagctggctccaggtacagtggcccacgctgcaatcccagcgctttgggaggccgaggcaggaggatcacatgagcccagcagttcatgaccagccctgagaaattctgtctctacaaaaaaaatagtaataattgtttaaaaaataaattagctaggtgcactggcacatacctgtagtcccagccacctgagaggctgaggcaggaggatccaggaggatcccttgggcccaggagtgcaaggatgcagtgaattatgatggcactcctgcattccagcctggctgacagagcaagacctcatctttcataaaataaattaaaaaaa

SEQ ID NO: 96463 - DNA, 980 bp, Homo sapiens
agaatccacaaataactaaatttatctagtcaacctgttccagaacaggcttccagtcatttaggttgcccaagaatgagtaaaggaaaaggaaattcaattttccaagaccttgtttcccctctcctctttaatttcttgttcggttagcaacagtatatccattccctcgctcctttgtgaaaagtaaattcctgaatgttaactaaaccaagtgtttctaaattgggtaagagtttgaagacttaaggcagcagaatgggagagacttaaaacgttatgtctgagaattaggcattaaaggaggcctagtatttgggcgggggttgtgaggagcacatactgaacctttggacctgttgagtgagttcatgtgcctctgaactctctgactggatatgaccagtaaacttggataattagatcctggagtttaggggagagggctagagatagagatgatggatatcagcatatttttaaaacagaaaatagttaagatcacccaagacaatctggaatcgttagaagggagtaaggaaggcattattgggaaactttccagcttcaattctcatattttttctaatctcctggttgagtctttggagttgctgttctctctatgcaaaacccctcccttgaccctctctccctcactctattttttaatttgtcacctccttctcctgttctaggtctcagtttagatagcacctttctctagaagttcatagcactgtgtattcccccctttattgttcttatcacataatttttgatggtttggacactagttgttattcctcactaaattttatgttttatgaactcaggggtaagggcaccagctagcacaatgaatgcacaatacttgtcagagtgaatgcatttaagttccaagaaccaaggaaaggcggtatttcaagaagagaagtatcaaatcttccagattagtcaaataaactccaaaaaaaaaa

SEQ ID NO: 96464 - DNA, 136 bp, Homo sapiens
tccgaggggaagctggtctcccggccccgcgccctcctgcatggcctccgcggccaccgcgcgctgagcctgtgcccgagccctgcgcagtcccccaggtctgcatcacccccggggcccgcgccccagcaccccg

SEQ ID NO: 96465 - DNA, 421 bp, Homo sapiens
acttcatgttgtgggaggcagaataaaggtctcccaagatgttcacatcctaatctcaggaacctgtgaacatataaccttgtgtggcaaaatgaactttgtagatataattaaggttatagaccttaaaataggtagattagcctagcttatccaagtgtgtccaatctaatcaccaaagttcttaaaagcagagaactttctctggctggagtcagacagatgcaacaaaagagaaaagcagaagagatgtggctggaagggaagtcagaagagacctgaggtgaaagaaggactccaggctgggtgcaatggttcatgcctgcctggaatcccagcactttgggaggctgaggtgggaggatggcttggggccaggagtttgagaccagcctgggcaatatagcaaggccccatctct

SEQ ID NO: 96466 - DNA, 2168 bp, Homo sapiens
  misc_feature (1456)..(1456): n is a, c, g, or t
  misc_feature (1555)..(1555): n is a, c, g, or t
  misc_feature (1867)..(1867): n is a, c, g, or t
  misc_feature (2051)..(2051): n is a, c, g, or t
  misc_feature (2167)..(2168): n is a, c, g, or t
cctagaatgggggtggggtgggctggacagaagagaggaggagaaggaggtgactgaggggactgcagctgggtgggcggtaaccgaggggaggggaactggtggcgtccccatctcgcggggtccggaacggcgacgcgcccgcgcccagctgattggagcccttcaggcctcccgcgcccgaccggcagcccaatcctataaagcttcctctaagctgggccctccgcaaacgggatccagagaggctcgcgccttgcttgctaaggaaccatgaccggccgggactcgctttccgacgggcgcactagcagcagggcgctggtgcctggcggttcccctaggggctcgcgcccccggggcttcgccatcacggacctgctgggcttggaggccgagctgccggcgcccgctggcccaggacagggatctggctgcgagggtccggcagtcgcgccgtgcccgggcccggggcttgacggctccagcctggcgcgtggggccctaccgctgggactcggcctcctctgtggcttcggcacgcagccgccggcggccgctcgagcaccctgcctgctcctagcggacgtgccgttcctgccgcccaggggccccgagcccgctgccccgctggctcccagccgtccgccgcctgcgctcggccgccagaagcgcagcgacagcgtctccacgtccgatgaggacagccagtctgaagacaggaatgacctaaaggcatcccccaccttgggcaagaggaagaagcggcggcacaggacagttttcactgctcaccagctggaagagttggagaaggcattcagcgaggcccactaccctgatgtgtatgcccgagaaatgctggctgtgaaaactgagctccccgaagaccggatacaggtctggtttcaaaaccgcagggccaaatggcgcaagcgggagaagcgctggggcggcagcagcgtgatggccgagtacgggctgtacggggccatggtgcgccactgcatcccgctgccagactccgtgctcaactccgccgagggcggcctgctgggctcctgcgcgccctggctcctggggatgcataaaaaatccatggggatgataaggaagccaggaagtgaagataagttggcaggactctggggctctgaccacttcaaagaaggttctagccagagtgagtcaggatcacagagaggctcagataaagtgagccctgagaatggcttggaagatgtggctattgacctctccagctctgcccggcaggagaccaagaaagtgcaccctggggctggtgctcaaggaggctccaactccacggcactggaggggccccagccagggaaggtgggagccacatgagacccacaggtcccactgtcaaaggctgaaaatgtgcatattcctcactggcattttccaaaagacaaaaattgtccaagacatntactctcagtttgattttcttctgacaatgtcaagataaaatgcaatgccacttgctttaagaggacagatgagtgacctagggaaaattctatttcantctagaatggaaacggttccttaatggcactttaaccagttaacttggtgcaaaacttttgattctcttttgtagcttgagcagggaggatccgaagttcaaaaatgatttcactgctgggcatcatttgagatgtgtggttcaatgtactgtatagatgaataggttaggtctgatgtcctcattctcaattaggaaatataaaattgtttaatatccagaagaatctgatatcatcatagtgaagactccatacagacacatgaatgaattatattgtctttaccttgaacttggccttggatatttcanttttcttgttagggagtaattttgtgttttcttgagtgtcacttgataggctatgcatattggaattcaaagaaacccatactctagtcgtttctgcatttcctttaaaaatagcatgggatcatatttaaacaattgttggatagctggaaacagtgtttttaggtcagaccaggcttttggnctttcaaaatttgtgattgaaagcactttagtgacttggattttgtaaatctttcctttcctgcgtttcctttgccatttatttattctttaaaaataaacattttgtggtgtgtnn

SEQ ID NO: 96467 - DNA, 1167 bp, Homo sapiens
  misc_feature (1166)..(1166): n is a, c, g, or t
cctagaatgggggtggggtgggctggacagaagagaggaggagaaggaggtgactgaggggactgcagctgggtgggcggtaaccgaggggaggggaactggtggcgtccccatctcgcggggtccggaacggcgacgcgcccgcgcccagctgattggagcccttcaggcctcccgcgcccgaccggcagcccaatcctataaagcttcctctaagctgggccctccgcaaacgggatccagagaggctcgcgccttgcttgctaaggaaccatgaccggccgggactcgctttccgacgggcgcactagcagcagggcgctggtgcctggcggttcccctaggggctcgcgcccccggggcttcgccatcacggacctgctgggcttggaggccgagctgccggcgcccgctggcccaggacagggatctggctgcgagggtccggcagtcgcgccgtgcccgggcccggggcttgacggctccagcctggcgcgtggggccctaccgctgggactcggcctcctctgtggcttcggcacgcagccgccggcggccgctcgagcaccctgcctgctcctagcggacgtgccgttcctgccgcccaggggccccgagcccgctgccccgctggctcccagccgtccgccgcctgcgctcggccgccagaagcgcagcgacagcgtctccacgtccgatgaggacagccagtctgaagacaggaatgacctaaaggcatcccccaccttgggcaagaggaagaagcggcggcacaggacagttttcactgctcaccagctggaagagttggagaaggcattcagcgaggcccactaccctgatgtgtatgcccgagaaatgctggctgtgaaaactgagctccccgaagaccggatacaggtgtctggggtcccttttctccgctccaaagataccacagagaacgtgtcattcccacattcagtgagccaatcagcagtcccttctctatagccaacacgctccctttgcatagaaactgagggtcccttagctgaaggcaccacaagagcttgcccctatgaccctcatgccttttttcattttattattatttagtatcaaatcattctttaaaatcacatgataatgtgtgctgcaactagaaactataaagatatgtcaang

SEQ ID NO: 96468 - DNA, 1668 bp, Homo sapiens
cctagaatgggggtggggtgggctggacagaagagaggaggagaaggaggtgactgaggggactgcagctgggtgggcggtaaccgaggggaggggaactggtggcgtccccatctcgcggggtccggaacggcgacgcgcccgcgcccagctgattggagcccttcaggcctcccgcgcccgaccggcagcccaatcctataaagcttcctctaagctgggccctccgcaaacgggatccagagaggctcgcgccttgcttgctaaggaaccatgaccggccgggactcgctttccgacgggcgcactagcagcagggcgctggtgcctggcggttcccctaggggctcgcgcccccggggcttcgccatcacggacctgctgggcttggaggccgagctgccggcgcccgctggcccaggacagggatctggctgcgagggtccggcagtcgcgccgtgcccgggcccggggcttgacggctccagcctggcgcgtggggccctaccgctgggactcggcctcctctgtggcttcggcacgcagccgccggcggccgctcgagcaccctgcctgctcctagcggacgtgccgttcctgccgcccaggggccccgagcccgctgccccgctggctcccagccgtccgccgcctgcgctcggccgccagaagcgcagcgacagcgtctccacgtccgatgaggacagccagtctgaagacaggaatgacctaaaggcatcccccaccttgggcaagaggaagaagcggcggcacaggacagttttcactgctcaccagctggaagagttggagaaggcattcagcgaggcccactaccctgatgtgtatgcccgagaaatgctggctgtgaaaactgagctccccgaagaccggatacaggtctggtttcaaaaccgcagggccaaatggcgcaagcgggagaagcgctggggcggcagcagcgtgatggccgagtacgggctgtacggggccatggtgcgccactgcatcccgctgccagactccgtgctcaactccgccgagggcggcctgctgggctcctgcgcgccctggctcctggagggtgagacattgggctgcagagaaatgaagtgaacctgctaagccgattgtcaaatggatgagaaactcagagccaaggatcgggaaaacacccttaaagaacgagtgcaaacttctgctcctggaggctcccgttcactggactttgcaggagacacacaggctccccagaccccgtggtggtgcctgatgaccttcagctgaaccctgtaatgctgctaaagtctgcccctctggagaagtgctcaggtagcattgttctgcctcaggaagcatgccgattttcctgtgtcatccttgatgatcactgctaccagacttgccccctgcagggcaccccatgtgcaaggaattcaacaacctaggagttgaaagcattggtctcccaagttcagtgtgttcttttccgtatctattaccagctgatgagaataaacctgcagtcatgacagctaggtcctagtgacaggtgcagaaagctgctcttacagaaactcccctccttattaagaggctttgtctatcactcggaactgcttctactcaagattatctgttgaaagggaactgtccataccagggcat

SEQ ID NO: 96469 - DNA, 353 bp, Homo sapiens
tcagctaagttcactaagccacagtctctcgctctctctcagtcccacctttccctctctctttctatctacatatatgcaagagttgttgtgaaatactctccctgttttccagtgcaaacttctgctcctggaggctcccgttcactggactttgcaggagacacacaggctccccagaccccgtggtggtgcctgatgaccttcagctgaaccctgtaatgctgctaaagtctgcccctctggagaagtgctcaggtagcattgttctgcctcaggaagcatgccgattttcctgtgtcatccttgatgatcactgctaccagacttgccccctgcagggcaccccatgt

SEQ ID NO: 96470 - DNA, 377 bp, Homo sapiens
ttacaggcgtgagacatcacgcccagcctagaatactcatattattaacattcccataaatattatttagagaaggtttagcatcaattatcccttatttgaaaatgctttctataaatttaatatataaaataaggtggattttccgttcagcttctgtttctcaagaggattactgagttgttggtgtagcccattcataaataggaccaaaaaagtatagtcttatgtatgttgaaaaaggtccttaggtaattccagtacttccagcagaaaatcattgatttagttttaagttctacctattacaataagagttctccatccttgttacatgttagtagtgtcagggaagacttaaaaattaccaatgcctg

SEQ ID NO: 96471 - DNA, 690 bp, Homo sapiens
agctgggactacaggtgcacgccaccacgcccagctaattttttttttgtattttagtagagacggggtttcaccttgtttctcaggctggtctcgaactcttgagctcaggcaatccacctgactcagcctcccaaagtactaggattacaggcatgagccaccgcgcccggcctattggttggttttgttatatgtaaagatgactgcttttgtgtaggttaaggggtagaaggaaaatgaaattgattatgtctgttgatgcctttgatatgtagctgtattaataaaagcaagctaatgataatgtgtctggggatttgaggagcatgtacccattgaaactattgattcttaaatattgtgttttatgtatacatgtagtttatatgttcttttgttctttacattagtatgtctgcttaaccagttgtctacttaaattgctattaaacccaggaaattttttttctatagaaagtgagaagaatgcaacacaactaaaagtaaatatttgtcagtcagtagttgtccttgaggtaacttattgccacagggaatcctttcgtttgtccttgaagagagaggaaagactgcatagtttccccacatccagagatttgccagactctcttgtatttaagctgtggcagtctgttgtggattgagaccttgatcttggcaatgggc

SEQ ID NO: 96472 - DNA, 432 bp, Homo sapiens
taccagatctggttaattgtgtgttcaattatatgtatagtgagaatatgcttgttccattttcacctagtttaggaaatttaatataaattaagggactgtaattccagaagtagtagaagtgctgcaaacagatattgtaagcagacattttagaaggggattccactttaaattggattgcttgagcccaggagttcgagacccgcctgggcaacgtggtgagatcctatctccacaaaaaatacaagattagcccgacgtgatggtgcatgcctgtggtcctagctgcctgggaggctgaggtgaggggatcgcttgggcccaggaggtcaaggctgcagtgaactgtgactccagcctggggtgatagagggaaaccctgtctccaaaaacaaacaaacaaagtcgtagcagagtactttgattgta

SEQ ID NO: 96473 - DNA, 683 bp, Homo sapiens
acagactcttaattccttctggaatactgagagtgccgggaaatgacagcttaatgttcagggtacgtcttagtttgtcttggatcttgtgacagggacagctgcattagtcttggagtgaaagtgtatctgagtatgttgggccacatttgcagtagtttgttctgaactccagagctattgaccaagcccgtcctgccttctgaggtatggaagacactgaggcctcctgacccacggcacagcattctctgcttccagcgcgtctgccttgggccatcaccccagagagtttgatcaaggtctgtcttaccacaccccctcccaaattcttgcagctcccaaagctgctggaggcagcacctgagcctgtctctccgctgagcttcttcaccccaaggactgcctgctggctgcccacttctcatcaggcaaggccacagtgccatctgctggctattgggagccatgctggtcaggttgggagggcacaggagcatgctaggctgacaaggagcactgagctctccccacctcagctcaggaataacagaagtggcctttcccttaagcccccactgaccagagcccctcattcaggcttcagtcaccagagccccctgctcaagtcctttagttaccatggcctctaggtcagtctcctcaggaatcagggcccctcg

SEQ ID NO: 96474 - DNA, 153 bp, Homo sapiens
agcaaccttataaggtgatagatgcagaaacaggcccaaagagtaaaaataatttgttcagagttttccagccaagtggcgaaggtgagattcttacctgggtttgtctgaaaccaattttcactatctttttcagttatgatacactgccta

SEQ ID NO: 96475 - DNA, 368 bp, Homo sapiens
tccagacacgcatcagcccaatcaggggagataaaactgtgggcactgaaacgttcccagttttcttttccaaagagtaaaaatcaagaccttaaaaatgcttaacaaaagttaaccacatgttctcacccacgtatggaagcttaaaaaaaaagtgatctcatagaagtaaaaagaagaacagaggatactagaggctgggaagggtggggggaaactggggatagggagaggttggttgaaggatacaaaattatagctaggtaggaggaacaagttctaatgttctacgccactgtaggatgaccatagctactaataatatacagtttcacatagctaggaggaggatgttaaatgttcccggc

SEQ ID NO: 96476 - DNA, 462 bp, Homo sapiens
ctgcctcctgggttcaagtgattctcctgcctcagcctcccgagtaactgggattacaggtgcccgtcaccactcccggctaatttttgtatttttagtagagatagggtttcaccaccttgaccaggctggtcttggacctctgagctcaagtgatccaccagccttggcctcccaaagtgctgggattataggcatgaaccaccatgtctggccacatatttctatttgctgggaaggatccagtagagaggagctgcgtctcttggtggcctcggcttctaccctagaaagacgtccttgtaccatgcaaaagactcctcccttccctccttaccccatctcatttctggcatcagctcagaggccagtttgggggggctcctccagttgcccatctgcagacctgtggaccagtgatgggatgggcaggggacccctgcaggtaattccgctcagaaa

SEQ ID NO: 96477 - DNA, 299 bp, Homo sapiens
ggcttttcagtgtaagatggagtattatttttccaattgaggaggtcagcagaggtgaaaggttgatacacaaaggcacgcctttccaccatgtgtctgtcctcatctaccccagtatattgcttctctctcaggggcatttggattccagtcttgggccataagcaagctgtcaacggagaagtttctcctgtggcttcacttcctcttctgtctactctgtgtgatctaggggtgtggttatctggtggaggtgtaggtgctgtggcctcaggagtggggagcccttccttttgata

SEQ ID NO: 96478 - DNA, 446 bp, Homo sapiens
tcgagtaagtctgtcggtgccatctttccaacagcgtgtgctcactcatgtctttgtgtcacattttggtaattcattccacctttcaaactttttcattattattatatctgttatgtggtgggtgatcagtgatctttgatgtcactgttacatttgtttgggggtacacaaatcatgcttatatacgatggcacacttaataattgtgtgtgttctgactgctccactgactggctcttctctctcatctctccctctcctcaggattccctattctatgagacataaaaatattaaaactaggccaattagtacccctgcaatggcttctaggcattcaagtgaaaggaagagtcacccatctctcactttaaatcaaaagctagaaacgatgaagcttagtgagaaaggcacgtcgaaaagcaagataggccaaaagctag

SEQ ID NO: 96479 - DNA, 522 bp, Homo sapiens
aatttttgtaattttaatagagacagggtttcgccgtgttggccaggttggtctcgaactcctgacctcaaatgatctgcccacctcggcctcccaaagtactgggattacagacaggagctaccgcgcctggccttgaaattttgatttgaaaaatatttcaggaatatttttctttccatgtgaagttgagaaccacacttgaattgctccaatcatcctcacaactcaacatggctgcagggcttctggggctctgccaaatgagatggtgcccatctgatcagagtctgccttcgtatctgtcccatcggagtctgccttggtactcatcttatcggagtctgccttggtgcctccaagtacacagttaggctgatgtggcatgcacatccgaaaaaataactctagatgtgcatttcgacacatcagcaaatgcagatggtatgggctgcagatggtatgggccacagctggagagagccgtcttcactgcggtatagctgggctgcacccaacgtg

SEQ ID NO: 96480 - DNA, 483 bp, Homo sapiens
attttcttggcgtgattcttctctcttattaagagctttaatgtttaggattcttgttttgcactattacagaatcaaggtagcgaaaagggactagtgagctatttctatgtatcaggaggaaggttctgtatcccttttattacaaacacgtttttcttttattttctcttcattttctgtccattgaatggtgtatagaacttattatgctagctgatatcacaatgctgggaaaattaatttacttaaataaatagcatcaatttttaagctattttccagatagcatcctgtctggtttcgcagatagttcattagttggcaagtataaacagtcacaaactgctttagttgatagtttaaatttaaaaataaaatccttgtcctgtttatactgttttttgtgtcacaacattatgaaaacaggatttcagagttttgaaaaaaaaagtcgacgcggccgcgaatttagtagtagta

SEQ ID NO: 96481 - DNA, 600 bp, Homo sapiens
atcctaccatttccagcgtgggcctctccagaaagatactcccctaaacaaggacagaggccccaatagcaatcctaccaaaatttcaggggggcccaggttaggctctgaagtgagacaccctaggacagtgggggtcagggatccacatttattgagctcttctttatgggcacggcactgcacaaaacactttccataggagcttatttaagtcctcataaaatcatagaaaatcagtatctatcactttccaaactcaggaaccaaatagaattggctagtgagggaagcttgtatttatcccctttgtgtagcacagaaaacagaggggttagtaacttggttaggtttgcacagcacctcccaacaggacagggtccccttctctgtacataggaaaatccttcttcctcatgaggtctggcaccaagccccccgcgaaaattcggccagggttctcgctcttgtcgtgtctgttcaaaccggcacggtctgatccggaaatatggcctcaatatgtgccgccagtgtttccgtcagtacgcgaaggatatcggtttcattaagttggactaaatgctcttccttcagaggatt

SEQ ID NO: 96482 - DNA, 425 bp, Homo sapiens
ttctggcggctctgaggggagaatcatttctttgccttttccttttctagagatgacctgcattgcttggctgtggccccttccttgtatatcccatccacttggttctgttgtcacatagtcttcttctctgttggatcgtccctctaataaggacccttgtaaatacattgggcccacctagacagccccgaatgagctccccataccgtgagctgtaatttaatcacatctgcaaagtcttttctgccatataaggtagcattcataggttatggaattaggacatggacatcttggggtcattatgctccctatcatacctggaaatctgatttttaaatttccagtggaaaaatggatctatctgtcttcacctttcctgcctaagctatcaacttgaagctatctacttcgtcgtcctg

SEQ ID NO: 96483 - DNA, 5160 bp, Homo sapiens
  misc_feature (2410)..(2410): n is a, c, g, or t
  misc_feature (2435)..(2435): n is a, c, g, or t
  misc_feature (3405)..(3405): n is a, c, g, or t
  misc_feature (3443)..(3443): n is a, c, g, or t
  misc_feature (5059)..(5059): n is a, c, g, or t
gctggcggcgcccggctccgtcctgcccgcggccggcccccgcgtctgctccctccccgcccgggcccctgtcggccgccgccagtccccgccccgactgtgaatgaaaggcgggcgccgccgagggctggctgggaacgccgcagcgacgccggcctctcgagaggcgcgcgccccgccgagatgtacggtgtgtgtggctgctgtggtgccctacgccccaggtacaaaaggctggttgacaacatcttccctgaggatcccgaggatggtctggtgaagaccaacatggagaagctgaccttctatgccctctcagctccagaaaaacttgatcgtattggcgcctacctctctgagaggctcatccgtgacgtgggtcgccatcgatatgggtacgtgtgcattgctatggaggctttggaccagctgctcatggcctgccactgccagagcatcaacctcttcgtggagagcttcctcaagatggtggccaagctgctggagtcagagaaacccaacctgcagatcctcggcaccaactcgtttgtgaagtttgccaacatcgaggaggacaccccgtcctatcaccggagctatgacttctttgtgtcccgattcagtgaaatgtgccactcgagccatgatgacttagaaatcaagaccaaaattcgaatgtcaggcatcaaaggcctgcaaggggtggtgaggaagacggtgaatgatgaactgcaggccaatatctgggacccacagcacatggataagatcgttccatcactgcttttcaatctacagcatgtagaggaggcagagagccggtctccctcacccctccaagcacctgagaaggagaaagagagccccgcggagctggctgagaggtgtcttcgggagctgctgggccgggctgcctttggcaacatcaaaaacgccatcaagcctgttctcatccatctggataaccattctctttgggaacccaaggtgtttgccatccgttgctttaaaatcatcatgtactcaattcagccgcagcactcacacctggtcatccagcagctcctgggccacctggacgccaacagccgcagcgctgcgacggtgcgcgcgggcatcgtggaagtcttgtcggaagccgcggtcatcgctgccaccggctctgtggggcccacagtactggagatgttcaacacgctgctgaggcagctgcggctcagcatcgactacgcgctgaccgggagctacgacggggcggtcagcctcggcaccaagatcatcaaggagcacgaggagcgcatgttccaggaggccgtcatcaagaccgtgggctcctttgccagcacgctgcccacctaccagcgctccgaggtgatcctcttcatcatgagcaaggtcccgcggccatccctgcaccaggcggtggacacaggcaggacgggggagaataggaaccgtctgacccagattatgctgctaaaatccctcctgcaggtatccacaggtttccagtgcaacaacatgatgtcagccctgcctagcaacttcctggaccgccttctctccaccgccctcatggaggatgcagaaattcgactctttgttctagagattctcatcagtttcattgatcgtcatggcaaccgccacaagttctctaccatcagtaccctcagtgacatctctgtcctgaagctgaaagtggacaagtgctctcgacaggacaccgtcttcatgaagaagcactcccagcagctctacagacacatctacctgagctgcaaggaggaaacaaacgtgcagaaacactacgaggcgctctatggcttgctggccctcatcagcatcgagctggctaacgaggaggtggtggtggacctcatccgtctggtgctggctgttcaggacgtggcccaagtcaatgaggagaacttgcctgtctacaaccgctgtgccctctatgctctgggcgcagcctacctgaacctcatcagtcagctcacaacagtgcctgccttctgccagcacatccatgaggtgatagagaccaggaagaaagaggctccatacatgctccccgaggatgtgtttgtggagaggcccaggctgtctcagaatcttgatggggtggtcattgagctcctcttccgccagagcaagatcagtgaagtcctgggaggcagtggctacaactcggaccggctctgcctgccctacattcctcagctgacagatgaggatcgtttatccaagaggaggagcattggagagaccatctccctgcaggtggaggtagaatcgaggaacagtccggagaaggaggaggtgagtgtccgtgccaccgtcctggggcagccccacctcctgtagattggacgctggactccaggctcccctgcctgcatagtgngcttaaggctgcatggaaagcaagnttctcgagtaattccacacttgtactgactctccccacgtatgcgtcatagatacttcccttcggaaaaattgttagggtcctccctgctcccatgaggatatcataaaactcactcttgaaaggcctggctggggatggtggctcacacctgtgatcccaacattttggaggctgaggcaggaggactgcttgagcccaggagtttgagatgatctggggcaatataaggagaccccatctctacaaaaaataattgaaaaatcagccaggcatggtgacgtgcacctgtggtcccaggtactcaggatgctgaggtgggagaatcacctgagcctgggaggtcaaggctgctgtaagccatgatggcagcacggcacttcagcctaggtgacagagtgagacctcgtctcaaaaaattaaaaagaaaggcatgctggtcatcattccccactcacagggggaccgatatgctctgggttggaaactagaagacttaactggagagataagggtgagaacagctttcatagtgttgcttccgtatgtatcaataaagaatctttttttaaatttacactatttttaaagcaattttagttacagcaaaattgagaggaaggtacagagatcgccctttgccccctcccctcccctgacacatgcacagcctcccctcctatccatatcccccagcagagtggtgcatttcttacagttcaacctgccttaacacaacagtatcatctgaagtctgtcgtttacactggggttcgccctcagcgttgtacattctgtgggtttggacaaatgcgtaatgacatgcatcccccaccagagtaccatacagagtcatttcctgccctaaaaccccctgtgctccacctcttcatctctcccctaaccactgacagccaagatgttttttttttttttttttaatgctgactgttacagttcacaagaagtanggaggacacacatctgggtgggaccgggacagaaaganttacatggtcctcaggcatggacaggctggcattccccagcctctctgcccattagggctgatatagacatggaggacagctttgacatcaagcctttccccagatgcaatcagaggtaggagaagtctctaggggtcaggatcaagcctccccctaactgtgccctcgaccacttcatttattggggcagatctctaccccagggccctcaaagcttatccagaaccttcccacggaaggaagctctgacttgggctaattggacaagtaaaatgaggttgaacgaggcatcctccatggcccttccagctccaaggactgggaacctccaatgcgttaggcatcggggtgagttggctgctctctccccatagtggcgattctcccttcccaagaggtaagagaccctcgggaattgaggagtgaagtgactcagaagcgcaaggcgaaatgcttacacagctacagagccacctcctcactagtggcctcctgggccaccagtatcagttccttcctcccttcaagagtcagcttagcccagaggtagcttggtggcaaagcaggggtgcaggggccttcatcctgtgcccttctgccatgccacaactctctccactctcagccatcagtgccagtccagagtcccacggtggttcctagggccgtactgcccagccttgccgcaggggtgaataaatgcttgtttggtcaaatctgaatcctggtgcctggcattcccagccatgcatagtctgggctctgccatttcatttttccccacctgctctggcccgtatccactgtcccactctggtggggctgctctcgatctctcccacgctgcgctccgccatctccaggcctttgctagtgcagaatgccacatctgaaccacccttccctccacactggtgcagctgagcgcctgtgaactgtctgttctccagcgcccggcccctgttcagtttcctcataaacttctctctccctgctcttgcccagggagcatcccttctctcttgcccagagagcggcattttctttgactgttgccaccacacagttccctagcaccctgcaggtgaatatccaatgttgctcggtgctgacagtggatgaatggatggacgtacagaggataagtcctcagagcgagttaaagccgagcatagctctctcttgcatgtaattcctatgctagcaaattgtgcagtttctatagactcacctacagtcctgcatgtagttggtgctcacttaatgtttgttaaatgactttatctcatacatatacttctgtcctctcctactcaaacaaaaatgccaaacaaatcaaaaaatgcacgactcagtgaattttcataaagtgtgtatgcccacgcaaccacgcctggatgagagagtggaacactgtcatcatccaggggccctgcctctgtgccccctcccctaagggagctcccagcctgagttgcgttacttctggaactttatatcaatgaaatcattctgttctgtgtctgctgcttttgcttaagattatgtttaaatgatagagcatgaggctgggcgtggtggctcatgcctgtaatctcagcactttgggaggccnaggcaggtggatcacctgaggttaggagttcaagaccagcctgatcaacatggtgaaaccccgtctttactaaaactacaaaaaattagccgggcatggtg

SEQ ID NO: 96484 - DNA, 2521 bp, Homo sapiens
gcccaggctgtctcagaatcttgatggggtggtcattgagctcctcttccgccagagcaagatcagtgaagtcctgggaggcagtggctacaactcggaccggctctgcctgccctacattcctcagctgacagatgaggatcgtttatccaagaggaggagcattggagagaacatcttccctgaggatcccgaggatggtctggtgaagaccaacatggagaagctgaccttctatgccctctcagctccagaaaaacttgatcgtattggcgcctacctctctgagaggctcatccgtgacgtgggtcgccatcgatatgggtacgtgtgcattgctatggaggctttggaccagctgctcatggcctgccactgccagagcatcaacctcttcgtggagagcttcctcaagatggtggccaagctgctggagtcagagaaacccaacctgcagatcctcggcaccaactcgtttgtgaagtttgccaacatcgaggaggacaccccgtcctatcaccggagctatgacttctttgtgtcccgattcagtgaaatgtgccactcgagccatgatgacttagaaatcaagaccaaaattcgaatgtcaggcatcaaaggcctgcaaggggtggtgaggaagacggtgaatgatgaactgcaggccaatatctgggacccacagcacatggataagatcgttccatcactgcttttcaatctacagcatgtagaggaggcagagagccggtctccctcacccctccaagcacctgagaaggagaaagagagccccgcggagctggctgagaggtgtcttcgggagctgctgggccgggctgcctttggcaacatcaaaaacgccatcaagcctgttctcatccatctggataaccattctctttgggaacccaaggtgtttgccatccgttgctttaaaatcatcatgtactcaattcagccgcagcactcacacctggtcatccagcagctcctgggccacctggacgccaacagccgcagcgctgcgacggtgcgcgcgggcatcgtggaagtcttgtcggaagccgcggtcatcgctgccaccggctctgtggggcccacagtactggagatgttcaacacgctgctgaggcagctgcggctcagcatcgactacgcgctgaccgggagctacgacggggcggtcagcctcggcaccaagatcatcaaggagcacgaggagcgcatgttccaggaggccgtcatcaagaccgtgggctcctttgccagcacgctgcccacctaccagcgctccgaggtgatcctcttcatcatgagcaaggtcccgcggccatccctgcaccaggcggtggacacaggcaggacgggggagaataggaaccgtctgacccagattatgctgctaaaatccctcctgcaggtatccacaggtttccagtgcaacaacatgatgtcagccctgcctagcaacttcctggaccgccttctctccaccgccctcatggaggatgcagaaattcgactctttgttctagagattctcatcagtttcattgatcgtcatggcaaccgccacaagttctctaccatcagtaccctcagtgacatctctgtcctgaagctgaaagtggacaagtgctctcgacaggacaccgtcttcatgaagaagcactcccagcagctctacagacacatctacctgagctgcaaggaggaaacaaacgtgcagaaacactacgaggcgctctatggcttgctggccctcatcagcatcgagctggctaacgaggaggtggtggtggacctcatccgtctggtgctggctgttcaggacgtggcccaagtcaatgaggagaacttgcctgtctacaaccgctgtgccctctatgctctgggcgcagcctacctgaacctcatcagtcagctcacaacagtgcctgccttctgccagcacatccatgaggtgatagagaccaggaagaaagaggctccatacatgctccccgaggatgtgtttgtggagaggcccaggctgtctcagaatcttgatggggtggtcattgagctcctcttccgccagagcaagatcagtgaagtcctgggaggcagtggctacaactcggaccggctctgcctgccctacattcctcagctgacagatgaggatcgtttatccaagaggaggagcattggagagaccatctccctgcaggtggaggtagaatcgaggaacagtccggagaaggaggagcgagtgcctgccgaggagatcacctatgagacactgaagaaagccattgtggacagcgtagcagtggaggagcaggagcgtgagcggcggcggcaggtggtggagaagttccagaaggcacccttcgaggagattgctgcacactgcggggcccgggcatcgctgctccagagcaaactcaatcagatctttgaaatcaccatccgggccccaccaagcccatccgggaccttaatggtgctacggtcagcgagaaccatccatccc

SEQ ID NO: 96485 - DNA, 664 bp, Homo sapiens
ctcttctgtcctctgctcccgcagcaggggaggcctgagaagggccatggtttccaatcttattgtgcaacaggagaggcgagcgggattgggaactcatctccccagtgtgctctgcaaggccggccaagctggctccaggatgcgtggttcccatggcttgaccatggcagggggtctggggatgcccagcagtgagaagcatggtgggtcacctctctcgtgtgtttctctccttcctccctgatagtttgtgaagtttgccaacatcgaggaggacaccccgtcctatcaccggagctatgacttctttgtgtcccgattcagtgaaatgtgccactcgagccatgatgacttagaaatcaagaccaagtgagtaggggaaggcaagggtagttggttcagcttacagcagaagcaacggtgggtcctgtagataacttccaacctgccattgcgtgtctgcttttgttagtatctgtgtctgctctgatgttgccgggcaggtgggccagcacccagctccctacatgtggtttctgttttttttttttttctttttgagaccgagtttcactctgttgcccaggctagagtgcagtggcgcgatcttggctaactgcaacctccgcctcccaggttcaagtgattctcatgcctcagg

SEQ ID NO: 96486 - DNA, 411 bp, Homo sapiens
tggccctggctccaacctttcctgggcccgaccaggaggctttgctcacagtttttcccattcttattccaggtgtgtgtggctgctgtggtgccctacgccccaggtacaaaaggctggttgacaacatcttccctgaggatcccgaggtgggtcatgtctctggcaggcatcgtggctctcatggtccaggcagggcctctgacgggggcagcttggaagccaggcctcctgccgggtggggaaggcagggcctctcagggtccctgggcactgagccttcccagagaaactggaacctgggctacagccatgggcagtggtgagaggccgctagggacatgaaggatgagggcatttggatctgcagaaggcagctggaagtgcgtcttggcatgcttgtggccatca

SEQ ID NO: 96487 - DNA, 808 bp, Homo sapiens
ttcagcagtcactttaactaaaaagtctttgctatttgagattttatcttcttgtctgttaaaaaactgtttggcaccttaatttgcatgaatcgatttccagtcgctcaaatccagtttgtgcaatgacaagctggtgtggctgaaacggcagttgctcaagagcattagaacagccttcaccatgtgggtttacatggacagcacggtcagcagacagtgagacgggcgcttgtccactcgtctgacaccgtggggccataggaggcagcgactgagaaggtcagtcccattaaaaatgccctttggctcatctggaagctgtatctctggtcatgcaccatgccagccacgccagccacgccagcattatcacggcatgtgctttaaaatcatgcagacgttgttctagagtgagtgtgaacagctttcacacttgggcactgtgccggttcccatgctggctttcccacatgcacacaggtggctggcacgcagctctgcacctcttactgttgggagctcagaagcctctctctgtggtggtttttcatctcgggataattgaacccagctgggaagtaccaggaccagagaatctctgctgcataatatcaccaccccgtggcaactcacaaagcaagattttcaccgagaatcgcacatagaaataatttcacatctgcttctggaaagattttcaccgagaatcgcacatagaaagaattccacatctgcttctggagcacatttccctctaaagagaggggcagagcgacttcaccgtctgtcgtcatctggtggtgga

SEQ ID NO: 96488 - DNA, 517 bp, Homo sapiens
ctccaccaataatcaatcaccttctaaacagctgtagagtccatttccagccccactgtctccttagttagcatttctctcacctgtatgactccagcagctccctaatgggcatccctgactcttgttttacttccatgtcccccaatttattagtctttacagtcaggggtagtatgtgctctcctatgcaaaacccagtatcagtgatctactgctctcaggataaagtccaagcaccttaactggtacataaggtaacacacttattttgcaagtcaggctcatctcttactcttgttcaaccccgtacactatcttcatggagaatttctcaatttcttgactgaaccacgctatttctgggtcttctgcacatgctgttctaacaacctaggacacaacttccccatcccactcacttcatggtcggcctcatttctgctcagcttaggtatcaattctgcaaggaaaactttcctgactcctgtctgggttatgtgcccattctatgtga

SEQ ID NO: 96489 - DNA, 651 bp, Homo sapiens
tcctctgtaaagtggttattttaattcatattacaaatgatgaaattgaaacacaaggaagataatttttgccaagatattatgtggtaaggattaaccttgcttttagaaatcgtgtttttgcaacaagtctgtactgtctttaaattataggttaaggttcagaagtgtattacagcatttagataagctgatgttatttctaccaccttgaaaaaaaatgctcttgtgatttatcagcaccttccttcagtcattgctctgttgctcttggatttctagcaagagaagaaagagttatttgtactcattgtctccaatttctttcttccaatttcttcttaaatctacttaaaccaggattttgctccaaatgctccactcggattactatctaccaaatcgcaaatgacatccacactggtatttccaatgaccacttcctggtcctcatcctacttgacttgtcagcagcacttgatgaagttgattacaccctcctccttgaatcactttcttctcttagcatccagaaaaaacgaccagtcttcttaaggccttgacctcagatgtctcaagatgtcacatcagctgtacaaagcaagtcacaaaggccagcctgtatacaagtggagggcaaatagacaacac

SEQ ID NO: 96490 - DNA, 417 bp, Homo sapiens
gactttcttccttcacctacatcgggttttcccaacacgcaataaacaagtgcagggactatcctcagaacataatggtgagtacagtcacatagcaaggatggttaaagccctaagaagagatggaaccacttggactgcatggcagttggggcccaggaccaagctgtggggagctccagcattcaggggccgcagaggggacccagcaagtggaacacacagaggaggcatggcaagagacccaggcgggaagccaggaggaatgctgttcctttcatcagaggatgcagcattcaaggtaccatcttgggagcagaaaccaggcccttaccagacaccaagcctgccagcacattgatcttggatttcccagcccccagaactataagaaataaatttcttttcttcaaaatt

SEQ ID NO: 96491 - DNA, 418 bp, Homo sapiens
taattgagacaatcatatgacttttaaccatgttaacatggtaaattatatgcacagattttctaaaattaagccatctcagcatacatgggctaaaggaaacttggttatagtgtttaatctcattcatacatggttggattcagtttgctaatataaagtttttacatctacattcatgactaaaataaacctatatttattttttctcttttataacatttctatctggtgtaaatatcagagttataaaggtcttacagaatgaattgggaagtatttcctcttttcctgttctctggaaaagttcgtataaaatttagatgatctgctccttgaaattttggtaatattcatctgtaaaatgatctgagccaatgcttcccttgtgaaacaattgtttttctttttttcccac

SEQ ID NO: 96492 - DNA, 171 bp, Homo sapiens
tgccaccgccgagcgcacgggccgagccaagcctgatcccggagccggagggggactgggaccgagagaacggcgatggggggcggccccgccgcaggaggacccgggcgcgtaaccccgggggcccggcccgctccagacccagacccgcggggtgcggcaccctgagcc

SEQ ID NO: 96493 - DNA, 165 bp, Homo sapiens
tgagcacagaccactgtggaatgagacaccaaaggggctgcgctgtgtggtggtgatgagagatggagagaaacagggagagatggagagagaggcagagacagaaggagagagacagagagagacaaggagagagagagagagacagggagagacggagagaga

SEQ ID NO: 96494 - DNA, 591 bp, Homo sapiens
gagtggagaatgccaagagacccacctctgaggcctagtggctgggatacgagcacaagctttagagagtggctctcagcgtctggcctgcaaaatccagggcagttagcaaaattgagattccttatccctaagactctgatgagtggttctggatctggcctaagaatccaccttaaggtgtcccaggtgacatgacaattgcttctcaatcatgtgctgagaaatagcaaagaacctccccaccaggagcctgccaggggcagcctcatgctcagccatggctgtgcatatgcgaagtgggcgccgggggtcttggggagcttggtatcctccctccaaccccacaggacactcactaccacctggtgacagccagtcagacttgtgcttgctctgcagatgcatctccccacgagtggattctggagcctgtttacagctatggggagggtaagaagtggcccctgctcttcagagccatcatgcacagatagttgagccctaaggaaacccaaagccagctgtcccaggtactgaccctgctcccagcccaactcagcttccccaaatgaggctcctgctggccaa

SEQ ID NO: 96495 - DNA, 362 bp, Homo sapiens
atctgcctgccttggtctcccgaagtgctgggattacaggcatgaaccaccacgcccggcctgtaatcactttaaagtatagaaatcagtggcatcaagtacgtttgcagagttgcacaactattaagctagttccagaactttttcatcactccagacagaaaccctgaaccccttagcagtccctcctcactgtccccttcccccagtccctggcaaccactgctttctgtctctgtggatttgcctgttccggatattccatattaatggaatcatacaacttgtggcctattgtgtctgtctggctcctttctcgttcaacatttccaggtctatccacattgtagcccatatcagaa

SEQ ID NO: 96496 - DNA, 437 bp, Homo sapiens
tgggaaggaaattaatcttcatagagttctacttcagttctgggagctgaggtactacaagctcagcttacctctcactctccttaggaccagatttttaaccctattttactaatgagaaaattgaagcccatagaggttaagtaatttgcccaatactacatagtttatacccaacagagccagaatgaaaagccaggtctctgtacaattctcttaggttcacacctccttctctaatcaactcccaaccccacaccccataaggtcaagccaggataaccaaaccaacctcctaccaggtaccccaccttggaaatctctgcaagtcaggccacctctacatcaccactagattgtttttctcagaacccccttatttaaaatagtcagaatgttgtataggtagaagtaggtaatatgtagacttttgtgtc

SEQ ID NO: 96497 - DNA, 815 bp, Homo sapiens
agacagatctcaaaaatgggagaccacatgcaaaggaaactacgttttcacaacacatggttggagaggtcaaagaaaatgtgatgtattactttcagttttatcatcagcgggaccatctggggctagtggtggggctcgaagaaggaagaagaaaataaagaagagaatcagatccccaaagtagagagactgaattacagcaatgacctcgacttgcatttactaggatgagctgttgtgagagtaaatatgaaagctggaattcataattcattcaacctgtgtttcatccacttaccccaaaccaaaacataacaatcattgagcatccaccattcacatgtaactgtggtggagagagagatgaaaaaacacaatgcctaacctcaaggagtttacacactactcagagagataaataccatagacaaataattatactatactgtaaggctacttgggctaaacctataccaaaatcacaaggacattgaggctcagtaaggtgagatgacttgctccagatcacacagggttgaagctgaaattttaatctagagtccagttccagaatctgtgcttataaactgtgctgtgctgtatttgctttaagaatataagggtcatttcctgcttgaataatcaaggaaggcatgatggaaaagttaggggcatcataaaacccaaagacaattctgatcatatttttacttcaacacttctacaggaaagaaagccttcccatcactaatagtgagttctctggcagcaagcctcagtcattgcagcaggaatactgcttaaatattata

SEQ ID NO: 96498 - DNA, 331 bp, Homo sapiens
gaagaaagacaaaaaatatgtagccattaaaaatatttcaaacaaaacaaaaaaccacaataaagtgaaacaaacaaacaaaagccctccaaaagcacattaggctaagatgattttacaggcaagttccactaaacagataggtcctaaccttgttctagagaacagagatagaaatattgtgcccctgctcatcttttttgttttggttaatataaccttgatagcaaaaactagactgtacaagaaaagaaaattataggccaatcttacatatgaatatgattccaaaaccctttttataaatcaaaatttagaaaagaaactagca

SEQ ID NO: 96499 - DNA, 513 bp, Homo sapiens
caaggtcaggggagtgtccttgtgcagcctcggctgtggctgcctgtgtggctgagcagactaaggggcaggtcagccgcccttccttccacctctgcctggcatctcccaaccagatggggaggctaggccggtcttgctcatgtgggatctggatgcagcccttcacacagagcccgacatggagcagatgctccggagatgctgacggctaggattcccccgccaggcacctggcggtcctgcagaagggccaggacaatgtccccagccctccaccaattccagggcagatgagaatgccaagttgtgcctgcccgcaatgtgtgtatgtgtgtgcgtgtgtgtatgtgtgcatgtgggtgtgtacgtgtgtgcaggcacgtgtctgcccacaatgcttgtcagacaggatctgccctccgtggctgagggctggaggggacgaccacaggaagtgatactgccaagtcatcccaagtcaccctaaatataaccctcaatgtacaacac

SEQ ID NO: 96500 - DNA, 264 bp, Homo sapiens
tactgttcagaatgtaacatgattattttgaaataaagattttcccctagtttttaaaaaagttactttatacattaacccttatgttcctctttgatcaatttttccagtagtgtaaacagtcttcagggaagtagatttcttacagaaattgtcaagtggctctctgctgttagcatggttactaatcttttggttacttttcatattttttatactttctggaagtggacaacttacttgtaaataaaagtgcacacctta

SEQ ID NO: 96501 - DNA, 303 bp, Homo sapiens
caagtgattctcctcagtctcccgagtagctgggattacaggcgtgccaccatgcgactaacttctgtatttttttagtagacaccgggtttcgccatgttgcccaggctggtcttggactgctgacctcaagtgatccacccgcctcagcctcccacagtgctgggattacaggtgtgagccaccgcacccagcctactgaggagtttagagtcaggggagtgacacggtcggatttgcattctgagatggtcacaggctgctttgtggtgattgagtagaaggagtgaggccgaaggctgg

SEQ ID NO: 96502 - DNA, 371 bp, Homo sapiens
ctgtgttgtgatgcagatgtgatgcagatgaagtctctcaagaagcagccctccaccagatgtggtggctcatgcctgtaatcccagcactttgggaggctgaggtgggcagattatttgaggtcaggagttcaagaccagcctggccaacatggcaaaccccatctctactaaaaatacaggccgggctcggtggctcatgcctgtaatcccagcactttgggaggccaaggcaggtggatcatgaggtcaagagatcaagaccatcctggctaacacagtgaaaccccgtctctactaaaaatacaaaaaaattagccaggcgtggtggcgggcacctgtagtcccagctactagggaggctgaggcag

SEQ ID NO: 96503 - DNA, 510 bp, Homo sapiens
aaataaatcagtcttaccacttctctgtgcagattgccagtaaatctcctttcattgaaacaaggcaaataaattaaacatggtgaataacccactgacagaaagcatggtatttttctgggcaatctgaactacaaattggctgacaacaggaaacagtatggccctacactacatgattttctatcattaaaactatggaaatattttccttgtcctcatgtcctcatagatatgtctcttttaaatagcatagagctggatttttaaaatccaatctggtaagctatttaaatttaaattggtggttatagtgattaataatgtagttgggcttgttttgcccctcttattcatgtataatgtatttttatacttgttttgttcatattgttttattttgaattaattgaatctttgtctttattttattattttgtattcattgatttaaaaaattttatgttaaccttgaaatactgtcatgcagatttaataaattcttaagct

SEQ ID NO: 96504 - DNA, 583 bp, Homo sapiens
gctacatcctataaggccataatgccaatatcaccaatttgttactctgtcagcaatggatagccctttgatatattaaagggagggaaatcatatgctctattcatccattcatctatccatccatccatccatccatccacattaatgtatctgtatcaatatggcacacttgaaaagcatatgtcctctgaatttatattctagttctgctatatgctcactgagtgatcttctgcaaattactgcctctctcagcctcagttacctgaaaaataggcataattagatctacatcttacatctctcatcaggtttatcacagtgacatacaattgccaagcaggcaagtccaccttgaatgcctttttgactcgtttgagggttccaatactgtgtgtgccaacttagaccattatttcccagaaacattcctcttagtctatcgatttcattcccttgcaatgcactggcctttacacctgcatagtcaacagtgattaaagacagcatttctgtctctcctgccacatcggtacatttgtgtataggtaggtgttgctatttgtgtaacgtattacga

SEQ ID NO: 96505 - DNA, 415 bp, Homo sapiens
ttccttgtcgaggtgagttttttttccctgtagattattcagtttatccatcaggttttgactttttaaaaccactttcaattttaagaagacaatttttcaacatataacctctagttttatactatctctcagctaagcatgcaatcgtcttctgtttactgactttaggtgctatttttagcagtaaatattattctgaacaaccctcagtaacgctgagattatgggtttgaggaatgccaacatcaacagaatcaggtgtgggaactacctgacaagggtttttaaaacagctgtcaaacattctatgacagtctattacaggcaaatgtaatacagataatttcagcaaggaaatagattcataaaaaagaacaggatcaaattataaaactgataaatacgataacag

SEQ ID NO: 96506 - DNA, 178 bp, Homo sapiens
aactcacaaaattgtatggggacacgagattccacattcagacccagaatgaccctcttgttctttctgcaaatgctaagaacctccttgaaaatgtatactaaaattaagaatagaaggatcatggggaaatcctgcaacccacatagttctgtaaattttatagtggttgattttt

SEQ ID NO: 96507 - DNA, 418 bp, Homo sapiens
tgcaaacttcgcctcccaggttcaagccattctcctgcctcagcctcctgagtagctgggattacaggcatgcactaccatgctcggctaatttttgtatttttagtagacgggatttcaccatgttggtcaggctggtctcgaactcctaacctcaagtaatctgcccaccttggcttcccaaagtgcagggattacaggcatgagttaaagcatagtgaaatttgatacattcaggtgaaaagcaaacatgaaaatttgcatcctcccagcaatcaaattacattagacatggctaaatcatgatttcatgtagttaacaagcagtgaagggtgaggccaaccaagttcagacaaattgaaccttctacccaattctactctcctctcctcctttctccgaataaaacccaatact

SEQ ID NO: 96508 - DNA, 416 bp, Homo sapiens
taaaagtgtgccatggtggtttgctgcagctatcaaccatcacctaggtattaaatccagcatgcattagctatttttcagaatgctctccctccccccgaccctatcacctgagaggccccagcgtgtgtttttcccctcctcgtgtccatgtgttctcattgttcagctcccacttataagtgagaacatgcggtgtttggttttctgttcctgccctggtttgctgaggataatggcttccagctccatccatgtccctgcaaaggacatgatcctgttcctttttatggctgcaaaaatacttcttttaggggacttgttagctttctattctggcttagaatttccacttaaacttgtttttctgggatatatagcagaggggtgggactggctggattccacactactcg

SEQ ID NO: 96509 - DNA, 805 bp, Homo sapiens
ctcagtgtctcttaaagatgattgatacatttcacagcaccatttcttgttataacggcactcaagcattcatcaacaacttttgaaacatatacgaaaattatctaaaaatcctcaaaataccaattcagaaggaacatctacaggaacacctgacgaggctgcacccttggcaggaagaacacctgacacggctgaaagcttggtggaaaaaacacctgatgaggctgcacccttagtggagggaacatctgacaaaattcaatgtctggggaaagcaacatctggaaagtttgaacagtcagcagaagaatatgttaggccatgtgtctctataacagctattgaactctgcattgtacagtgaaagcagtcatagataatgtgtgagcaaataggcatgattgcactccaataaaactttgtataaaaaaccatttggtaagctgaatttggcctgtgatatatagtttcctggcccttcacacagaagatagatggagtgtaattacataaaaagttttaaagacaaagtaagcttttgtagtagttcatgctgtagtcttttttttttttgtcaccaatctgtggcctagtatcaatctattatgaaaatctgacccatccagggtaaaatgaatcaagttcagaagctcaatttacagatttaaacctgtaggtctttctttgccattattttattttgatttgtttaactgaattttttttaacttaaaaaataacaatagtatttggtagggtttctttttcatggtgaaagccatcagttaaggggccatgtcta

SEQ ID NO: 96510 - DNA, 267 bp, Homo sapiens
aatctttaaccctgataaatttccttagtatgaatttttttaattataccaaataacttcaagagaggaaaaaataaaacattttgatgacctctaaaatgtagtcatcaactgctaaatgtttaaaaatagtgttttatcatcatcagaaagacttcatgttaatacaaatacatgacatacaaatatacatctaaatatacattatatttataacataaatatacatctaaatatacatcatatttataatataaatataagatt

SEQ ID NO: 96511 - DNA, 653 bp, Homo sapiens
tgcctctgcatttcaggggtttaggattggcatttttaaaatgtcaacaaataaatgttcatatccacacttgacattttttccaaggagaattttaattgtataattgctggtaaattcatgcagccaacatggagggcacacggacaagatctatgagcattacaagtgcacttacctttgacccagcaattctatctctaggaatctatcctaaagatgctccagaacatctagagacaacatatgctgaaggttagtcattgcagtcctccttgtgatgacgaatgcctgggaacagcctgaatagcaccaactgagggatggtgaaatacattttggaacctccatgcagtggagtactacacagtcataaaaagcaatgagttttttatggtactgaatgttaataagtgaaaaaataagctaatggtgacatgctctgcaatgccacttgtaaagaagggggaagttatatgttatttgcttgtactttttttatgtatagaacatctctggaagaatgaataagaaattagtatctgcaattgcctctggggaagaaacctgggggaagaagatatattttttactgtttgcccttttgtacacttagtaccgtgtatacttatttttgaaaagcaagagtgtac

SEQ ID NO: 96512 - DNA, 167 bp, Homo sapiens
tgtcacccaggctggaacgtagtgcaacagtcagactcactgcagccaccacctcccaggctccagtgagtttcccacctcagcctcccaagtaattgggactacagacgtgcaccaccacacccagctaattttcttttttcttttttttcttttttctttgtgag

SEQ ID NO: 96513 - DNA, 407 bp, Homo sapiens
ctctccctaatttaggagtcccagctcccagctccctgtcccctcagacccagacatcgaggactcccccctcccttggaatgtaggaatccagtcccccagcctcctccttcctccagagaagcccagaacagccccagatactctcggctgcctccccagtgcccaaatccagaactgggagctcaggctcctccttcctgtttaccggccccgccctctccatttcccagacctcaccatgggacgcccccgacctcgtgcggccaagacgtggatgttcctgctcttgctggggggagcctgggcaggtgaggagggttgcggaggcctccggaggggagggatctgaaggcagcagtggcgctggggagtctgtgggaatgccgcgggggttatgtgggtgc

SEQ ID NO: 96514 - DNA, 261 bp, Homo sapiens
tctagacatcctttagcatcctaaccagaggcagcagcagcagcagcagcagcagcagcagcagcaactggatttgctttttcaccagaggatccagatttccctgtggccttgcaaacaaaaaagaaggaagacggagcagcacagtcatcccctttgtgaaaaaagcattcagagacggggtttcaccgtgttagccaggatggtctcgatctcctgacctcgcgatccgcccgcctcggcctcccaaagtgctgggat

SEQ ID NO: 96515 - DNA, 492 bp, Homo sapiens
tctagacatcctttagcatcctaaccagaggcagcagcagcagcagcagcagcagcagcagcagcaactggatttgctttttcaccagaggatccagatttccctgtggccttgcaaacaaaaaagaaggaagacggagcagcacagtcatcccctttgtgaaaaaagcattcaggtaactgagtgactcagcaagcctgggtcttggggaaattacgaatacctggttgaagggcagtcctcaggcagagcccctgagacccgttgaactctagagtgtgggagcagaggagattcatggcctgcccaggggcagtgtccacaggggcagagtgcccccaggactcgccctggctcagttaaggactcccctcaggaactgcagaggtgcaaggcagggtgcagctctgcctggactgagctggaaatgcagccgtgtggctgaagtggccacttcctgctttctgtaaagcagccacagggaactgtgaa

SEQ ID NO: 96516 - DNA, 147 bp, Homo sapiens
caccctatgtatttgttgcttgcctaactctatctccctcccaaccatccttctttccctctttttcctccctccttcccttcctacttccttccatcatccatttatatacccatctatccattcatccatccatccactcgtcca

SEQ ID NO: 96517 - DNA, 225 bp, Homo sapiens
ctaatcaaatagagatgtcaagtaggtgggatgatatagagatctggaattaaggaaagagatctaagttggagacatacatttggaaatcactagcatatacacagtagaaaaagtcacgaggggccaggcacggtggctcacgcctgtaatcccaacatgtcatgaggccaaggcgggcagatcacctgatgtcaggagtttgagaccagcctggccaacatg

SEQ ID NO: 96518 - DNA, 192 bp, Homo sapiens
tcaggacatttcagtgaggccacctacaagcagaaaggaggcccagggctagggacagaatggccccagagccagtcagctgcagcaattcttgtgagaaagggagggcaagctgccagagcagctgtgcccaatatgatgcctacacgagacagatgtccccagtagagtgtgttcagtgaccttctaaac

SEQ ID NO: 96519 - DNA, 484 bp, Homo sapiens
ctgatttggtaatgggaaatcttcaaggagttgaagcaaaggcttgcatgatcacatcctttgcttcctttcctatccaaatatttttattcaaattttactttctctaggatgtacctgccaaatactacagccttttccttatctggaaattcatagcagtttttttcagtaatgctcttcagatatataattataaaagatttacatagattttagagatacatgtcttatttttcttagtaaatttttaagtttgtaattcttgaaatggtcaccaaattagcttatcatctatttcttcttgaataagttatttagtaaattagtggataaatggaaatattggcttttttttacaataaaatataacatttagaatatgaatctattatggatatgaatcacttcctcagaaacatggatgctacccagctttcctgccaatcctgggcttatgcacacacagtcaattcaaccctgc

SEQ ID NO: 96520 - DNA, 523 bp, Homo sapiens
acgtcagcggcggaaatggtttctatcaaaatgaaagtgtttagagattttcctcaagtttcaaatgaggcgaatcccgttttccgcgatgctgcagcgcgcgggttttaaccgcagggtcacgcggaacgccgcgccgcgcgactgtgcctcggtctctgcgcccggctctccctccggtccgcaagaggaggaaggcccgcggcgtgccgaggtcagcggcgcggagccaccaggcgagacggtcacggacgcctgaaccgaggtcaccgaggccacggggccgggaggccctcagcagagcccgggggctccgcacctcaaggccggccaggaagaaacagcagcaggagcccagggcgccccggggagcccccgacacgcgggccgagcgcccagagcggcccaggccctcgcgaggagaccggcctccccagggcggggcttccgactcgggcgcccgtgagccccggaggcggcgcgaaggggcagagtccgcgtttctaaccagcccccgggtggg

SEQ ID NO: 96521 - DNA, 350 bp, Homo sapiens
tagaagcttcatatgttacccaaatttgatgaggagtatcatagtcagtactcctgtggagttttcaagtaaagccctcataatgatggtgggaaggaaggtgtgttccctaagagtgaggcttggcataaacccttcacacattacctggaagtatcacacttcaattttaaaaagattcacatgaatttacagtgttttttaatgttacataataggtaatacctatttttagtatgtaataaagccttaaattatataacattcaataaaaatacctgtacctttccacagtgtactagaaaatgttccaatttgtgtagaactgacttttactcttcttttcattc

SEQ ID NO: 96522 - DNA, 458 bp, Homo sapiens
tgacactcgaggagagacagaccctgccctgctggttggtcctataggaaggccccagcctaggtggcctagttctgccagcccaaccctgcctgtccctgtgacctttagttctctggacctcggtttcctcatttgataaacatttgtcaagcccaggtggctggagtgaggacgcagaggactaatgatctcctcaggaaaagaacagtttagtaaaatgaaggggatggaccagaagctctctgggggccccaccgactttcccaatcgaaagcaactgtaatgaactgtgtctggagtgctgtgtgccaggcactgtggatccagaaacggattaagaccttctgccacaaacaaccagaaaactgggcaagatataagcagcagacacttgacaacaggcagcacacaggacagtgaccccatgactgcctcagcttctgcctggagacagt

SEQ ID NO: 96523 - DNA, 238 bp, Homo sapiens
catcacaataaaatgtatccctacttggtgtttactatttgttgggtactattctaagctttacctagattaactcatttaatcctcccaattatctccatgatgtaggtaacagtatcgcttataatttacaaacgagaaaactggggcagagagtaagttaaataggagactggctgtctagcttcaaagtccatgttcttcaccaatacttcaacctgctttgtataacacactc

SEQ ID NO: 96524 - DNA, 486 bp, Homo sapiens
  misc_feature (1)..(1): n is a, c, g, or t
  misc_feature (25)..(25): n is a, c, g, or t
ntcattcggcactgactctcttaanctaccactgctacacattatgctccaagacactgaatctgaaaggatgcttccagtcttgccaagtggtttcactaccaaggccagtctccatctatgatagacccaaggaagatcatttacaactagaatctagtcatttaggagattgtgtgctccctggatgggccatctgcactggtgtgaggtttatctcattgaagggaaaaccttttgaatcttcttgaatatcagcaccaggaagagcagtacaaactggagaagctgggtgtcagcccagaacgggaactaaataagcactcgtagcttgaatgaataaacaagcagctcccacttggatagtatttccacacatcaggacttgagaggtaagtgggtagagctcggtgcctattacttatcttctggaattaacatggattgtgctgagaactcaagcaaaaataaaataacttttagact

SEQ ID NO: 96525 - DNA, 393 bp, Homo sapiens
cagcgccactagcctcatcagcgccaccagccccattgagcatcttttcatgtgcttattggcaatttatatattttctttggagaaatgtctactcaactcttttgcccattttaaaatcaggtttttttttgttgttgttgaattgtaggagttctttacatatttgggatatgaaccacttatcagatacatgatttgcaaatattttctcccattctatgccttttcactattgattatatccttttacgcacagaagttttacatttttgatgtagcccaatttttctattttttcttttgttgcctgtgcaagagttttattttaaatgcaattttgggatgtctattagacatccaagtcaaaatgtcaaatagacggctggatat

SEQ ID NO: 96526 - DNA, 278 bp, Homo sapiens
gaggcctgggacttacgggtggtgtgggttctgccttgttcagaactgtcacccagcctggaggtgctgtgacccagagcttgcgtgtgaggcagggggtgggaaggacctggggcttgaccctatagcccacagaagctgtcagtccttgacagcccagccaggacccggccttcacctggggagccctggccgctcatacacacctccagaggcagattagagtgggtggtgacctcatagaggttgcagctgcctaggcagaaatgacaagtgtg

SEQ ID NO: 96527 - DNA, 727 bp, Homo sapiens
aggctttagctaacgtgtactttcgccctgcgatgggccgcacattttcgccgccagtcttttgctcctgtttcaggtatgcgtgtgcattgtaaacttgtctgactgaactgattataagaaatgcacgtcactgcgcccggccccaacatgtttttctaatgcttaaggaaacccggagataatattcccatgttttgccacttagtaaagcattttatatgcctgtgtcagcgagcacatagctgcaagtgtagcccatggccagtctgtcactgtgtccttggcagaaaaaaagaatccaacaaatcggtaggtttttatatttaagacatggcacttgcattttattatgctggcgtgcatccccagcatttggataaggggccaaggtcaagtctctcagactgttggctgacaaacattaaacctggaaatcctaacagagtgtatgaaaaacaattacagtcaagggaacatgatagagaaagcttcggtcatcttagagaatgcatatattgccatgaagagaacattggtttaaaaaaaaatgttcaagagaatgaaaagacaagtcacagactgggagaaaatacttgcaaagtacatatctgataaagaactgatatccaaaatatataagaactcttaaaactcaacaataaggagacaaaccgattaaaaaaataggccaaagaccctaacagatgtcaccaaagaagatatg

SEQ ID NO: 96528 - DNA, 533 bp, Homo sapiens
ctgctgcccccactgcaagtgttgtgtgacacctggaaaagcaacgacaggacactggaatgtgggcttggcttctacttctgtgaagattggctcttgacccccatgaagctggagactggacattacaataggaaacctcagtgtttccaatatcctgcctgcccatctgctgatatttgcagcaatcaaaagcagcaagaacagcagtcctctgcctcatttccactttccaaattgtccatgagtgcacctaattggtggtacctaattcccatccagaactctagctgccatggagggaagcattttgtgcaatatggcgcaaattatgggtgcgttagtccccgccttaaccacggaggagacgttccaagacctccagtggatgcctgaaacctcggctagtaccgaactctgtatgtactatgtttttcttatgcttgcatacctttggtaaagtttaatttataagttaggtacactaagagattaacagtgttaactaataataaaattgaacagttaaaaca

SEQ ID NO: 96529 - DNA, 143 bp, Homo sapiens
ttatctgtcaaattataataggaactttgtattaagttttcatatttggctatccaaatagatttttattttgaccagaattcttagataattaacttaaagcaaataattacttagtgttacctttaacatgcatggccttg

SEQ ID NO: 96530 - DNA, 521 bp, Homo sapiens
cctcaaccccatctcaccttacatcagtacctggtccctgaaggtgattaagtttctagactctatctcaaatgctaggaaatctctttgttggctatccaactttcctcttataaaggtttgcagagcctcttcttttcttttgaagtcttctcaagctttagaaggtttttaaaagttcatttaaatattttcaataacttaaaaaaagtgctacagtattttaaaagataacatagaccagtactttcccaataggagaaaaatacaagctgcaaatgcaagccacttgcatagttctacattttctaatagctacgttaattaaggggaaaaaacaggtggaattaattttaataatatattttccttaacacaatatatccaaaattttattaacatgtaatcagtataaacatttctctttcaaacgaagtatttgaaacccagtgtatgttttatatttacagcacatcttaatttggactggctcaagtgctgatagctagcaagtggctagt

SEQ ID NO: 96531 - DNA, 804 bp, Homo sapiens
cttttcctattggcacagctgcaggcattcacccatgcaagcttccagcttgcttatctatgtctccaactcaattttacaggctgctctttgttagaaaagaaattattttggggctgctttttgttaaaagggaagccttactgaggactctcttactctcactaatcttctaaataatgtctttttagctcctgtatcaacagggtcttgctctgttgcccaggatgtagtgcagtggcacaattatgactcacctcctgggctcaagggatcatctcacctcagcctcctcagtagctggaaccacagatgtgtgccaccacacttgaccaagtttttatttttttttttagagacgggggtctcactatgttgcccaagcaggtctcgaactcctgggttcaagcagtccttccaccttagcttcccaaagtgctgggattacaggcatgggcaaccacgcccagctagggcaagtgtttatttaatagcccaggaattggaaaagcagaaggatggctttgaaaccaatttatcaattagtgaggggtgatggggttaaaatatagggtttctctaatgtaagtgttggacatgaaaaggaaagggaggagtattcatgtcttttctggaaatgggcagagatttcctggaatctggatgctgccctttttccttcctttaatggtaaggtattgccttttatggctgccagtaggtgtgccagttgtatggtaatcaggttatgatgaagttagaggctcttcagaggtcagatgagctgccatcttggatctcccc

SEQ ID NO: 96532 - DNA, 397 bp, Homo sapiens
aacaagggttaattataatcaactgttgaaacacactgttctaaacgcagtattattcacttgccacctattttgggagttcatgtataagcatataaaattaccattagactgtttcaaagtggtagaccttattttaaagtaagagcatttattttacatgtttaaaataagggatatgtaaatctttcctttctccctactcacctctgttcaccacaggcagtcattgttgacatcatcttgtgcttcattctagaaaaatttggcatatatgtatataatattacacgttatgtgttacaagtatatattaacatacatatcttgataatgtatttatactatgtatcttgaaacaatttcatttacatcttttaattatgtgaaatctttt

SEQ ID NO: 96533 - DNA, 350 bp, Homo sapiens
agatcttgccgttcttttgtcaaacttcttttgaaaaatgtctgttcatgtcctttgcccatgttttaatgggatgattattttatttttgtgtgtgtgaagttgtctgaattccttgtagattctggatattagtccccattggatgtatagtttgcaaatattttctcccactctgtaggttgtctgtttactctgttgattatttcttttgtgtagaagctttttagttcaactaagtcccgtctgtctatttttgtttttgttgcctgtgcttttgaggttttagtcacaaattctttgcctagaccagtgtccaaaagagttttccctagttttcttttcgtaat

SEQ ID NO: 96534 - DNA, 774 bp, Homo sapiens
actggtccttatcaccccagctcctttttgtttttctgtctcctgccttttccagaagtctgttgaactcaaagggctgaatgacagcagtcttccctccgtgactgggaaactacacgggaggaaccgtatcctgacgcagacgcgatgcggtgttccatcaggaaatgcttcatactctcagtgggcatcgtattcctgtggcccttcatcactttgaaaatccccaaggaaactgaagatgatcaaaatgtgatgactgtcaaaggccaagtagcaagccttgagccttgctcagtttgggaactgggaatatagggtggaaatggtgtggacaggcagattctggaaagcccctgggctttcttccttcctgaccttttcacctgagagcaggaagctccaaagggaatgggggtatggacctgggcctattagtccatgaagaagctgtatttattttccttattcgttaaggtaaagaagacagcaaatactgcttgagccctggatattttagccaatggccaggcatcctgagaatgtgccaggctcactctagggagaatggttcactccacctctttccctagaaaagcttatgggaagccactggggtgtaaaatttgttctttttatgaaaggatatatatgtttgcccttgtcaatgcccccggaggccagttataacagccggaaggacccaagatcactagaagactggcagaacctcaccttcaaatatatggaaaaaatccagaagagaagaaagag

SEQ ID NO: 96535 - DNA, 373 bp, Homo sapiens
aaaattttactatatttgaaaggctagttatgtattctgttatttagatataagagcatgagagtcttgatattaaattggtaaattaattattggcaacctagtggtttgggttggcaaggattctgtcaataatcatttggtagagtagcagaagcaaaggaggtgtcttaagaaaaatcaacaccaaaagggttttcttccttcgggagaaagaatttttataaaaagaatcttgaattgctaattgttatgaacctcataagaaaaaagtatttttatttacaaaaatgaaatgagttctattagatagatgtcgttttgatattctaggaactacaaaatgccttctgtgatatttaaagatacacta

SEQ ID NO: 96536 - DNA, 1553 bp, Homo sapiens
cacagtaagagattatagcaaagcatctataatcaactcagcttaagaagttttgaccttctggttaggcttcttgccacaacagaacagcaccataaccatggctttcttctcccgactgaatctccaggagggcctccaaaccttctttgttttgcaatggatcccagtctatatatttttaggagctattcccattctccttataccctactttctgttattcagtaagttctggcccttggctgtgctctccttagcctggctcacctatgattggaacacccacagtcaaggtggcaggcgttcagcttgggtacgaaactggaccctatggaagtatttccgaaattacttcccagtaaagctggtgaagactcatgatctttctcccaaacacaactacatcattgccaatcacccccatggcattctctcttttggtgtcttcatcaactttgccactgaggccactggcattgctcggattttcccatccatcactccctttgtagggaccttagaaaggatattttggatcccaattgtgcgagaatatgtgatgtcaatgggtgtgtgccctgtgagtagctcagccttgaagtacttgctgacccagaaaggctcaggcaatgccgtggttattgtggtgggtggagctgctgaagctctcttgtgccgaccaggagcctccactctcttcctcaagcagcgtaaaggtttgtgaagatggcactgcaaacaggggcataccttgtcccttcatattcctttggtgagaacgaagttttcaatcaggagaccttccctgagggcacgtggttaaggttgttccaaaaaaaccttccaggacacattcaaaaaaatcctgggactaaatttctgtaccttccatggccggggcttcactcgcggatcctggggcttcctgcctttcaatcggcccattaccactgttgttggggaaccccttccaattcccaggattaagaggccaaaccagaagacagtagacaagtatcacgcactctacatcagtgccctgcgcaagctctttgaccaacacaaagttgaatatggcctccctgagacccaagagctgacaattacataacaggagccacattccccattgatcaacccccaaagccatgagggatccaagtagagccacagaaaaagaagaattccaggagagggaaagatcgtaaggatgagagaggagaccatccaagccagaaattatttaataaatcagagttctagcaatagagtcctctcccaagtggctgaggcaggcttaggggaaagaaccagaggggcaggggaggactggggagggctggctagccagaggagttggctgtatcacccctggttattttagggcaacaacccagttggggagtcttatgaatcattccagccaactctctgatcacaaagaatactgtgcccctttctcctaaaccttagttcaccatcactacgtaggtttagacttagaagctttatttggaacagggatagtttgtttcctcttggtcctttcc

SEQ ID NO: 96537 - DNA, 788 bp, Homo sapiens
ggtgtataaaagtgacagtctcactatatttttcccagaagttagtagtctcacttctataaatcattattaatttcctaagtgaaaagtagtacctccttattacttttaattgcatttctttaactattatgtatactgcattcttagatatttaatttctatcatcattccaaaccagactttattgactggcagtaaactgagctaatttaattaagagaagttaaatgcctcaagccttctgaggaattattgttttaatgatgattctcttttggttaaaaggctgtaatccaaaatgcatcataagttaatcacactgtacttttcgcctctttttccccactaagaactttttcttgaagaaatgattatcattaaatgcctaaatgagaaagatgtttatcaaaactgacatcatcacataagttaacaagcctcctgactgtgcattgacttcgatattatcacactccagagtgctatacaaatttgtaaatagctctcaggggaggacaaatagaagtgagtttgaaaatagcttaatctcataaagtctaagtaaaaatgagtaactttaagattcttaaaattatttactgggggccaggagtggcggctcatgcctgtaaccccagcactttgggaggcaaagaaaaaataatctaatatatcaccaaaatgtatctaggggagggttggggttcacaggaatagctagtgaaggtggtgggattgaacagatttccaagagtgatttgttcagatgctgtgttagggtgctc

SEQ ID NO: 96538 - DNA, 589 bp, Homo sapiens
  misc_feature (583)..(589): n is a, c, g, or t
ctaaaggcagagaatgtccatccaacatgcccttctgactatacagtcaccacttttttgggggaattctttagcagatcttattgttctttctgcagaagctatcattcctacctccccaacccccaaaatctctaatacaggccaagtcattttttatgatgggtctctgagatagggcagtttgttagaggagaggctagggtagagagggagagaatggaggtatctgaaaataagtaagattaattttactcatttttctaacacgagtcagtatgcttgaagttttcattgtatttgatgtcatgtaaatttactgtaaaaaataagaaaaaattttaaaatgctttattgattaaatttagggttgcttttcagtatactcagtaactccgaagtcagtgttaacagtactgagcttacataagatttattgaatttacctaacttaggcaaatgttttcaaacttatatgcttttggtccaaagtcaaatcaattattttgaaaaagatgaatgggatttttttcagtgtggatatgaaaaataaaataaaatgatagctatgtttggaacaaannnnnnn

SEQ ID NO: 96539 - DNA, 884 bp, Homo sapiens
  misc_feature (878)..(884): n is a, c, g, or t
caataaatggcactccagctaagttaggttaaaaaaaattagatttcattagaattttaaaacaaacttgatgtttctgttatttcttcattccactaaatgatatggtttgaaaatatttatgctcagatttttaaatggtctctacaacaaattgtcacttgttgggttcaattaagtgctcattgtataagtgcacatggtacaaatcaacaccagcttataggattgtggaaagaattaagagatgaatttagtgatcttatataccctgtcagttggtcatattgtggaagagctctacaaaacttactgtactgttaactccaagattttcttccaataacagggatgctagccagatatttaataatcaaagaccaaaaatggcagtttaatttttctacccaatatcctatggcatatgaatgatccaaatttgaagctccaaggataggaaaaagcttacttgtgcctgtcctagacaagtactagagtttatattgaaatcaaaacttctaaaaataaaaatcagtaagattaattttactcatttttctaacacgagtcagtatgcttgaagttttcattgtatttgatgtcatgtaaatttactgtaaaaaataagaaaaaattttaaaatgctttattgattaaatttagggttgcttttcagtatactcagtaactccgaagtcagtgttaacagtactgagcttacataagatttattgaatttacctaacttaggcaaatgttttcaaacttatatgcttttggtccaaagtcaaatcaattattttgaaaaagatgaatgggatttttttcagtgtggatatgaaaaataaaataaaatgatagctatgtttggaacaaannnnnnn

SEQ ID NO: 96540 - DNA, 714 bp, Homo sapiens
tgaattaatgcctgattggtaagtaaaacaaataaatctcttagttttaaaatatatctgcaagattactctaaagtaactatagtttagaaatgtacagtgaatactttgaaggtctagacttacaccaatctgtttcctaatcattaggaatctgtattagagttctgtcagtcaagatttgatccacttatttattcaacaaatgtactatgcatgtagtgtgtgtagctactgccctaggcactggggatgcagtattgccttcaaggaatttacatctaatctattacttaatatattcaaaatgggagaatctttgcttgaacctattaatagtaatgaggtcaagtacaatcatacatattttccaaagagttaacctttcagctggtctcatatttgtcctgtcatgctctaaacattatattacaggcgtgccatacctcatccttcctgttaaagcagcagcctcccagcccctaggatttcttcccgtccacattcttgctgtcatctcagccatccacacctcccacatcacaaatttactccctcataacatatctacttgcacaatgttcctcaaatcctgtttaaaatccattagtgttttgctcaagaaccttcactagttttttatttctaaataaaacatttgcccttctttaaggccctaaatctcgagtcatttaatgtaattaaacttgtttt

SEQ ID NO: 96541 - DNA, 185 bp, Homo sapiens
gagaggtgacccatctacatggtcatccattcatgggtacagttttattttatgaccgctccaagcctcttaggacactccacagtgtctttgttattgttccttgtgtttggtgcttctctctgaaaacaggattatacattcctggcctgttaaatacaggctggccatgtgacctgctttag

SEQ ID NO: 96542 - DNA, 367 bp, Homo sapiens
gcacaggtacgaatgagatatggtgctcagcttcaaggagttacagtctaaataccaaaataacagaatcaagagcagcagactaaattgggcccactgtattttttaaaaatttaatttgactgctgggtgcggtggctcactcctgtaatcccagcacttcgggagcctgaggtgggtgaatcatgaggtcaggagtccgagaccaacccggccaagttggtgaaacactgtctctactaaaaaaaaatacaggccaggtgtggtggctcacgcctataatcccagcgctttgggaggccgaggcgggcgggtcacgaggagatcgaggccatcctggctaacacggtgaaaccccgtctctact

SEQ ID NO: 96543 - DNA, 436 bp, Homo sapiens
gtcagggggaagacttacccaacccagcccctggtcctcctggctggaactcaacaaagaacagcggtggaaacttagaataaaaggccctggctgctctgtgactggccacagaatctctccttttcattggctgtcatggatattgatgactagacccagacggcaattgtttaggttcttttttaactcctcaggtgtgaatgcttttcccccagctggatagtccgtgctgctgttaatatcatctccctacgtaatataatatgatcacagggcttctgcgaactatcttctcccgaccaatgagagctggtttggagactagtaatgggaaccactgttctcataatctgagtatctgactcctcctatgaacttcctaaggaaatctattttgtgcatgtctcaacttccgctttaaaagttgagcact

SEQ ID NO: 96544 - DNA, 281 bp, Homo sapiens
ctaaataactttcttgagaaataattcacatggtgtgcagtttacctttgaaagtatacaagttggctgggcacaatggctcacgcctgtaatcccagcactttgggaggccgaggcgggtggatcacctgagatcaggagttccagaccagcctggccaacatagtaaaaccctgtctctactaaaaatacaaaaattagcccggcatggtggcacgccctgtagtcccagctacttgggaggctgaggcaggagaattgcttgaacccgggaggtggag

SEQ ID NO: 96545 - DNA, 481 bp, Homo sapiens
gtagctgggattaacaggcgcctgccaccacacccggctaatttttgtatttttagtagagatggggtttcgccatgttggccgggctggtctcgaactcctgacttcaggtgatccacccgcctcagcctcccaaagtgctgagattacaggtgtgaaccaccgtgcccggcctacttatttcactttttatcggacaacagaagaagccttccttattagggtcaacagctggatcacaggctctgtatctgtgtgggttcctttggggttcattggagacttcttcaaccaacctagtttctctgatctggtcagcctgggcatctgaggggcagggccagagaggcctgactgctcactggccattggtctctgaccagacttaggtcttcaggagtagaccgcagtttgtcactcttcaggagtgctgggatgaggccgaccagccttctgaggagaccttcttttctttgtctgg

SEQ ID NO: 96546 - DNA, 484 bp, Homo sapiens
caatccagcagggcgcccgctgtgctcctgatccagggaagcacccgttgccactcctgatcgcgctaaaggcttgccattgttcctgcatggctaagtgcctggtttcgtcctaatcaagctgaacactagtcactgggttccacggttctcttccgtgacccacgacttctaatagagctataacactcaccgcacggcccaagattccattccttcgaatccgtgaggccaagaaccccaggtcagagaacacgaggcttgccaccatcttggaagtggcctgccgccattttggaagtggcccaccaccatcttgggagctctcggagcaaggacccctggtaacactggcagtacttatactttcattggttatacttatacttccccggttatatttatactttcctggcagtacgtatactttcatggtttatactattttaaaattattttttattaaatggagccaaatttttta

SEQ ID NO: 96547 - DNA, 626 bp, Homo sapiens
caatccagcagggcgcccgctgtgctcctgatccagggaagcacccgttgccactcctgatcgcgctaaaggcttgccattgttcctgcatggctaagtgcctggtttcgtcctaatcaagctgaacactagtcactgggttccacggttctcttccgtgacccacgacttctaatagagctataacactcaccgcacggcccaagattccattccttcgaatccgtgaggccaagaaccccaggtcagagaacacgaggcttgccaccatcttggaagtggcctgccgccattttggaagtggcccaccaccatcttgggagctctcggagcaaggacccctggcatctggatattaagactgtctccagccctttgaggttgagagaggaagcaagcacggaggaatggatttgacaacccacatgtccgtgactcaaagcaagcaaggccttgcacaaccaactcgccacccacacaatctgcacagtctcagtgagaaagcaggagcagggagctctccgctgagagtgaagaaatgtcctcaactcaacttctctgcagtgtgcatgtgtgtgaaacgcagacacacacgggaggaatttggctctgtcattttagtgtac

SEQ ID NO: 96548 - DNA, 484 bp, Homo sapiens
ctctagaggaccccgtagggagctatttcattggttatacttatacttccccggttatatttatactttcctggcagtacgtatactttcatggtttatactattttaaaattattttttattaaatggagccaaattttttaaaagtcatcttttccactaaattggcatcaccatgttaaatctaaatttccctactaagtctttattttattttactttaagttctaggatacatgtgcagaacatgcaggtttgttacataggtatacatgtgccatggtggcttgtgcttctagtcctagttactagggaggctggggagcagggtaggaggattgctggagccctcagatttgagagtgtagtgagctaggatcatgccactgcactgcagcctcggtggcagagtgaaaccatgtctcaggaaacaaacaatggtttgtgtcatctgagatgcaaaaaaataataacaataataaga

SEQ ID NO: 96549 - DNA, 825 bp, Homo sapiens
caatccagcagggcgcccgctgtgctcctgatccagggaagcacccgttgccactcctgatcgcgctaaaggcttgccattgttcctgcatggctaagtgcctggtttcgtcctaatcaagctgaacactagtcactgggttccacggttctcttccgtgacccacgacttctaatagagctataacactcaccgcacggcccaagattccattccttcgaatccgtgaggccaagaaccccaggtcagagaacacgaggcttgccaccatcttggaagtggcctgccgccattttggaagtggcccaccaccatcttgggagctctcggagcaaggacccctggtaacactggcagtacttatactttcattggttatacttatacttccccggttatatttatactttcctggcagtacgtatactttcatggtttatactattttaaaattattttttattaaatggagccaaattttttaaaagtcatcttttccactaaattggcatcaccatgttaaatctaaatttccctactaagtctttattttattttactttaagttctaggatacatgtgcagaacatgcaggtttgttacataggtatacatgtgccatggtggcttgtgcttctagtcctagttactagggaggctggggagcagggtaggaggattgctggagccctcagatttgagagtgtagtgagctaggatcatgccactgcactgcagcctcggtggcagagtgaaaccatgtctcaggaaacaaacaatggtttgtgtcatctgagatgcaaaaaaataataacaataataaga

SEQ ID NO: 96550 - DNA, 761 bp, Homo sapiens
ctcgccgtccaccactgctgttttgctgccgtcgcagacccgccgctgacttccatccctccaatccagcagggcgcccgctgtgctcctgatccagggaagcacccgttgccactcctgatcgcgctaaaggcttgccattgttcctgcatggctaagtgcctggtttcgtcctaatcaagctgaacactagtcactgggttccacggttctcttccgtgacccacgacttctaatagagctataacactcaccgcacggcccaagattccattccttcgaatccgtgaggccaagaaccccaggtcagagaacacgaggcttgccaccatcttggaagtggcctgccgccattttggaagtggcccaccaccatcttgggagctctcggagcaaggacccctggtaacactggcagtacttatactttcattggttatacttatacttccccggttatatttatactttcctggcagtacgtatactttcatggtttatactattttaaaattattttttattaaatggagccaaattttttaaaagtcatcttttccactaaattggcatcaccatgttaaatctaaatttccctactaagtctttattttattttactttaagttctaggatacatgtgcagaacatgcaggtttgttacataggtatacatgtgccatggtggtttgctgcacccatcaacccgtcatctaggttttaagccctgcatgcattaggtatttgtcctaatactctcc

SEQ ID NO: 96551 - DNA, 286 bp, Homo sapiens
gtcatgtggtcggaagggctctgggctgggagtccaggcagggtaagaggggctgcagccctgccacttaccccctccaggtcatttgaaggatgtaaagaccgcattctgtactgatgattcttcaccctggttgcatgttggactcacctgcagagctttttaaaacactgatgcccaagcctctctccaggccactgaaatcaagttgtattgggtggggccctgggcagagatctatttgaaaagctccccagtgattctaatgggcagctgggggagaacc

SEQ ID NO: 96552 - DNA, 412 bp, Homo sapiens
ttttataaagcaggcacaattataaattatgcagaaaaggttaatacattcaactacaaaaaattagaacctctctttgtgagaggtgattgaaaaatgagtaaaaagtcaagctagaagatatttgcaacttatttaactcatgaatgattactatccaaagcatattatgaactgctaggaatcaataagaaaacaaccaaatcttttggggaaaaaattgccaaaaaatgtttacagaggagaaagcataaaggtttacaactatataaaataatgtcccaccttattatttattacagaaatgtcaagtaataaacaatgaaataccgttttacatttacttaattaaccaaaaaaaatttgtcttacattgttaagtggtctgcatgtggcttcagtaaaattctta

SEQ ID NO: 96553 - DNA, 726 bp, Homo sapiens
atttctccatgcctttgaaggaaggggtaaaaaagccaggtaggaataagagaatagtaataaccaccattggctaaaagaaaaactgtgaatttcaaaaatgtgtgataggttgagtctgggttaagatccacagaattacattggacacattgtacattcatctttgtgttaagtagcacaggcatataagtgggttaattctaaaaaaaaattgtatcagctggctgggcatgatcactcatgcctgtaatcctagcactttgggaggtcaaagtgggtggattgcttgagcccaagagtttgagaccagcctgggcaacatggcaaaaccccatttctactaaaaaaaaatacaaaaattagccaggtatggtggcacacacctgtagtcccagctactcaggaggctgaggtgcgaggatcacttgagaccaggaagtcgaggctgcagtgagctataatcatgccactgcactccagcctgggcaacagagtgagaccctgtcttcaaaaaaaaaaaaaattgcataagctgggattccaaggttaacaaatgaagctggattcaaattctaggtctgtatctctttggagaagtttcttaacttctctgaacctgttttattatgaagatattaatagtgcctgtctcatttggttggtgcaaggtttaaatgaaatagcacttgtaatgctcttggtacagtgtcttcacactcagta

SEQ ID NO: 96554 - DNA, 762 bp, Homo sapiens
agggttgggtaaaaatggtgacctgaatttcacagatctgattacttagttttgggaaagatatagaagattatataatagtaatattacaactagaaatataatagtactatcacctttcaaggcattattattgtgtaaattattgtgtgtccccttctgttccagctattcattatcccttctcatttgtctttatgaagagatacatgatttgccattcatagtctatacaaaatacaactattgaacattggatagtctatgcaaataggatagtctatgcaaataggatagattgaatggttttattcaagagaatgactgtcagtataagtctccatatttaattttaatggccagtcatgtagtattgaaatagccagttagactctttcatgagagagactggaaaagacccagtgctagtatatttttcctttctaaaaattgagatacaattcacataccgtaaaatcagtccttttaagttatataatccattcatttttagtgttttcacacgtcgtgcaaccatcaccactgtctcattccagaacattttcatcatcccacaaagaaactctgtacccagtagtagtcatttcccattaccccttcccctccccaactcagcccttggcaaccactaatctaaatctactttctgcctctatggatttgcctatccagtattctttttcaattagccagtctccagcatcatcacagccagtgatcccacactgaaggttgtgaaga

SEQ ID NO: 96555 - DNA, 444 bp, Homo sapiens
cagtgagcccagatcgcaccactgcactccagcctggtgacagagcgagactccgtctcaaaaaaaaaaaatttaaatcgtgaagtcatctattgatctgttcctttctgattttaattgcattttattcctttgaagttattccctatgcaaaggcaaaaaaaaggctatatattttctaactgagattgatttttggtattgttacaggcttcgctgcaactgaattgcaacaggcttgagctgcttcccatctcgcaccctgcagaggcaggtatggtggtgacaagccagagtccacatgtggatggaagatacaagccatgttgaaaggaagctccatcctgctttctctttcctcttcaaactctgcccagtttctagcagccatccaagcctcctttctctcagcttctagcctcctgatgcttcaagctctaaagg

SEQ ID NO: 96556 - DNA, 158 bp, Homo sapiens
cttgttcacgtcctaagttgctctagtgttcccggcaacgtacccggcactgagttctcaggactggtgcaggtcagcggctccgcaggggtgagctgggcgctgcctgcatctgacgagatagcagtatgttagcatctgtggtgttctgtctaccg

SEQ ID NO: 96557 - DNA, 609 bp, Homo sapiens
cctggcaggtagtagcacccagcagacaacatcaaagactcccaacactgcagagcttagcacctgggaaagctgggaagaggccacatgctgaggttccaggaaggagtcagaataatccctggggcctggtagctggtaactggatctcaaatataagcttggagttcagggatggaggcataaaagcaaagagagatttcctctctaggggctaagaaatattcaggaattcaagaagaggcaaaagtcgatccaaaaaggttacaagaagtgaagttggagtaagagcggccagaagcttggtgtcaaaaagcaaagtcacagtgtagttatgccatgcaggggtgaagatcaaatgtgattccttaaatccttcatgattttgacttcatcatgtgcacagaaactaagctgagcctataggtaagggataaggggctgcggctgtggggaaaacagggcccaggggctgggtgcgttggctcatgcttgtaattccagcactttgggaggccaaggtgggtggttcacttgaggtcagaagttcgagaacaggctggccaacatgatgaaaccccgtctctactagaaatatgaaaaaaaaaa

SEQ ID NO: 96558 - DNA, 415 bp, Homo sapiens
cctgacgccatgcagatagatattgatctagatacagtctagatgctaaagtagagaaaggcgattggtgcagctgttccactgtgatggaaatgtgcagggtgagtgaatagtccctagacgtggagatattcctgactgcttttacgatactgtcagcatcctatgattgtcttgataatttctgcctttgggaaactgtttcagtttttaggtaactgagctgcatgtatcagttgagaaacggcaggctggcataatggaaaaaggacagcccaggcttgggggtcagacgtaggcggattcaaatcctaactgctgcttctcggttatgtgaacttgggccagttcctcagagtacctcatcccctgactttgtgtatcggggataattcctactttctgggttgttgtg

SEQ ID NO: 96559 - DNA, 417 bp, Homo sapiens
ccacacctggtcccatttattaaaaactttaaaaagcaatgttaaatcacatatatgctcattagaagttaaacaatgcggatgttgtataaagtaaaagttgctaacctcttgctctgcctcaccttataatcccacccactcaaggtaacacatcagtcctgttctttatttctcatttaaaccttaacattgtcctcattccggagttttaagagaaaaagacaggataaatcctgtgatttagaaacataacagagaaaaatagaatatggaagttttccattcaattaaagttttctaaacccacaaagagataatgcgatttagctattgacccagaagcttgcggatctcttattttcaaataattgattattctaggttaatgaattaaacctaataatagtcagagtc

SEQ ID NO: 96560 - DNA, 362 bp, Homo sapiens
caagatggtggtgcacgcacgaatgaggctgccgtggaggacaggttggcaactgctgaaaagatggctgttgaccaggatgttgttggccaggtatcagtcgttcctggattgcttgtgggtctccaaggccaacaccaggacaaccatttggcctcatgtgcccagtcaattcccttggtgccgaggacatgcctataaatggacgagactgctgcatgttcacgaagggtgatctgtgtaccctccacccagtctcccctactgggactgtcgtgcaaaattatggcccagtcttacaaccagggtattgacagcgagacaagcccccatctgatccagattctccagttgtacttgct

SEQ ID NO: 96561 - DNA, 485 bp, Homo sapiens
gatggcgcgggttactctagaggatcccttcgatgtgggctcagagcttgcaaaaatgtgagttatgcatgttgggaagttggagacagaaatcgctcgctttgagtctatccctacacctggcttctgcctccttccccacccactcccactccctgggtagaggagaggtctgcagagcccaccccagtacatactgtcaaaggagataagcatgctgggtcatcccactcctggcctcagtatccccactccaggtgtgggccacacacctgctggaaatagactgaggctctagagaattctacctcttcttctgaattagcagtccccagctttctccaactaccaggtttcctcaggctaatgaggacagtgggtcctgggtagtgaggctgccccaggggaggaaatttcagagaacagcttgtggatttttcagcttctccaagcatcccctctgaggccacatcgaagcttcattg

SEQ ID NO: 96562 - DNA, 493 bp, Homo sapiens
gatggcgcgggttactctagaggatcccttcgatgtgggctcagagcttgcaaaaatgtgagttatgcatgttgggaagttggagacagaaatcgctcgctttgagtctatccctacacctggcttctgcctccttccccacccactcccactccctgggtagaggagaggtctgcagagcccaccccagtacatactgtcaaaggagataagcatgctgggtcatcccactcctggcctcagtatccccactccaggtgtgggccacacacctgctggaaatagactgaggctctagagaattctacctcttcttctgaattagcagtccccagctttctccaactaccaggtttcctcaggctaatgaggacagtgggtcctgggtagtgaggctgccccaggggaggaaatttcagagaacagcttgtggatttttcagcttctccaagcatcccctctgagtccacatcgaagggatacacaagagcga

SEQ ID NO: 96563 - DNA, 455 bp, Homo sapiens
ttaaagtgaagacccagaggattttagaaacaaaagctcagagcttgcaaaaatgtgagttatgcatgttgggaagttggagacagaaatcgctcgctttgagtctatccctacacctggcttctgcctccttccccacccactcccactccctgggtagaggagaggtctgcagagcccaccccagtacatactgtcaaaggagataagcatgctgggtcatcccactcctggcctcagtatccccactccaggtgtgggccacacacctgctggaaatagactgaggctctagagaattctacctcttcttctgaattagcagtccccagctttctccaactaccaggtttcctcaggctaatgaggacagtgggtcctgggtagtgaggctgccccaggggaggaaatttcagagaacagcttgtggatttttcagcttctccaagcatccc

SEQ ID NO: 96564 - DNA, 433 bp, Homo sapiens
agaaggaaactctgtctcaaaaaaaaagaaggggagcgatcacgtgcatccctctgctgagatgggagcagcagcgtggggttgggctttgaactggcatcgtaggcattttgttttctacatttagaggaaaaatatacatcaaatattcaagtcccctgggcacagataaaagagttttcagatatctctgcagccaaatcccaaatgggatgcagaagggagaactgtgtaaaatcacgctcttccagaagctgggctttgtaatggggctggcaaaaattcccagggcatcgtttgtggcctcaatgtgattttcatgtaagtcatggattttctaaatctttgaggttagtggatctaaagaaaagcttggtaaacatccagatgttgtcaaacatatttaggtcattgttctctgacagttcgtgat

SEQ ID NO: 96565 - DNA, 195 bp, Homo sapiens
ctaaagtgggcacgtattggccttggccaagagtcaccccgtggcaaatcaggcctggggtggttcttccagcaaagccagaaatccatcttatgtgaaatccccctggtccctggtttctcaacactggcaacttctcaaaattttcaaaagcattgtgaacacgcaaaaacatgtctacagcccagcctctga

SEQ ID NO: 96566 - DNA, 212 bp, Homo sapiens
agagatgaggtctcactatgttgcccaggctggcctcaaattcgtgggttcaagtgatcctcccacctcagcctaaagtgctgggatcatgggtgtgagccaccagatgcagcctataattatagttttaaatcagttttatgatatctattctcatgaagcacctgaatttgccaataatctatctttcaaaatctttggttatcccatgc

SEQ ID NO: 96567 - DNA, 465 bp, Homo sapiens
tttcgatgtgcggactcagagcgtgagggttcaggagttagtataacacaatcagtggccaggagcgcaaacttgggggcaggatagaccccaatttcaactccaaactatttgaacatctgtgagctgcagattagcttctctaggcctcagttttcttctctataaaacgggaatggcaatacctacatcacagggttgttgtgaggtttacatgggatgatacaaagtgcttaatgtagtctcacatacactgtaggcactcagcaagtgatggttatcattctgttatcatactggctgttattattctcacctaagtaaagacaggatcaaaggtggctgcttctgctctctgactgagcagccagtacctgatcagaggcgaagggtggattctggcagagaggactctgtgggagccagggcttttcccctctcccaacctgatgggtcccactcctt

SEQ ID NO: 96568 - DNA, 414 bp, Homo sapiens
attcagtagtttcatactaaagttccaaatattacagaagtttctcagctatagagcaacttctgagaattttttaatatatctgtttttggtctttaagattactaccacttattaagcactagaggggaaaaagagaaagccacaggtaactattttttttttaactcatcttctatgtgtgatcatacaagcaatttattgtaggaaatttcaaaatatagaaagcatcaagaaaaaaactaaaagcagctgggtgcagtcgctcacacctgtaatcccagcactttgggaggccgaggctggcggatcacaaggtcaggagatcaagaccatcttggccaacatggtgaaaccccgtctctcctaaaaataaaaaaaaattagctgggtgtggtggcacatgcctgtaat

SEQ ID NO: 96569 - DNA, 226 bp, Homo sapiens
ggtgactcatagaggatccccagtttaagcgcaggcaagatttggtatactctcagaaatagaggtggacaggctaatgacattatatcatacacagaaatattctctgctgagaaggtggctttgggggccaccgggagggcctggtcctttcccgagtgagacggagttgcaggggtctctgagcccaggagggccaccgcctgactcaggagttcacaggctc

SEQ ID NO: 96570 - DNA, 421 bp, Homo sapiens
attttctaaaatactgttaaaaaattgaatcagttctcaaaatttcccacccgcccctccccgtccttttttttatggagacggtccggctctgtcacccaggctggagtgcagtggtgcgatcacagctcagcagcctgacttggtgggctcaggtgatcctcccacctcagccacccaagtagctgggactgtaggcgtgcaccaccatacccagcgaattttttgtagaggcagagtctcactattttgccccagactggatgacatttttggtttttttttttcttcttgagatggagtcttgctctgttgcacaggctggagtgcagtggtgcaatctcagctcactgcagcctccgcctcccagattcaagcgattcttcagtctcagcctctggagtaactgggattacaggca

SEQ ID NO: 96571 - DNA, 793 bp, Homo sapiens
acctgaaaaaatttagaaactgtaaacaccatttacaatacaacaatacaaagcacttagacataaatcattcaaaacatatgtatctgttgacatctttactaaggaaattataaaactttattgaagagcacaaaaaatgatctaaataaatgtagagagaaatcatgttggctgggcagggtggctcacgcctgtaatcccagtgctttgggtggccgaggtgggcgttatcccttgaggtcaggagttcaggagttcgagaccagtctggccaacatggtgaaacttcatctctactaaaaatacaaaaattagctggacgtggtggtgcatgcctgtagtgacagctactcaggaggcttaggcgagaggatcactgaaacctgggaggtggcagttgcagtgagccaagattacagcactgcactccagcctgggtgacagagtgagactctgctctgtctcaaaaaataaatactatacacatacgtgttttcgggccatcagggtgcatatcatgggcaagagcggggcactcagtgatgacatttggtgccacactattatgatgggtaattatataatctcggggtgatatcgctaaaatgggctccccgggaaaagacgggatgtcgatcacaatgtcgaataaataacgcaaacaaggtccacggaacttaccacaatccaaatgggaacgaaagtagatgtaccttaaccagatatgcataagcctggacaaaaccggacgggtattcacacagggataaaacacccctgagaaaacgca

SEQ ID NO: 96572 - DNA, 453 bp, Homo sapiens
agaaaaatacccttgggttgatcatattcaggttaaaggttgctgtatccaataaagttaaaaaaggatgttaaaatattttggctaaattgttttttatacctcaattttttcaactataaaataaatccaggtgttttccaaacaccacagaggtattatcagaaaaaaggggggacaggttccgccacaccccccaaccacagtatgagtttagtgtatcctttccactttccttaatgctcatgcacatggactcatgcattttaatttgtagaagacagagtcatactctacacaatactccacatatagtgttcacataacccatcaaggcatgctccaggccaacacacccaagtctaattcatcctctccaacagccacacatgggaagcatctccactcattcgaccagatccttactgatgggttcaagcttttcccagttct

SEQ ID NO: 96573 - DNA, 367 bp, Homo sapiens
agaaagctattatgaatctgctgaagaatgagttacataaatttaagtgtgtgctgtctgggttcagtggctcacacctgtaattccaacactttgggaggctgaggttggaggatcatttgagctcaggagttcaagatcagcctgggcaacatagtgagacttcatctccacaaaaatttaaaaaaaaattagccatttgtggtggtacacacctgtagtcccagctgctcaagaggctaaggcaggatgatcgcttgagcccaggagattgaggctgcactgagctctgatctcgccactgcaccccagcctggtgacagagtgagaccctgtctccaaaggggttaaaataaaagtgtgttct

SEQ ID NO: 96574 - DNA, 300 bp, Homo sapiens
aatagagattaatggcttttggccttggagcagagcagtatgtatgtgaggcatggcgctgggtcactgtctctaagtcatgcaggccacacaccttcctgctccctctcagtttttcctctccctttcacagttctaggagaaccatgacatgaaaatggttcccaaatcctttcccacatcatgggggcttcatcaaaggcctaggcagcaccaagagcaaaacgaaggccctgggcacaaaacaccgtaccagctttggccacttccccatgggaagacgggcagagaaaagtaccc

SEQ ID NO: 96575 - DNA, 927 bp, Homo sapiens
gtgttcgttggctttaaaaaaatcacattaacattcatgttgatatacaaaaactcttctccatctgttttgtgtgagttttaccaagaaaccaaacaactggaaggtacccacgttgaagatggcaaaactaccaactgccatttgcatgaattgttgagcatgactagtattaaaaaaacttaaaaattgatataacttttgttcctacaaattggcaaaggattttataaactagtaagtcagcattagcaaaagtgcgaaaatggcactatcagatactagtggtaagagcataaactgaatattttgaataccctacaaaactaggacagtgtcctagaatttgtaatggcataaaccagaaacaacataaataaaggaacagaatttacagtacttccatgtgatgggacaccatgaactcattaatattcaaaaaacatttaagtttaaaaatgctcagaactaaagtaacatttaaaaaacaggctagctcatctacacacaacatagtaacatggtaacaatctcataaaaaatactatatgtatagagaaagaaccagaaggaaatgctctcaaatataagaaatgttaataaggtggttagtttttagttttcttcaccctgttcagtacttctgagtatctcctatgagctcattaatctttaattttaatcatcttattttaaaaaaacaaggaccatcttgatatatgtttacttttattaaggaaaaagaatctatgaacacaggaacagaaatcaggagatcttggctctcgccctttcagtgccacaaagctgttttgtgaacctgtaaataatccatttggagtctccatgtttctcaattgtaaaatgaggatatgctgcttctacacatttcacagggtcattgcaagaataaaatgagacaatgag

SEQ ID NO: 96576 - DNA, 450 bp, Homo sapiens
aatgaaactatataaaccaaggcatttctgactccagtaggaggcagctgctgtgagggagaagccctggccaggaatctgttatagttattttgtcaccaactggaatggccttgggacaaagcacaacagctgtcttgacctcatcaatagccttgacctcatccctcgtgtcatgctgtgtcatcttcaacatctgtcacttccatcagccttagcattggccttggcctcagtttcctcatgtgtgacttgaggatgatgattcttataggaatcaataagcttgggataaagaagctattgggtcacattatacatactttaaatgcattaagtggggtctgcagttcctagagattagcagattgcattgcgtgagaacagagccatagagaatgtttgaggtcccattaatagctgataggaggctgatcagtaaacactggg

SEQ ID NO: 96577 - DNA, 890 bp, Homo sapiens
agcgggagttcacggcgggggcgggggctcaggcatggcgggctgcaggtcccgagccctgcccctcaggaaggcagctaaggcccgagcgcagcgccggtgggccggcagtgctgggggacccagtacaccctccgcagccgctggcctgggtgttaagcccctcattgccggggccggcagggcccgccgctgctccgagtgcggggtccgccaagcccacgcccacccggaaccccagctggcccacaagcgccccgggcagccccggttcccgctcgcgcctctctctccacaactccctgcgagctgagggagccggctccggccttggccagcccagaaaggggcttccacagtgcagcggtgggctgaagggctcctcaagtgccaacaaagtgggagcccaggcagaggaggcgcccagagcgagcgagggctgcgaggactgccagaatgctgtcacttctcaccaggaatcaaagtactaccagagacacagaggcccagaattagttttgcaacttggtaagaacacataaccattttttccactaagagaatattaagacatttttattcatatattatgataaaactcttatgaaattctttctgacaactttgtttggctactgtctcttaagttttgaaagtttcatgggaaatttcacatgaaaattgttttgctgggaacaccttttcatattgtgaattttttctcttgtctcttcctttagcctgtagacattatttagctttctatttaattttgttggtctacttattaattgtttcctattttagtctactgaattctgctgtgagaaataatactcataaaatactattgtgagaaaagtactcataaaatattataatgagaaaac

SEQ ID NO: 96578 - DNA, 378 bp, Homo sapiens
gtcacatcttgtagagctgttggggtgattggtttggctctctttctgtatatcatgcattgtgtgtcttacaaccagaatcccttcttgctctctgctttgagacttcatgaatacccggtaacataacattacaaatctagattttttaggtaaagtttccaaatttttatatattggctcaaaattatttaatattgtataggccaaacaaggtttgtctgtgggctgtccattgtccaggagctatcagtttttaagggctctggagagctctggctcggagcccagtttagaaagagctctgggtcttctccagtcctcatcatctgtgaatttctgattttcctggatttagtatgagccactggaaggaac

SEQ ID NO: 96579 - DNA, 349 bp, Homo sapiens
tttctgataaagcaacgaaagcaagagaggcaggccagtgtcacgcaagtggttaatgacagttgacctttgtcatttggacctttgtcattagaactttgtcaacagacctttgtcaacagacctttgtcatttggaccagaccaccatcctctagttcccactctctccaccatgtctcactgcctttcatcttttgattacttacctatgccagttagtttcctaaccagctttttaggtgatccccatgagcaccctgtgaggttggtgctaccattacccatcatacagatgaaggaactgagaggctcagagactagtatcctgaccatccatgtgaaatgca

SEQ ID NO: 96580 - DNA, 771 bp, Homo sapiens
accagtttatgatctaagagtgaaatcaacaggacttcgggaaggatgtgaatatgaatatcgtgtttatgcagaaaatgctgctggcctaagtcttccaagtgaaacctctcccttaattagggcagaagatccagtgttcctaccatctcctccatccaaacccaaaattgtggactcaggcaagacaactataactattgcctgggttaagccgctgtttgatggtggggccccgataactggatatactgtagaatacaaaaaatctgatgacactgactggaaaacttccattcagagcttacgagggacagaatatacaataagcggactaacaacaggagctgaatatgttttcagagtaaaatctgtcaataaggttggtgctagtgaccccagtgatagctctgaccctcagatagcaaaggaaagagaagaagaacctttatttgatattgacagtgaaatgaggaagaccttgattgtcaaggctggtgcctcatttaccatgactgtgcctttccgaggaagaccagtacccaatgtcttgtggagtaagccagacactgacctccgtactagagcttatgttgataccacagactctcgtacatcactgaccattgaaaatgccaacagaaatgactctggaaagtacacattaacaattcagaatgttttgagtgctgcttcactgaccttagttgtcaaagttttagataccccaggtcctccaaccaacattactgtgcaagatgtaaccaaaga

SEQ ID NO: 96581 - DNA, 286 bp, Homo sapiens
tttctgtagggcaactgggcaatacttagagaaactaagcgtgtcctacgagccacacattccactgctcagccttcactccaggggagctgtctactaggaacatgtggaaacacgtgccgggatgggtatacagtgttgcctgctgttgagaagagttggtggcagtccaggttcttcgcctaccatgaactttctataagtagaaacgtggtaaatgcttactacggaatactgcacatcagttagatcagctggatgaggccatgcacagaccttcaaagca

SEQ ID NO: 96582 - DNA, 603 bp, Homo sapiens
tgagctcagatctgacctgtttttctgagctgcagacttgtttatctaattgtctaattgacatccacttggatgtctgatagttatcccagatctaacattggccaaatcgctcttttttccccccaaatctcccttgatttctcctttaaaacccccttctcaaagctatgctcaaactaaaattcttaggagtcattctagatatttctttttgttcttaccccacttattccatcagttctgttctttctttaaaaaatagtctgaatcggccaggcgtggtctcacgcctgtaatcctagcactttgggaggccgaggcgggcggatcatgaggtcaggagtttgagaccagcctggccaatatggtgaaaccttgtctctactaataatacaaaaattaagctgggcgtggtggcacacgcctttagtcccagctacttgggagactgaggcagaagaaccgctggaacccaggaggtggaggttgtagtgagccaagatcgtgccactgcactccagcctgggtgacagagtgagactctgtctcaaaaaaacaaaactctgaatcggtcgaggggaaggggagggagagcactag

SEQ ID NO: 96583 - DNA, 478 bp, Homo sapiens
cctgacagggttgctgggagaactaaggatgctggggactgagcatggagcccggcacgtggcgcatactgttttatgggatggtgtctctgtggctggaggaaatgaggaggttctgggggtggtggctgctgggctctgcagcaggtctgactcagggggacgggaggagctgggacttcattcccaaggtcaaaggggaataaaggtgtctgaggaggaggtgtcatgttcaaagggacattttcagaagattaatcagcaagatgatataggatggactggtattggttgaaagagactggaaagtcagaccaaatgtaagagtaacggctggaccagcacgaggtgctaaagacacgttcaagggccctggccagcgaagcagggctgaagaggcacgtgtgagccgtaaccgccggggacatatgaacacccgtggacaggttgagcggagaacccagaacagcttggaggt

SEQ ID NO: 96584 - DNA, 561 bp, Homo sapiens
cagatctaccattcaacccagcatatgggtttatttcccaaaaggaaataaatccttctaccaaaaacacatatggtcatcacagtgctattcacagtagcaaagacagatcaacgtggctgcccatcaacagtggactggataaagaaaatgtggtacatataaatcatggagtattaggcagccataaaaagaacaaaatcatgtcctttgcagccagccacatggatgcagctggaagccataatctaagcaaattaagaacagaaaaccaagtactgcatgttctaacaaatgggagctaaatattgagtacctcaggatgcaaaggtgggaacaacagacactgcagactggaacactgtgggtgaggagggcagaaggataggttgaaaaactacctattgggtactatgctcactacctgggtgatgggatctgtacctcaaacctcagcatcacacaatatacccttgtaacaaacttgcacatttacccactgtttctaaatgaaaagttgaaatattttttattaaaaaacacaaaagcaatatgtttctc

SEQ ID NO: 96585 - DNA, 376 bp, Homo sapiens
catatcagcgaagagagctagtttgatttcttttcccagttggatgcagctggaagccataatctaagcaaattaagaacagaaaaccaagtactgcatgttctaacaaatgggagctaaatattgagtacctcaggatgcaaaggtgggaacaacagacactgcagactggaacactgtgggtgaggagggcagaaggataggttgaaaaactacctattgggtactatgctcactacctgggtgatgggatctgtacctcaaacctcagcatcacacaatatacccttgtaacaaacttgcacatttacccactgtttctaaatgaaaagttgaaatattttttattaaaaaacacaaaagcaatatgtttctc

SEQ ID NO: 96586 - DNA, 425 bp, Homo sapiens
ggcaggatctgtgggcttcaagctcttttttgttccctatgaattttagcaatagttttgtttctaattctgtgacaaatgacgttggtattttcaggattacattggatctgtaaattgctttgaacaatattgccattttagcaatatcgattcttccaaatccatgcttatggaaggattttccatttatttgtgtcatcttcgatttctttcagcagggctattgtgttctcattgtagagatttttcacctccttgcttagaagagttccataattaaattggaatgctctgtgcaggaaaatgctaccaaagaaatacatcatattcacgaacatggagaccttactatataacagcacatagggaaaccagtcttagtacaagcctgtgaactgagacaaggtaagtagctttgttct

SEQ ID NO: 96587 - DNA, 311 bp, Homo sapiens
catctaatacccagaattccccattccttctccctggtttccctaatgtagccagcatctggtcacatcaccacttacaaaagaggaagtgagaagctgatctaaagaatttccactaagcgagcaggtagcataaatgaatgaacacagtgagactttcccatgtgatccactcaagacacataggtttactatgtcttaccttgctatataaataatttaccaaataattatcttttctttccaaatgtactataaacacatatacaacagtgtgagcccaaacttttttttttttttttttttttaga

SEQ ID NO: 96588 - DNA, 353 bp, Homo sapiens
ccggccttgtcacccatttttctggtgaggaaacgggctgatcttcagcaagtttcctgtgtcccctttggtgccagcatccacctggtatttttgcccagccagactgcaagcttttgagcaagcagacctgaatgcccctccttctcagccttcaaggtctgcggtttgcctcacttcacctggccagcctaggacaccttcatgcccacagagccacagccctggtctacacccacctcctttgttctttactgcctctgcctcactaaccaggagcaccccaacaacctgccattcaggtacagaccccatggagatgccaccctggaactcaaacatctataagccca

SEQ ID NO: 96589 - DNA, 2641 bp, Homo sapiens
  misc_feature (103)..(103): n is a, c, g, or t
  misc_feature (108)..(108): n is a, c, g, or t
  misc_feature (111)..(111): n is a, c, g, or t
  misc_feature (113)..(113): n is a, c, g, or t
ggccggcggcggcggcggcggctccgctccgcactgcccggcgccgcctcgccatggacgcgcgcgggggcggcgggcggcccggggagagcccgggcgcganccccncgncngggccgccgccgccgccgccgcccgcgcccccccaaacagcagccgccgccgccgccgccgcccgcgccccccccgggccccgggcccgcgcccccccagcacccgccccgggccgaggcgttgcccccggaggcggcggatgagggcggcccgcggggccggctccgcagccgcgacagctcgtgcggccgccccggcaccccgggcgcggcgagcacggccaagggcagcccgaacggcgagtgcgggcgcggcgagccgcagtgcagccccgcggggcccgagggcccggcgcgggggcccaaggtgtcgttctcgtgccgcggggcggcctcggggcccgcgccggggccggggccggcggaggaggcgggcagcgaggaggcgggcccggcgggggagccgcgcggcagccaggccagcttcatgcagcgccagttcggcgcgctcctgcagccgggcgtcaacaagttctcgctgcggatgttcggcagccagaaggccgtggagcgcgagcaggagcgcgtcaagtcggcgggggcctggatcatccacccgtacagcgacttcaggttctactgggacttcaccatgctgctgttcatggtgggaaacctcatcatcatcccagtgggcatcaccttcttcaaggatgagaccactgccccgtggatcgtgttcaacgtggtctcggacaccttcttcctcatggacctggtgttgaacttccgcaccggcattgtgatcgaggacaacacggagatcatcctggaccccgagaagatcaagaagaagtatctgcgcacgtggttcgtggtggacttcgtgtcctccatccccgtggactacatcttccttatcgtggagaagggcattgactccgaggtctacaagacggcacgcgccctgcgcatcgtgcgcttcaccaagatcctcagcctcctgcggctgctgcgcctctcacgcctgatccgctacatccatcagtgggaggagatcttccacatgacctatgacctggccagcgcggtgatgaggatctgcaatctcatcagcatgatgctgctgctctgccactgggacggctgcctgcagttcctggtgcctatgctgcaggacttcccgcgcaactgctgggtgtccatcaatggcatggtgaaccactcgtggagtgaactgtactccttcgcactcttcaaggccatgagccacatgctgtgcatcgggtacggccggcaggcgcccgagagcatgacggacatctggctgaccatgctcagcatgattgtgggtgccacctgctacgccatgttcatcggccacgccactgccctcatccagtcgctggactcctcgcggcgccagtaccaggagaagtacaagcaggtggagcagtacatgtccttccacaagctgccagctgacttccgccagaagatccacgactactatgagcaccgttaccagggcaagatgtttgacgaggacagcatcctgggcgagctcaacgggcccctgcgggaggagatcgtcaacttcaactgccggaagctggtggcctccatgccgctgttcgccaacgccgaccccaacttcgtcacggccatgctgaccaagctcaagttcgaggtcttccagccgggtgactacatcatccgcgaaggcaccatcgggaagaagatgtacttcatccagcacggcgtggtcagcgtgctcactaagggcaacaaggagatgaagctgtccgatggctcctacttcggggagatctgcctgctcacccggggccgccgcacggcgagcgtgcgggctgacacctactgccgcctctattcgctgagcgtggacaacttcaacgaggtgctggaggagtaccccatgatgcggcgcgccttcgagacggtggccatcgaccgcctggaccgcatcggcaagaagaattccatcctcctgcacaaggtgcagcatgacctcaactcgggcgtattcaacaaccaggagaacgccatcatccaggagatcgtcaagtacgaccgcgagatggtgcagcaggccgagctgggtcagcgcgtgggcctcgcgtgcgagggggctcccttcacctcggtgcctcagttcccccagctgtaagacagggacggggcggcccagtggctgagaggagccggctgtggagccccgcccgccccccaccctctaggtggcccccgtccgaggaggatcgttttctaagtgcaatacttggcccgccggcttcccgctgcccccatcgcgctcacgcaataaccggcccggcccccgtccgcgcgcgtcccccggtgacctcggggagcagcaccccgcctccctccagcactggcaccgagaggcaggcctggctgcgcagggcgcgggggggaggctggggtcccgccgccgtgatgaatgtactgacgagccgaggcagcagtgcccccaccgtggccccccacgccccattaacccccacacccccattccgcgcaataaacgacagcattggcgccaa

SEQ ID NO: 96590 - DNA, 3409 bp, Homo sapiens
  misc_feature (103)..(103): n is a, c, g, or t
  misc_feature (108)..(108): n is a, c, g, or t
  misc_feature (111)..(111): n is a, c, g, or t
  misc_feature (113)..(113): n is a, c, g, or t
ggccggcggcggcggcggcggctccgctccgcactgcccggcgccgcctcgccatggacgcgcgcgggggcggcgggcggcccggggagagcccgggcgcganccccncgncngggccgccgccgccgccgccgcccgcgcccccccaaacagcagccgccgccgccgccgccgcccgcgccccccccgggccccgggcccgcgcccccccagcacccgccccgggccgaggcgttgcccccggaggcggcggatgagggcggcccgcggggccggctccgcagccgcgacagctcgtgcggccgccccggcaccccgggcgcggcgagcacggccaagggcagcccgaacggcgagtgcgggcgcggcgagccgcagtgcagccccgcggggcccgagggcccggcgcgggggcccaaggtgtcgttctcgtgccgcggggcggcctcggggcccgcgccggggccggggccggcggaggaggcgggcagcgaggaggcgggcccggcgggggagccgcgcggcagccaggccagcttcatgcagcgccagttcggcgcgctcctgcagccgggcgtcaacaagttctcgctgcggatgttcggcagccagaaggccgtggagcgcgagcaggagcgcgtcaagtcggcgggggcctggatcatccacccgtacagcgacttcaggttctactgggacttcaccatgctgctgttcatggtgggaaacctcatcatcatcccagtgggcatcaccttcttcaaggatgagaccactgccccgtggatcgtgttcaacgtggtctcggacaccttcttcctcatggacctggtgttgaacttccgcaccggcattgtgatcgaggacaacacggagatcatcctggaccccgagaagatcaagaagaagtatctgcgcacgtggttcgtggtggacttcgtgtcctccatccccgtggactacatcttccttatcgtggagaagggcattgactccgaggtctacaagacggcacgcgccctgcgcatcgtgcgcttcaccaagatcctcagcctcctgcggctgctgcgcctctcacgcctgatccgctacatccatcagtgggaggagatcttccacatgacctatgacctggccagcgcggtgatgaggatctgcaatctcatcagcatgatgctgctgctctgccactgggacggctgcctgcagttcctggtgcctatgctgcaggacttcccgcgcaactgctgggtgtccatcaatggcatggtgaaccactcgtggagtgaactgtactccttcgcactcttcaaggccatgagccacatgctgtgcatcgggtacggccggcaggcgcccgagagcatgacggacatctggctgaccatgctcagcatgattgtgggtgccacctgctacgccatgttcatcggccacgccactgccctcatccagtcgctggactcctcgcggcgccagtaccaggagaagtacaagcaggtggagcagtacatgtccttccacaagctgccagctgacttccgccagaagatccacgactactatgagcaccgttaccagggcaagatgtttgacgaggacagcatcctgggcgagctcaacgggcccctgcgggaggagatcgtcaacttcaactgccggaagctggtggcctccatgccgctgttcgccaacgccgaccccaacttcgtcacggccatgctgaccaagctcaagttcgaggtcttccagccgggtgactacatcatccgcgaaggcaccatcgggaagaagatgtacttcatccagcacggcgtggtcagcgtgctcactaagggcaacaaggagatgaagctgtccgatggctcctacttcggggagatctgcctgctcacccggggccgccgcacggcgagcgtgcgggctgacacctactgccgcctctattcgctgagcgtggacaacttcaacgaggtgctggaggagtaccccatgatgcggcgcgccttcgagacggtggccatcgaccgcctggaccgcatcggcaagaagaattccatcctcctgcacaaggtgcagcatgacctcaactcgggcgtattcaacaaccaggagaacgccatcatccaggagatcgtcaagtacgaccgcgagatggtgcagcaggccgagctgggtcagcgcgtgggcctcttcccgccgccgccgccgccgccgcaggtcacctcggccatcgccacgctgcagcaggcggcggccatgagcttctgcccgcaggtggcgcggccgctcgtggggccgctggcgctcggctcgccgcgcctcgtgcgccgcccgcccccggggcccgcacctgccgccgcctcacccgggcccccgccccccgccagccccccgggcgcgcccgccagcccccgggcaccgcggacctcgccctacggcggcctgcccgccgccccccttgctgggcccgccctgcccgcgcgccgcctgagccgcgcgtcgcgcccactgtccgcctcgcagccctcgctgcctcacggcgcccccggccccgcggcctccacacgcccggccagcagctccacaccgcgcttggggcccacgcccgctgcccgggccgccgcgcccagcccggaccgcagggactcggcctcacccggcgccgccggcggcctggacccccaggactccgcgcgctcgcgcctctcgtccaacttgtgaccctcgccgaccgccccgcgggcccaggcgggccgggggcggggccgtcatccagaccaaagccatgccattgcgctgccccggccgccagtccgcccagaagccatagacgagacgtaggtagccgtagttggacggacgggcagggccggcggggcagccccctccgcgcccccggccgtcccccctcatcgccccgcgcccacccccatcgcccctgcccccggcggcggcctcgcgtgcgagggggctcccttcacctcggtgcctcagttcccccagctgtaagacagggacggggcggcccagtggctgagaggagccggctgtggagccccgcccgccccccaccctctaggtggcccccgtccgaggaggatcgttttctaagtgcaatacttggcccgccggcttcccgctgcccccatcgcgctcacgcaataaccggcccggcccccgtccgcgcgcgtcccccggtgacctcggggagcagcaccccgcctccctccagcactggcaccgagaggcaggcctggctgcgcagggcgcgggggggaggctggggtcccgccgccgtgatgaatgtactgacgagccgaggcagcagtgcccccaccgtggccccccacgccccattaacccccacacccccattccgcgcaataaacgacagcattggcgccaa

SEQ ID NO: 96591 - DNA, 2716 bp, Homo sapiens
taagtatatgaaaagatgctcatatgtcatcagggaattacaaatttaaaacaatgacataccactacacacctattagatgggcccaaacccaaaagattgacaacattaaatactggcataaatatggagcaacaggaactctcattcattgatggtgggaatgcaaaatagtatagccactttggaagacagtttggcagtttcctaccaaagcaaacatacttttaccatgtgatccagccatcatgctccttggcatttacgtaaatgaaatgaaatcttatgtctacacaaaaacctgtacatagatatttacagcagatttattcataactgccaaaatttggaagcaaccaagatgctcttcagtaggtgaatggataaactgtgggtcatccagacaatggatattattcatcactaaaaagaaatgagctatcaaggcataaaaagacctaccagaaacttaaattgcatattattaagtgcaagaagcctatatgaaaagataacatactatatgatttcaactagataacattttagaaaaggcaaaactatggagacagtaaaaagatcactggttgccaggggtcagtgtggagggaaggatgaataggtagagcacaggggatattttgggcagtgaaactattccttatgatactacaatcatagatgcatgtcattatacatttgcccaaacccacagaatgcacaacacaaagaatgaaccataatgtgaactatggaatttgggttctaataatgtgtcagtgtaggttcttcgattgtaacaaaggtaacactctggtgggggatgttgacaatgggggaggctgtgcatgtgcggggacaggggtatatggaaactgtatactttctgctcaatttcattgtgaatctaaaactgctttgaaaaacaaagtctattaagtcagtcagttaatccttcactatttcaccatctccttcaccttacggtgaaatcaaagtaacaaacagggctgcaaggccctatgcaatctggcctccttccccattcctgcctccctccctcctgcttactttgctccagccatgctggcctccttgccagccagaatgccaggcacactgcacctctgggcctttgcacttgctgtgctctctcccaggaacattcttccctgagagagcctccctggttccctgccatcttccttcaggtctttattcaaatgtcaccttcttcgtgaggtcttccccatcactctaattaaaaatgcagctttagctgtgcacagtggctcacacctgtaatcccaaagtgctgggattacaggcgtgagccaccgtgcccagcccaaaagcccatttctaatcgtccaccttcccagatgcttcccaggtgcaccgtgacccctgtgtgctgtgtggtcttttgtagggagaaaggatcaatcaagaaagggaaacccctgctcccatggagcttgccttctggtggaataagaaaattagtaaacattaattaataaataggtacttctctatgcaagtttacagaaaaataaacaaatatgtacataagaaagaagatggttttggatagcgataagtgctggatgaaaatgaaaccaggtgataagccagcgatgactccactgagggaggttgtgagcgttacacaacatggtcagaaaagaccccgttggacccaagtcccagctggtaagaaagtgccagcttcatgacggtggggagaagcattccagtatcaccgttttaaaatatgagcatcctaaatattacacaaaccatacttacgctaaatatttgggatctacactaaaaatgtagtgtagtgtaaggatggggtttcaccatgtgggccaggctggtctcgagctcccaacctcaagctatccacccacctcagcctcccaaagtgctgggattataggcgtgagccactgcacccagccaatctgatgggttttttttttttttgagacggagtcttgctctgtcacccaggctggagtgcagtggcgcgatctccgctcactgcaagctccacctcccgggttcacgccattctcctgccacaggctcctgagtaaccccttttgcttggttctcattctctctcttggctgccaccatgcaagacctgcctttcgccttctgccatgattgggaggcctccccagccacatggaactgtgagtccattcaacttctttttctttgtaaattacccagtctcgggtatggctttatcagcagcatgaaaacagacaaatatactgttgtttcttattaaatgttattggcttattttgaaaacaaaagcttaccaaatacatgtgattatgggaaggggccagaaagttacactgcaagtaaaaatatcagtaactatgtttactgggtggcgatggcaaaaacaatagtttttcctttttttttttttggagacaggatcttgctctgtcgcccaggctacagtgcagtggtgcaatcacagcccactgcagcctcgacctccggagctcaattgatcctcccacctcagcctcctgagtagctgcatctacagatgtgagccaccaaaaaaaaaaaaaaattatttttgacagtgcaagactctgtctcaaaaacaaacaatatccttttctatgtagaaaacccaaaataataaacaaaaaaaaactttcaaaaaaaaaaa

SEQ ID NO: 96592 - DNA, 1995 bp, Homo sapiens
taagtatatgaaaagatgctcatatgtcatcagggaattacaaatttaaaacaatgacataccactacacacctattagatgggcccaaacccaaaagattgacaacattaaatactggcataaatatggagcaacaggaactctcattcattgatggtgggaatgcaaaatagtatagccactttggaagacagtttggcagtttcctaccaaagcaaacatacttttaccatgtgatccagccatcatgctccttggcatttacgtaaatgaaatgaaatcttatgtctacacaaaaacctgtacatagatatttacagcagatttattcataactgccaaaatttggaagcaaccaagatgctcttcagtaggtgaatggataaactgtgggtcatccagacaatggatattattcatcactaaaaagaaatgagctatcaaggcataaaaagacctaccagaaacttaaattgcatattattaagtgcaagaagcctatatgaaaagataacatactatatgatttcaactagataacattttagaaaaggcaaaactatggagacagtaaaaagatcactggttgccaggggtcagtgtggagggaaggatgaataggtagagcacaggggatattttgggcagtgaaactattccttatgatactacaatcatagatgcatgtcattatacatttgcccaaacccacagaatgcacaacacaaagaatgaaccataatgtgaactatggaatttgggttctaataatgtgtcagtgtaggttcttcgattgtaacaaaggtaacactctggtgggggatgttgacaatgggggaggctgtgcatgtgcggggacaggggtatatggaaactgtatactttctgctcaatttcattgtgaatctaaaactgctttgaaaaacaaagtctattaagtcagtcagttaatccttcactatttcaccatctccttcaccttacggtgaaatcaaagtaacaaacagggctgcaaggccctatgcaatctggcctccttccccattcctgcctccctccctcctgcttactttgctccagccatgctggcctccttgccagccagaatgccaggcacactgcacctctgggcctttgcacttgctgtgctctctcccaggaacattcttccctgagagagcctccctggttccctgccatcttccttcaggtctttattcaaatgtcaccttcttcgtgaggtcttccccatcactctaattaaaaatgcagctttagctgtgcacagtggctcacacctgtaatcccaaagtgctgggattacaggcgtgagccaccgtgcccagcccaaaagcccatttctaatcgtccaccttcccagatgcttcccaggtgcaccgtgacccctgtgtgctgtgtggtcttttgtagggagaaaggatcaatcaagaaagggaaacccctgctcccatggagcttgccttctggtggaataagaaaattagtaaacattaattaataaataggtacttctctatgcaagtttacagaaaaataaacaaatatgtacataagaaagaagatggttttggatagcgataagtgctggatgaaaatgaaaccaggtgataagccagcgatgactccactgagggaggttgtgagcgttacacaacatggtcagaaaagaccccgttggacccaagtcccagctggtaagaaagtgccagcttcatgacggtggggagaagcattccagtatcaccgttttaaaatatgagcatcctaaatattacacaaaccatacttacgctaaatatttgggatctacactaaaaatgtagtgtagtgtaaggatggggtttcaccatgtgggccaggctggtctcgagctcccaacctcaagctatccacccacctcagcctcccaaagtgctgggattataggcgtgagccactgcacccagcctgggtgacagaatgagacccctgac

SEQ ID NO: 96593 - DNA, 2457 bp, Homo sapiens
taagtatatgaaaagatgctcatatgtcatcagggaattacaaatttaaaacaatgacataccactacacacctattagatgggcccaaacccaaaagattgacaacattaaatactggcataaatatggagcaacaggaactctcattcattgatggtgggaatgcaaaatagtatagccactttggaagacagtttggcagtttcctaccaaagcaaacatacttttaccatgtgatccagccatcatgctccttggcatttacgtaaatgaaatgaaatcttatgtctacacaaaaacctgtacatagatatttacagcagatttattcataactgccaaaatttggaagcaaccaagatgctcttcagtaggtgaatggataaactgtgggtcatccagacaatggatattattcatcactaaaaagaaatgagctatcaaggcataaaaagacctaccagaaacttaaattgcatattattaagtgcaagaagcctatatgaaaagataacatactatatgatttcaactagataacattttagaaaaggcaaaactatggagacagtaaaaagatcactggttgccaggggtcagtgtggagggaaggatgaataggtagagcacaggggatattttgggcagtgaaactattccttatgatactacaatcatagatgcatgtcattatacatttgcccaaacccacagaatgcacaacacaaagaatgaaccataatgtgaactatggaatttgggttctaataatgtgtcagtgtaggttcttcgattgtaacaaaggtaacactctggtgggggatgttgacaatgggggaggctgtgcatgtgcggggacaggggtatatggaaactgtatactttctgctcaatttcattgtgaatctaaaactgctttgaaaaacaaagtctattaagtcagtcagttaatccttcactatttcaccatctccttcaccttacggtgaaatcaaagtaacaaacagggctgcaaggccctatgcaatctggcctccttccccattcctgcctccctccctcctgcttactttgctccagccatgctggcctccttgccagccagaatgccaggcacactgcacctctgggcctttgcacttgctgtgctctctcccaggaacattcttccctgagagagcctccctggttccctgccatcttccttcaggtctttattcaaatgtcaccttcttcgtgaggtcttccccatcactctaattaaaaatgcagctttagctgtgcacagtggctcacacctgtaatcccaaagtgctgggattacaggcgtgagccaccgtgcccagcccaaaagcccatttctaatcgtccaccttcccagatgcttcccaggtgcaccgtgacccctgtgtgctgtgtggtcttttgtagggagaaaggatcaatcaagaaagggaaacccctgctcccatggagcttgccttctggtggaataagaaaattagtaaacattaattaataaataggtacttctctatgcaagtttacagaaaaataaacaaatatgtacataagaaagaagatggttttggatagcgataagtgctggatgaaaatgaaaccaggtgataagccagcgatgactccactgagggaggttgtgagcgttacacaacatggtcagaaaagaccccgttggacccaagtcccagctggtaagaaagtgccagcttcatgacggtggggagaagcattccagtatcaccgttttaaaatatgagcatcctaaatattacacaaaccatacttacgctaaatatttgggatctacactaaaaatgtagtgtagtgtaaggatggggtttcaccatgtgggccaggctggtctcgagctcccaacctcaagctatccacccacctcagcctcccaaagtgctgggattataggcgtgagccactgcacccagccaatctgatgggttttttttttttttgagacggagtcttgctctgtcacccaggctggagtgcagtggcgcgatctccgctcactgcaagctccacctcccgggttcacgccattctcctgccacaggctcctgagtaaccccttttgcttggttctcattctctctcttggctgccaccatgcaagacctgcctttcgccttctgccatgattgggaggcctccccagccacatggaactgatcttgctctgtcgcccaggctacagtgcagtggtgcaatcacagcccactgcagcctcgacctccggagctcaattgatcctcccacctcagcctcctgagtagctgcatctacagatgtgagccaccaaaaaaaaaaaaaaattatttttgacagtgcaagactctgtctcaaaaacaaacaatatccttttctatgtagaaaacccaaaataataaacaaaaaaaaactttcaaaaaaaaaaa

SEQ ID NO: 96594 - DNA, 421 bp, Homo sapiens
ttgatcctcccacctcagcctcctgagtagctgcatctacagatgtgagccaccaaaaaaaaaaaaaaattatttttgacacaggatctagcactgttgcccaggctgaagtgcatctgggctcactgcaagcttctcctgagctcaaaccaccctctcaccttagcctcccaagtagctgggactagagcctcactccaccacgcccggccttgtttttcctttgtgaacatcgttctacaatgctgtgggtacatcgctttttcaatatgaagttttctttggaagtttataaatccagtttgggccttggaggaaagcagtcagtgatagaaattttgtgactctgagtgagtttggtggagcttcgagttgtagattgtttcccagggaccgctgcagacacaaagccctgactgca

SEQ ID NO: 96595 - DNA, 748 bp, Homo sapiens
taaaagagaagacagttatttaaggaggtttgagattcaagggcttttttaattttaaaattaaccatggtagaaacctgtgtgttaatatgctgagggaagttgccaatagtgagatgaaagatctaggcaaggggatagcaaggtgactgcaccagatacctggatctgggcaggaataaacctcaacagtgatcatgttgaccttgagtgacagggtataatgtttgggaaggtgctttgtaaactataaggggcaatacaaacatgtagtacaccttctctgagatccgggaaaggacaacctgagcataggttggggctggtcataggccactctcccctactgtttctctagagtgtgtgtagtccctagcaagtctcagatgcctcgagtcgtggatggaaacaaggtcccaggaccattgtcctgagcctcctttctccgtgctctacctggggaatgcttgactatcaacccacagaagctctctctggagcctcactgcctaaagagcttcttgtcgtaattgtaacctgtcatggttaaccccttgcaagcatgccctgccccttgtctctcccaagctttggctgctgcagcttctttccacaaaatcccagcagatagccgggcgtcgtggtgcgtgtctgtaatcccagctactcgggaggctgaggcatgagaatcgcttgaacccaggaggtggaggttgcagtgatattgcgccactgcactccagcagcc

SEQ ID NO: 96596 - DNA, 356 bp, Homo sapiens
ggagggtgtctgtgcacgcatgtgcacacttaaatgcatgtgtgtgcataacccactgtaaccattgtgaggattattatctaactgtagactgctcccctttaggagctttttcatcatgttggggacagagacaggaagatgggaggctgatcttgatagcgtgaggccctgccctcaggactgtgattctagcagaggcatggtgggatcttagggctcgtatgtgcaaagaaaggctgtgcgaaactcaaaagctggggcttctctttacggtgcctcgatctcttaaaaggccccttctacccaccttgctcctattggttaatttctcagctacacagaaaagtctagtg

SEQ ID NO: 96597 - DNA, 770 bp, Homo sapiens
agccgccggggaaggagacgctgcccttccgcagcgatggcatcccggctctgtggaggggccctctggtatgtgtgtccctgtccttctggggcgtggatggtgcctgggacccagctggcaaccagttgaagacgttctccttggaagctcttggccctgaggactttgcctggggcattggccctgccatggcgttccggagggccgagggcacgtctatgatccaggccctggccatgacggtggccgagatccccgtgttcctgtacacgacgtttgggcagtctgcattctcccagctacggttgacgccaggcctgcggaaagtcctctttgccacggccctggggactgtggccctggccctggctgcccaccagctgaagaggcgacggaggaggaagaagcaggttggtcccgagatgggaggggagcagctgggcacggtgcccctccctatcctcttggccaggaaggtcccttcagtgaagaaagatggagtctcgctctgttgccaggctggagtgcagtggcgcaatcttggctcactgcaaccttcacctgccaggttcaagcgattctcctgcctcagcctcctgcgtagctgggattataggataatccaaccggagagtcagagccccagcagaagagcagaaacctgagtgggatctcttccattgagcccagaagcaatcgggtctccacagtgtggctccatgatggggggaatatccagcccaaacgcgtgctcggactatggatgc

SEQ ID NO: 96598 - DNA, 1665 bp, Homo sapiens
atctagaggatcctcccagaggcacaaggaggcagaggcacatggggggtggcagagagaaggctcctcctcccttccctgggttggtatctgacagctgtggtggctgagggccgttgcccctgactttgccccacccccatcatctgggagtccccaaggcccagaggggacatttccatggagaagaacggttcctgggggaagcagaggccaggaccagtggggcctgtgggagagaaaggctgtgagagagggggttgttgtggagaattgggacaggcagagccaggatgccccaggtgggggaccccaaaacctcccatcgctccagggctgctgacaagggtgctgggagggtggaggtgaaggatggggcctagagccctgtggtgaaggtcacagtgtcctgagctagaagccacctgtggctatatggtctcagcatccagctggcctgtcctgatgccctccccacctcaaccgccttctcagagagtttgcaactccagagaaggagagtggggccaccttagtgggcagcaggcctgggccatccagagatggggcagaggtgggcctcccactcctgtgctctcttctgagcaggaactgggcccttgacagtgtcctttgacattccctcgccctaccaaagatcgtcttttctcctcccacctctgtcaccaccaaagacgggcggaggtggggctgggccctcctgcccccgcccatcccccttccatgagcccagacctccctgggtggtgctaggctctgagctgggggctcagaccagggatcgctcaggcccctgtcacctgtgggcccggggaccacttgggggaggtcagaggatgtatgtggccggaccagcttccccaccttcattaggacaagaaactgcccagcactttgccttcagttcaacgcacaaacgctcctggggcctcatgggggcagagcctcccctgggcctgcagagagtcctgttagcagcgacgtccccccgccgcggggtcctgtcagcccggcagtgtcttctcagtgtcttcacctgagcgagtgtctgtggccccaacgcgttctgctgtggctctgccctttccaggttgagaggcctgcaggagaaacacactcccctcctgggtttccacactcaggaggtcagaggactggctcctgtgaccagggcccctctcccctgaatgggaaaggggtctggggatgggagggcgcaccacagagaggagatgatgctgggtgtggcccatcttctgtgggccccttcccagacaccggatccatgggcactaacccgcctcccaggctgatgcccggaggcagcttcctgggcaggagggttccatgggcactaacccacctcccaggctgatgcctggaggcagcctccagggcaggaaggaccctgtgctccccgccccccatcctgacatcctgttcttttgcacttaccctgtgctgtgaatgtaacagtgggccttggccccgcccactctgatttgcattttcatttgtgtttgtttacacatccatgcactgcctgtagcagtcgattgtcacagcttcgacttttggatggtagagtgtgtgcactgactgtgagtcgaataaacaattgagacgatttccttccaaaagcca

SEQ ID NO: 96599 - DNA, 2537 bp, Homo sapiens
ggagcaggcgtgcgggccgtgagcggcgccagagggtacctggctctgtggaggggccctctggtatgtgtgtccctgtccttctggggcgtggatggtgcctgggacccagctggcaaccagttgaagacgttctccttggaagctcttggccctgaggactttgcctggggcattggccctgccatggcgttccggagggccgagggcacgtctatgatccaggccctggccatgacggtggccgagatccccgtgttcctgtacacgacgtttgggcagtctgcattctcccagctacggttgacgccaggcctgcggaaagtcctctttgccacggccctggggactgtggccctggccctggctgcccaccagctgaagaggcgacggaggaggaagaagcaggttggtcccgagatgggaggggagcagctgggcacggtgcccctccctatcctcttggccaggaaggtcccttcagtgaagaaaggatactccagccggagagtccagagccccagcagcaagagcaacgacaccctgagtggcatctcttccattgagcccagcaagcactcgggctcctcccacagtgtggcctcgatgatggcagtgaactcatccagccccacagccgcgtgctcgggactatgggatgccagagggatggaggagtctctgaccaccagcgacggcaatgcagagagcctgtacatgcaaggcatggagctgtttgaggaagctctgcagaagtgggagcaggcactaagcgtgggccagcggggggacagcggcagcacccccatgcccagggacggcctccggaacccagagactgcatcagagccactgtctgagccagagtcacagcggaaggagtttgcagagaagctggagtccctgctgcaccgtgcctaccacctgcaggaggagttcggctccaccttccccgcagacagcatgctgctagacctcgagaggaccctcatgctgcccctgaccgagggctcgctgcggctgcgggcggacgatgaggacagcctgacttcagaggattccttcttctccgccaccgagctctttgagtccctgcagactggagattacccgatcccactctccagacccgccgctgcctatgaggaggccctgcagctggtgaaggaggggagagtgccttgccggaccctcaggacggagctgctgggctgctacagtgaccaggactttctggccaagctgcactgtgtgcggcaggccttcgaggggcttctggaagacaagagtaaccagcttttcttcgggaaagtgggccgacagatggtgacaggcctgatgaccaaggctgagaagagccccaaaggcttcctggagagctacgaggagatgctgagctatgccctgcggcccgagacctgggccacaacacggctggagctggagggccgaggggtggtatgcatgagcttcttcgacatcgtgctggacttcatcctcatggacgccttcgaggacctggagaaccctccggcctcggtgctcgccgtcctgcggaaccgctggctgtcagacagcttcaaggagacggccttggccactgcttgctggtcggtcctgaaagccaagaggaggctgctgatggtgcctgatggcttcatctcccatttctactccgtatcggagcatgtgagccctgtcctagccttcggcttccttggacccaagcctcagcttgctgaagtctgtgctttcttcaagcaccagattgtgcagtacctgagggacatgttcgacctggacaatgtgcgctacacgtcactgcccgcgctggcagacgacatcctgcagctgtcccggcgccgcagcgagatattgctggggtacctgggggtgcccgcggccagcagcgcaggcgtgaatggggcgctgccccgagagaatgggcccctgggggagctgcagtagaggcggcacgggctggggggtggcagagagaaggctcctcctcccttccctgggtttccacactcaggaggtcagaggactggctcctgtgaccagggcccctctcccctgaatgggaaaggggtctggggatgggagggcgcaccacagagaggagatgatgctgggtgtggcccatcttctgtgggccccttcccagacaccggatccatgggcactaacccgcctcccaggctgatgcccggaggcagcttcctgggcaggagggttccatgggcactaacccacctcccaggctgatgcctggaggcagcctccagggcaggaaggaccctgtgctccccgccccccatcctgacatcctgttcttttgcacttaccctgtgctgtgaatgtaacagtgggccttggccccgcccactctgatttgcattttcatttgtgtttgtttacacatccatgcactgcctgtagcagtcgattgtcacagcttcgacttttggatggtagagtgtgtgcactgactgtgagtcgaataaacaattgagacgatttccttccaaaagcca

SEQ ID NO: 96600 - DNA, 2328 bp, Homo sapiens
ggagcaggcgtgcgggccgtgagcggcgccagagggtacctggctctgtggaggggccctctggtatgtgtgtccctgtccttctggggcgtggatggtgcctgggacccagctggcaaccagttgaagacgttctccttggaagctcttggccctgaggactttgcctggggcattggccctgccatggcgttccggagggccgagggcacgtctatgatccaggccctggccatgacggtggccgagatccccgtgttcctgtacacgacgtttgggcagtctgcattctcccagctacggttgacgccaggcctgcggaaagtcctctttgccacggccctggggactgtggccctggccctggctgcccaccagctgaagaggcgacggaggaggaagaagcaggttggtcccgagatgggaggggagcagctgggcacggtgcccctccctatcctcttggccaggaaggtcccttcagtgaagaaaggatactccagccggagagtccagagccccagcagcaagagcaacgacaccctgagtggcatctcttccattgagcccagcaagcactcgggctcctcccacagtgtggcctcgatgatggcagtgaactcatccagccccacagccgcgtgctcgggactatgggatgccagagggatggaggagtctctgaccaccagcgacggcaatgcagagagcctgtacatgcaaggcatggagctgtttgaggaagctctgcagaagtgggagcaggcactaagcgtgggccagcggggggacagcggcagcacccccatgcccagggacggcctccggaacccagagactgcatcagagccactgtctgagccagagtcacagcggaaggagtttgcagagaagctggagtccctgctgcaccgtgcctaccacctgcaggaggagttcggctccaccttccccgcagacagcatgctgctagacctcgagaggaccctcatgctgcccctgaccgagggctcgctgcggctgcgggcggacgatgaggacagcctgacttcagaggattccttcttctccgccaccgagctctttgagtccctgcagactggagattacccgatcccactctccagacccgccgctgcctatgaggaggccctgcagctggtgaaggaggggagagtgccttgccggaccctcaggacggagctgctgggctgctacagtgaccaggactttctggccaagctgcactgtgtgcggcaggccttcgaggggcttctggaagacaagagtaaccagcttttcttcgggaaagtgggccgacagatggtgacaggcctgatgaccaaggctgagaagagccccaaaggcttcctggagagctacgaggagatgctgagctatgccctgcggcccgagacctgggccacaacacggctggagctggagggccgaggggtggtatgcatgagcttcttcgacatcgtgctggacttcatcctcatggacgccttcgaggacctggagaaccctccggcctcggtgctcgccgtcctgcggaaccgctggctgtcagacagcttcaaggagacggccttggccactgcttgctggtcggtcctgaaagccaagaggaggctgctgatggtgcctgatggcttcatctcccatttctactccgtatcggagcatgtgagccctgtcctagccttcggcttccttggacccaagcctcagcttgctgaagtctgtgctttcttcaagcaccagattgtgcagtacctgagggacatgttcgacctggacaatgtgcgctacacgtcactgcccgcgctggcagacgacatcctgcagctgtcccggcgccgcagcgagatattgctggggtacctgggggtgcccgcggccagcagcgcaggcgtgaatggggcgctgccccgagagaatgggccccttcccagacaccggatccatgggcactaacccgcctcccaggctgatgcccggaggcagcttcctgggcaggagggttccatgggcactaacccacctcccaggctgatgcctggaggcagcctccagggcaggaaggaccctgtgctccccgccccccatcctgacatcctgttcttttgcacttaccctgtgctgtgaatgtaacagtgggccttggccccgcccactctgatttgcattttcatttgtgtttgtttacacatccatgcactgcctgtagcagtcgattgtcacagcttcgacttttggatggtagagtgtgtgcactgactgtgagtcgaataaacaattgagacgatttccttccaaaagcca

SEQ ID NO: 96601 - DNA, 1940 bp, Homo sapiens
ggagcaggcgtgcgggccgtgagcggcgccagagggtacctggctctgtggaggggccctctggtatgtgtgtccctgtccttctggggcgtggatggtgcctgggacccagctggcaaccagttgaagacgttctccttggaagctcttggccctgaggactttgcctggggcattggccctgccatggcgttccggagggccgagggcacgtctatgatccaggccctggccatgacggtggccgagatccccgtgttcctgtacacgacgtttgggcagtctgcattctcccagctacggttgacgccaggcctgcggaaagtcctctttgccacggccctggggactgtggccctggccctggctgcccaccagctgaagaggcgacggaggaggaagaagcaggttggtcccgagatgggaggggagcagctgggcacggtgcccctccctatcctcttggccaggaaggtcccttcagtgaagaaaggatactccagccggagagtccagagccccagcagcaagagcaacgacaccctgagtggcatctcttccattgagcccagcaagcactcgggctcctcccacagtgtggcctcgatgatggcagtgaactcatccagccccacagccgcgtgctcgggactatgggatgccagagggatggaggagtctctgaccaccagcgacggcaatgcagagagcctgtacatgcaaggcatggagctgtttgaggaagctctgcagaagtgggagcaggcactaagcgtgggccagcggggggacagcggcagcacccccatgcccagggacggcctccggaacccagagactgcatcagagccactgtctgagccagagtcacagcggaaggagtttgcagagaagctggagtccctgctgcaccgtgcctaccacctgcaggaggagttcggctccaccttccccgcagacagcatgctgctagacctcgagaggaccctcatgctgcccctgaccgagggctcgctgcggctgcgggcggacgatgaggacagcctgacttcagaggattccttcttctccgccaccgagctctttgagtccctgcagactggagattacccgatcccactctccagacccgccgctgcctatgaggaggccctgcagctggtgaaggaggggagagtgccttgccggaccctcaggacggagctgctgggctgctacagtgaccaggactttctggccaagctgcactgtgtgcggcaggccttcgaggggcttctggaagacaagagtaaccagcttttcttcgggaaagtgggccgacagatggtgacaggcctgatgaccaaggctgagaagagccccaaaggcttcctggagagctacgaggagatgctgagctatgccctgcggcccgagacctgggccacaacacggctggagctggagggccgaggggtggtatgcatgagcttcttcgacatcgtgctggacttcatcctcatggacgccttcgaggacctggagaaccctccggcctcggtgctcgccgtcctgcggaaccgctggctgtcagacagcttcaaggagacggtgggtcactgccctgctctcagacccacacttgctcacatcagcccgtgtggttgcctggctccgtcccctctgtccctagcactggcaccagggctgggcccccaccccctagatccgcggctgccaggcctgggagaccagagtctgccctggagaagcctccagggtgccccgttgctgcctggtgccccagtttagaaccaacatggtgtgcgctttcttcctattgtgtggttttacttttgtgctggtatgaattcgattccattttaatgcatcctgttaaatcaagttaaaagaggggaaagcaaaaccaaaaggaaaaaaaggcacagagtgagagacaa

SEQ ID NO: 96602 - DNA, 3604 bp, Homo sapiens
ggagcaggcgtgcgggccgtgagcggcgccagagggtacctggctctgtggaggggccctctggtatgtgtgtccctgtccttctggggcgtggatggtgcctgggacccagctggcaaccagttgaagacgttctccttggaagctcttggccctgaggactttgcctggggcattggccctgccatggcgttccggagggccgagggcacgtctatgatccaggccctggccatgacggtggccgagatccccgtgttcctgtacacgacgtttgggcagtctgcattctcccagctacggttgacgccaggcctgcggaaagtcctctttgccacggccctggggactgtggccctggccctggctgcccaccagctgaagaggcgacggaggaggaagaagcaggttggtcccgagatgggaggggagcagctgggcacggtgcccctccctatcctcttggccaggaaggtcccttcagtgaagaaaggatactccagccggagagtccagagccccagcagcaagagcaacgacaccctgagtggcatctcttccattgagcccagcaagcactcgggctcctcccacagtgtggcctcgatgatggcagtgaactcatccagccccacagccgcgtgctcgggactatgggatgccagagggatggaggagtctctgaccaccagcgacggcaatgcagagagcctgtacatgcaaggcatggagctgtttgaggaagctctgcagaagtgggagcaggcactaagcgtgggccagcggggggacagcggcagcacccccatgcccagggacggcctccggaacccagagactgcatcagagccactgtctgagccagagtcacagcggaaggagtttgcagagaagctggagtccctgctgcaccgtgcctaccacctgcaggaggagttcggctccaccttccccgcagacagcatgctgctagacctcgagaggaccctcatgctgcccctgaccgagggctcgctgcggctgcgggcggacgatgaggacagcctgacttcagaggattccttcttctccgccaccgagctctttgagtccctgcagactggagattacccgatcccactctccagacccgccgctgcctatgaggaggccctgcagctggtgaaggaggggagagtgccttgccggaccctcaggacggagctgctgggctgctacagtgaccaggactttctggccaagctgcactgtgtgcggcaggccttcgaggggcttctggaagacaagagtaaccagcttttcttcgggaaagtgggccgacagatggtgacaggcctgatgaccaaggctgagaagagccccaaaggcttcctggagagctacgaggagatgctgagctatgccctgcggcccgagacctgggccacaacacggctggagctggagggccgaggggtggtatgcatgagcttcttcgacatcgtgctggacttcatcctcatggacgccttcgaggacctggagaaccctccggcctcggtgctcgccgtcctgcggaaccgctggctgtcagacagcttcaaggagacggccttggccactgcttgctggtcggtcctgaaagccaagaggaggctgctgatggtgcctgatggcttcatctcccatttctactccgtatcggagcatgtgagccctgtcctagccttcggcttccttggacccaagcctcagcttgctgaagtctgtgctttcttcaagcaccagattgtgcagtacctgagggacatgttcgacctggacaatgtgcgctacacgtcactgcccgcgctggcagacgacatcctgcagctgtcccggcgccgcagcgagatattgctggggtacctgggggtgcccgcggccagcagcgcaggcgtgaatggggcgctgccccgagagaatgggcccctgggggagctgcagtagaggcggcacgggctggggggtggcagagagaaggctcctcctcccttccctgggttggtatctgacagctgtggtggctgagggccgttgcccctgactttgccccacccccatcatctgggagtccccaaggcccagaggggacatttccatggagaagaacggttcctgggggaagcagaggccaggaccagtggggcctgtgggagagaaaggctgtgagagagggggttgttgtggagaattgggacaggcagagccaggatgccccaggtgggggaccccaaaacctcccatcgctccagggctgctgacaagggtgctgggagggtggaggtgaaggatggggcctagagccctgtggtgaaggtcacagtgtcctgagctagaagccacctgtggctatatggtctcagcatccagctggcctgtcctgatgccctccccacctcaaccgccttctcagagagtttgcaactccagagaaggagagtggggccaccttagtgggcagcaggcctgggccatccagagatggggcagaggtgggcctcccactcctgtgctctcttctgagcaggaactgggcccttgacagtgtcctttgacattccctcgccctaccaaagatcgtcttttctcctcccacctctgtcaccaccaaagacgggcggaggtggggctgggccctcctgcccccgcccatcccccttccatgagcccagacctccctgggtggtgctaggctctgagctgggggctcagaccagggatcgctcaggcccctgtcacctgtgggcccggggaccacttgggggaggtcagaggatgtatgtggccggaccagcttccccaccttcattaggacaagaaactgcccagcactttgccttcagttcaacgcacaaacgctcctggggcctcatgggggcagagcctcccctgggcctgcagagagtcctgttagcagcgacgtccccccgccgcggggtcctgtcagcccggcagtgtcttctcagtgtcttcacctgagcgagtgtctgtggccccaacgcgttctgctgtggctctgccctttccaggttgagaggcctgcaggagaaacacactcccctcctgggtttccacactcaggaggtcagaggactggctcctgtgaccagggcccctctcccctgaatgggaaaggggtctggggatgggagggcgcaccacagagaggagatgatgctgggtgtggcccatcttctgtgggccccttcccagacaccggatccatgggcactaacccgcctcccaggctgatgcccggaggcagcttcctgggcaggagggttccatgggcactaacccacctcccaggctgatgcctggaggcagcctccagggcaggaaggaccctgtgctccccgccccccatcctgacatcctgttcttttgcacttaccctgtgctgtgaatgtaacagtgggccttggccccgcccactctgatttgcattttcatttgtgtttgtttacacatccatgcactgcctgtagcagtcgattgtcacagcttcgacttttggatggtagagtgtgtgcactgactgtgagtcgaataaacaattgagacgatttccttccaaaagcca

SEQ ID NO: 96603 - DNA, 3628 bp, Homo sapiens
gctggtaccggtccgaggagttatgatgggaaggagacgctgccttcctgtagcgatggcatcccggctctgtggaggggccctctggtatgtgtgtccctgtccttctggggcgtggatggtgcctgggacccagctggcaaccagttgaagacgttctccttggaagctcttggccctgaggactttgcctggggcattggccctgccatggcgttccggagggccgagggcacgtctatgatccaggccctggccatgacggtggccgagatccccgtgttcctgtacacgacgtttgggcagtctgcattctcccagctacggttgacgccaggcctgcggaaagtcctctttgccacggccctggggactgtggccctggccctggctgcccaccagctgaagaggcgacggaggaggaagaagcaggttggtcccgagatgggaggggagcagctgggcacggtgcccctccctatcctcttggccaggaaggtcccttcagtgaagaaaggatactccagccggagagtccagagccccagcagcaagagcaacgacaccctgagtggcatctcttccattgagcccagcaagcactcgggctcctcccacagtgtggcctcgatgatggcagtgaactcatccagccccacagccgcgtgctcgggactatgggatgccagagggatggaggagtctctgaccaccagcgacggcaatgcagagagcctgtacatgcaaggcatggagctgtttgaggaagctctgcagaagtgggagcaggcactaagcgtgggccagcggggggacagcggcagcacccccatgcccagggacggcctccggaacccagagactgcatcagagccactgtctgagccagagtcacagcggaaggagtttgcagagaagctggagtccctgctgcaccgtgcctaccacctgcaggaggagttcggctccaccttccccgcagacagcatgctgctagacctcgagaggaccctcatgctgcccctgaccgagggctcgctgcggctgcgggcggacgatgaggacagcctgacttcagaggattccttcttctccgccaccgagctctttgagtccctgcagactggagattacccgatcccactctccagacccgccgctgcctatgaggaggccctgcagctggtgaaggaggggagagtgccttgccggaccctcaggacggagctgctgggctgctacagtgaccaggactttctggccaagctgcactgtgtgcggcaggccttcgaggggcttctggaagacaagagtaaccagcttttcttcgggaaagtgggccgacagatggtgacaggcctgatgaccaaggctgagaagagccccaaaggcttcctggagagctacgaggagatgctgagctatgccctgcggcccgagacctgggccacaacacggctggagctggagggccgaggggtggtatgcatgagcttcttcgacatcgtgctggacttcatcctcatggacgccttcgaggacctggagaaccctccggcctcggtgctcgccgtcctgcggaaccgctggctgtcagacagcttcaaggagacggccttggccactgcttgctggtcggtcctgaaagccaagaggaggctgctgatggtgcctgatggcttcatctcccatttctactccgtatcggagcatgtgagccctgtcctagccttcggcttccttggacccaagcctcagcttgctgaagtctgtgctttcttcaagcaccagattgtgcagtacctgagggacatgttcgacctggacaatgtgcgctacacgtcactgcccgcgctggcagacgacatcctgcagctgtcccggcgccgcagcgagatattgctggggtacctgggggtgcccgcggccagcagcgcaggcgtgaatggggcgctgccccgagagaatgggcccctgggggagctgcagtagaggcggcacgggctggggggtggcagagagaaggctcctcctcccttccctgggttggtatctgacagctgtggtggctgagggccgttgcccctgactttgccccacccccatcatctgggagtccccaaggcccagaggggacatttccatggagaagaacggttcctgggggaagcagaggccaggaccagtggggcctgtgggagagaaaggctgtgagagagggggttgttgtggagaattgggacaggcagagccaggatgccccaggtgggggaccccaaaacctcccatcgctccagggctgctgacaagggtgctgggagggtggaggtgaaggatggggcctagagccctgtggtgaaggtcacagtgtcctgagctagaagccacctgtggctatatggtctcagcatccagctggcctgtcctgatgccctccccacctcaaccgccttctcagagagtttgcaactccagagaaggagagtggggccaccttagtgggcagcaggcctgggccatccagagatggggcagaggtgggcctcccactcctgtgctctcttctgagcaggaactgggcccttgacagtgtcctttgacattccctcgccctaccaaagatcgtcttttctcctcccacctctgtcaccaccaaagacgggcggaggtggggctgggccctcctgcccccgcccatcccccttccatgagcccagacctccctgggtggtgctaggctctgagctgggggctcagaccagggatcgctcaggcccctgtcacctgtgggcccggggaccacttgggggaggtcagaggatgtatgtggccggaccagcttccccaccttcattaggacaagaaactgcccagcactttgccttcagttcaacgcacaaacgctcctggggcctcatgggggcagagcctcccctgggcctgcagagagtcctgttagcagcgacgtccccccgccgcggggtcctgtcagcccggcagtgtcttctcagtgtcttcacctgagcgagtgtctgtggccccaacgcgttctgctgtggctctgccctttccaggttgagaggcctgcaggagaaacacactcccctcctgggtttccacactcaggaggtcagaggactggctcctgtgaccagggcccctctcccctgaatgggaaaggggtctggggatgggagggcgcaccacagagaggagatgatgctgggtgtggcccatcttctgtgggccccttcccagacaccggatccatgggcactaacccgcctcccaggctgatgcccggaggcagcttcctgggcaggagggttccatgggcactaacccacctcccaggctgatgcctggaggcagcctccagggcaggaaggaccctgtgctccccgccccccatcctgacatcctgttcttttgcacttaccctgtgctgtgaatgtaacagtgggccttggccccgcccactctgatttgcattttcatttgtgtttgtttacacatccatgcactgcctgtagcagtcgattgtcacagcttcgacttttggatggtagagtgtgtgcactgactgtgagtcgaataaacaattgagacgatttccttccaaaagcca

SEQ ID NO: 96604 - DNA, 928 bp, Homo sapiens
tttttttttttgaaacaagtcactttaccctccttaggacccattttgggggggaaaaaccaacacattccagagctttccaagtcctttgaacttcaggttcacattcagggatcacacagttctgcctgttctcagggcacggcaactgccaatcccgctgaagaggcctccctgggcacagcacaggctgcacggtgcacgcatttccctgaaggcagccccttcttcggaagcagctgttccaggcctcggaacagggcctgggtatccgcgtggtgggctggcagctgacggcctgctcagtggagccaggagctaactcagaccccaaagcaagcagggggccagtggcggggcccagcgcccagcaggacacccatgcaagaggctgagcccccccctcgtgccgatttccacactcaggaggtcagaggactggctcctgtgaccagggcccctctcccctgaatgggaaaggggtctggggatgggagggcgcaccacagagaggagatgatgctgggtgtggcccatcttctgtgggccccttcccagacaccggatccatgggcactaacccgcctcccaggctgatgcccggaggcagcttcctgggcaggagggttccatgggcactaacccacctcccaggctgatgcctggaggcagcctccagggcaggaaggaccctgtgctccccgccccccatcctgacatcctgttcttttgcacttaccctgtgctgtgaatgtaacagtgggccttggccccgcccactctgatttgcattttcatttgtgtttgtttacacatccatgcactgcctgtagcagtcgattgtcacagcttcgacttttggatggtagagtgtgtgcactgactgtgagtcgaataaacaattgagacgatttccttccaaaagcca

SEQ ID NO: 96605 - DNA, 612 bp, Homo sapiens
ccctgtggcagggatatggcagggatgtggtcatgagcaggacatggagggccccgcgcttttctcctgagtgcacgcccttggggcccctctgttcccctgacttagaaggtcgggaccgattcccagatgaggaagaaggggaaggtggtccagagtgggggcagcccgtgtaaaggccacaggggatgcctgtgtgacgcctgcccttctgctcctcacaggatactccagccggagagtccagagccccagcagcaagagcaacgacaccctgagtggcatctcttccattgagcccagcaagcactcgggctcctcccacagtgtggcctcggtgagcagcaggtgccagggctccagggctccaggtccgggcttacccctgctgaggactctgccctcagcaagcttatagactggtagagtccattcattcattctctctctcactcctccacccacgcgggctttcagggattgtccctaatcactcactgtgccaggtgttggtgggagaaaggtgggctggtgcagaggagagaaactgatggtctcctggggagacctgtacctgtgaaagtgcaggttattcattcatcagccactgac

SEQ ID NO: 96606 - DNA, 711 bp, Homo sapiens
ctgggatccagagccccacacacagtggcttcaagtcctagatccactggctgtgtgaccttagacaagtcatttcacctctctgagttttactttcctcttgtgtgaaacagggacaataacagcccttatcttatgggatgagatacacatgtaatgcccccagtgtggctccagacacatgacgaccacattaaaaacacactcagattcttcccggcctcctcctccctcctgtcactttctctgctatcctcaccacgcctatctcggaaatctctcatcgggctttcaccagccagaaactcttcagcgcctctctcctgccttaattcataaatgaaacaaggatttatggagcagctgggaccggaggtcaggcgctgaatcagacagagtaacatttctgtccttgcggatgtgaccaggtgtggaggcagcagggtggaatatgtgacctgtcaggtgctggaaagtgctgaggacaggaaaggagcgtggagggcgaatgaggaggatgagaaggtgacttggggggaagctagcaggaggggagggaaggcagggagccatgcatttcaatatctggggaaaagcatctcagtccagggactggcagatgtcacagctcagaggtgggagctgccctgagggagtgtgtcccggaacgaccaggaggccagtgggtgaggggagtgagccaggatggaa

SEQ ID NO: 96607 - DNA, 683 bp, Homo sapiens
agggtggagcaggggtgaggcagggtacagtgtacattgcttgggtgatgggtgcaccaaaatctcagaaatcactactaaagaacttatccatgtaaccaaaaaccacctgttcctcaaaaacctattgaaattaaaaaataataaaatttaaaaaagaatagtataaaaatagcccaatattactcaggaaaacagaggtgaaaatttaatacaaataatagcaaactgaatccagcaaaataaatatatcatgaccaatttgagtttatctcagaaacacaacattgatctaacattataaaatcaattaaatattaaaaagaaaaattataaaaataatcttaatagatacagtaaaatattcatggtaaatattcttagcaaaatagcagtaaaaaaattctttaacatgataaagaataactaccaaaaaaaagttaagcatcatatataatggtgacacactgaaaattttccctatgggatcaggaaaaagaaaaatgatcagcctgaatcagactttccccgatttcttggttattttcaaatttattctactagacaatgtagattatatattgatacctgttctcatctatatgataagagaatgtcctctactctccaagttataatggtttagttaagctttatatataaatgaaatattgagttctata

SEQ ID NO: 96608 - DNA, 117 bp, Homo sapiens
attatgaagggttaagcagtttagcctttattctttagataatgaagactaatgaaagagttatggtaacacctaaagctaagagcaagtcaaagacgatatttttgagtaccaaat

SEQ ID NO: 96609 - DNA, 398 bp, Homo sapiens
taaatatattgtcttctttcctcgattatggcaaaagggcaatgcttcgggttaagaaaaccaaggtacaaagagggtaaatgactcggctaaagctccagaacaagttggtggcaaatccagaatatgtttgacttttggtttcctctgtacagattttaaaatatgaatgctatagtttaaaagaaagaaatggtggaaaggaaaagtagagaaagaaatgccaattccagtccaaagctttatttgccaagttttcttagaatgagttttaccaatttatgaattcttgtaaacagaaggtataatggaaatactgaaaaacttttgcctaaagtggcattattgactgctagtgtgatgctactgtaatgtaataaattattaaatgttgcaaa

SEQ ID NO: 96610 - DNA, 580 bp, Homo sapiens
  misc_feature (500)..(500): n is a, c, g, or t
  misc_feature (504)..(504): n is a, c, g, or t
gtgtcctttggtaactttgtctcctctagaatggctaattcatgaaggcacagtccctgcctgtctgccaccatgattgcagccaggggtctggcacccagttggcccccagcacatatgcacagggtgacacgccatctctgctctggtacgagctcctcgtctcctaggggaggtaagtccattcattgctgtgacccatcatcctctccaaatagaaaagccactagatgggcacctgtcccagcctggccgctggaagtgacagccaagaacaacgtaggctcccagaaacagaggcactagcatggccacactggggtcaggcaggggagatcagggacacccagtggggagaagatgacgcgcagactcagccctggggggcaagggctggaggcagagccctgacctctctgtcccactcccttgcccaggctgcacccagtgttggtagagtccctccaagcctataagctgtaactcctgtcctggacggncagncccagagctctgatgggtgcctctgtttcccttccctactggtttgtgtggaaatttccaacacattgagcggggc

SEQ ID NO: 96611 - DNA, 351 bp, Homo sapiens
ctcatcccctcccgttcttagcagaccacggtagttagaagctcaggctgtgtggtcagacccaattgcaagctctggccctgccacttgttggctgtgtgatctcaggtaaactatttgacctctctgtgcctctcaccttctcaactgtgaagcaggacaccggtgtgtaactcagaagcactgtgagaattggttgggacaaagcatatcaggggcctgccacagagtaagcaggtcacagaaagcagctgcagaggatatcacaggtctactggtgagaaaaaggacgctcggaggagtacccagcaccaggcagagtaagtgaaccggaacgtaaacttagtcttt

SEQ ID NO: 96612 - DNA, 600 bp, Homo sapiens
tcccgctgggcactaggcggtgccgggcctgactcatccccagggtctggccaatacatggggcccctgctggtgcccttccgaccttcagtcttcacttcgtatttctatacttatgtttattctaaaagtaatgcaaatttggttacaaaacatctggaaagagagaagagaaaactagctgaacacaagcaagctcagcatcttcggggaatttactgctaatcccttaccctgatgaggcacttttattcagctgtaattggtgtgtagagttgggaaacttgctcttccatcaagccccagactccacacagactagacaggctgtgcacacttgaacaggctctatgcacacctgcatagggtctatgctcacctggatgggctccatgcacacctggacaggatccatgtcacctgagcaggctccgtgcacacctgaagagtctttacacacatctggaaggactctggactgacctgaatgggctccgtgcacacctgaagagtctttacacacatctggaaggactctggactgacctgaatgggctccatgcacacctggacaggctccacacacacctggacaggatc

SEQ ID NO: 96613 - DNA, 352 bp, Homo sapiens
aatgaattttgttcagagttaactgcactaggaattttcctagttattattaaaaacagtcacagaatattgttgctctttgcttatattacttccttctaaattccctttctctgaaatctgagatggtacaactttggttttttttcctagtttcttgatgaagaggttttaaagaatcccattccctcctccctgctccaggacttctgtcccttggttattcttacctttacctacttcttcagcttctccactggaacctttcaagtgacactcaaacatgctgtactctttaacaatcctccagtgacctcatttctctttccacttgtcatcctgtctgctaccc

SEQ ID NO: 96614 - DNA, 580 bp, Homo sapiens
ttgatcccatcccagcaagacctgtcttggagtgtaggtctggctcagatagcaaactccagccctttcacactgacaggtatcatatcacaggctcctaggtctttaggtcccatggagagtgccactcccagttccactgttagttacttctatggtctgtgttcaagtcaaataaagacatttgttcattccatgcacagcacagagtaggtgctcaaaaaagtactttttatacagatgaatgaacaactactaccagttaacctagaacctgtcctttcagctctagtttttaattgtaattttattttattttagagacagggtcttggcacaatcacaattcactgcagctttgacctctcaggctcaattggatcctcccacctcagcctccatagtagctgggactacaggtacatgccaccatgcccaactaatttttgaaatttatttttagagatggggtcttgctatgttgcccaggctggtctcgaattcctgaggtcaagcaatccacctgcctcagcctcccaaggtgctgggattataggcgtgagccatcactcacctctag

SEQ ID NO: 96615 - DNA, 366 bp, Homo sapiens
ccgcccactggctgtgtatgggggataggtcaacctctcagcgtcagctccttatccctgccctgatcctcgtaaaagggggataacctgtacagaaatttttaggatgggagttcagagactttaagctacatttattatttactacaagccagatgtggaagtatctgtaaaggtaaacttgtttagcactgcaaaaggaaaacaaatcttgggaccccaaactcattaagccaaagggaaaagtcaagccgggaagtgggtcacgcaaatctgcctcccattttgattcctaaataagatggctacgaagatgaaaagctacacacctccctcatatcttgcccacaaggaaattccttgcgg

SEQ ID NO: 96616 - DNA, 399 bp, Homo sapiens
gcgcgctctcaagctgttgaagttggccgatctgttttcgaaaggatgaacaaggaaggcctttctcaggagaaatgaactgagagaatgaagtggttcctacagagggaacagcaagtgctcctgaggctggaaagcccttggtgacttctggaacctagaggaaggccaaaatagcttgttgctttccaagtggtgcttctcaacttggcactcagtggtatcaccacgagggcattaggcactatggaggtttgagcctgcccccccgcccagagtctgatgtcattgtctgggtgtggcatggggagttttccaagtcccccaggtatgtctaatgcacagcgcaggatgacaggcaggtcaggtaagattgtaagtggacgcaggacagagctt

SEQ ID NO: 96617 - DNA, 203 bp, Homo sapiens
tataatgaatttgttcaattatctcttaggatgttgtcctcatgtacatggttaaagtcagacacatctttcaattcggaggaagagggaaatttcaagcaaaagtggagggaaggcaatttccttttaagcaaatagtgaggaagttgcatacatcacttttattcacattccattgacaaaaattttgtccatggccacac

SEQ ID NO: 96618 - DNA, 414 bp, Homo sapiens
gcaaggtttttctgagatactatagatggagagatttccatctggaaaacagatggcagcagaaaagtgatataaattagtatttaggaatagttcttttacatctcaggtcctgatggatattgtcaagggagtcttcactttaactttttctagagaacacatctctttttgtttggatgagtcacaacaatgaagttgtttatttaacacatatttttgaggccctattacgtggcagacacttgttaggtacaggtgagttggtggtgaacaaaatagacctccctggccctcatggcgttttacagcctaataatgggaaatagacattaaaatatataaattttaagccatattaattggattgatggaaagtccaaagggctgttaaagtgtgtaataggggatctt

SEQ ID NO: 96619 - DNA, 429 bp, Homo sapiens
tcctcaaacacagctagcactttccttgcccaggggtctttgcacctgctgtccccttgtcctggaacactcttccacccacccctcagtatctgcatggctccttcctctcttcccttggtgtttgctcagatgtcgccttatccaaggaggcgtccagatcacgccacatcaaaaagcagccacccttcacccctagtgctcctcatctttattttccttcaaggcactttgtggcctccaaggtgtttatttgttcactgtcgcccattggagcatggggaccttttctcttgttcactcctgtgaccctggtgcctggaacaggggattactaactgagttcctgaattaaccagtgtgtgctcagccccctcttcacccttcccctgcttctgccgggcttttgcctccctaggaagccccccg

SEQ ID NO: 96620 - DNA, 110 bp, Homo sapiens
tttgagaccagcctgagcaacatggcgagatcctgtctctaataaatacaaaaattaaccaagcgtggtggcacagcctgtagttgcagttacttgggagtctgaggtgg

SEQ ID NO: 96621 - DNA, 121 bp, Homo sapiens
gagattgcgccactgcactccagcctgggcgacaagagcgaaactccgtctcaaagaaaaagaaaaagagaaacagtgaaaggtctacagcaccaagcaaatgcccaatcaagaaagctgc

SEQ ID NO: 96622 - DNA, 1012 bp, Homo sapiens
ctgtccacgccggacccgtcaatagggcggtcaccttgtctctctgtccgtcgtgtttgtccactcttgtttatcggggcctattttgcgctcttcttcttcattatccctcccctcttccgctgcagttagctgttacgtcgtctctatgtgttacgtgtctcctctaggcgtgattgtcgttgcgggctgccttcctctctcactccctagcactctgcgcgtaccatcctggttcgtaggcttcactttacttctctcaccttcttctcgctttgtcgccgttgtgctttgttcttggtggtttccctgtattttgtatgtggccgcgctgtgtaaaaagatttgtctaggtagatcgatgctgctgcgtgcgcaactgttgtcttcgcgcggcgaggacgatgattctgcgtggtgggggtgacacccgccgtttgccctcgtccatggtttatatatatcccgctggggcgtgtataattaccttctgtgtgtgggggtggtggttccccctaattgttgtttccccgcccccccccggagtggggggtgtctcctccacagagagatccgccggcgcgtaggtgtgttttcctccccgtgttgttggtgcacccggccccgccccgttgcggttgttatattaagcagtcgcctctatgtgtggggggcgcggccttcttcttattaaaaaaaatggggggggggcggtgctgtagttgggggtgccccctcgctggagggagatgatgttagcgaggcgcggcgccgcccctcttctttttttttgtttttttttgttttttttttttttttcttttttttgttttttttttttttttttttttttttttttttttttatcttttttttttttttagaacaactcagcaaaataaaattcctgtttattgttggacaacattgtttcacacatacatcaaacaggccaaaaaaaataaacagcaacttcatagacaaaaaaggaaaaaaaaagaaacgagattat

SEQ ID NO: 96623 - DNA, 170 bp, Homo sapiens
gcacgagggacaacattgtttcacacatacatcaaacaggccaaaaactcagcaaaataaaattcctgtttattgttggacaacattgtttcacacatacatcaaacaggccaaaaaaaataaacagcaacttcatagacaaaaaaggaaaaaaaaagaaacgagattat

SEQ ID NO: 96624 - DNA, 561 bp, Homo sapiens
gctacaaagattttttaaaaactaagagcctccattttaaaggacctaataatatgaaggagttatttcccactgttgtgacaatgcaagaaaacagatgtttgggaatttctggtctcatcgaaaaaataaggcaaatccacaagaaacagtcaaatgaggtagaaatacactgtcaaaagagaggtatcaactaactattttatgaatcatcttttttaggatttttgtgacatttttaaaagacacttaagcagagagatagaattattatttttattaaaaataaaatatgaggccaggcacagtggctcacgcctgtaatcccagcactttgggaggccgaggctagtggatcatgaggtcaggagttcaagaccagcctggccaacatggtgaaaccccatctctactaaaaatacaaaaaaaaaattgggcagtggtggtggtcgcctgtaatcccagctactggggaggctgaggcaggagaatggcgtgaacctgggaggcggagcttgcagtgagccaagatcgcaccactgcactgcagcctgggtgaca

SEQ ID NO: 96625 - DNA, 320 bp, Homo sapiens
ttacttgtatttttctattttccgttgtgaattctttaacttatgagctatttaaaaatttaatttccaaacagagttcctctagttgatttggctgttgatttgtaattgcattttggttaggcagcctgtttgagtgtgatgccaattggtgtgtataatgccaactctttgaaatatgtttagactattaaaaatgtggtccattttaataatttttatttgtacatgaagagactatgtattgcctggtttttggtgcagttttatatatgttcattatgtagccttgttaattatgttgttcaaatctcatatct

SEQ ID NO: 96626 - DNA, 377 bp, Homo sapiens
gatagttcttaatattccgtcatatggatatgccacactttatctgctcactttcttaagaacaccttgcttccaagttttggccattatgaataaagctgctaataaaattcatgcataggtttttgtgtagatctaagtttttgactcatttgggtaaatacaaagcatgattactggttcatatgggagtatgtttagttttgtgagaaactgccaaactgttttccaaagcggttgtaccatttgacattctcaacagtagtgcatgagcattttagttgcacggtatccttgccaacactttggatggctagtcttttgtaatcttgtagttttggtttgcatatccatgatgactaatgatattgagcatc

SEQ ID NO: 96627 - DNA, 507 bp, Homo sapiens
catactttggagctcagattatccagtataattcacataatgatcccgtgaagttggtactaagattatagtattaccctcattttgtcaacaaggatgtaggttcagagaaattaattatcttgtctaagatcacacatattctttgcatattggactgtatgtgtttgtgtataggcattaatttcattctcagtgtagatctgtactttcttttccaaatatattatgaccacactgtaccttgtacatgtaatttttactcagaaactaacaacttgttggctttaaaaaatactcattgaaattgaacattgcttcagtttctgaaatgaaaataaccagttcctaagttagcagtgatatcagcgatggtgtgtccggaattggtgggtccttggtctcactgacttcaagaatgaagtcgcggaccctcgcggtgaatgttacagctcttaaggtggcgtgtctggagttctttctgatgttcggatgtgtttggagttt

SEQ ID NO: 96628 - DNA, 344 bp, Homo sapiens
aaactgaacacagtcacataaaccagcacccagatcaggaaatagaaaatcaccttggaaggtcccttatgttcttttccaggcagtagtttccactatcctgacttccaacagcacagaatagttttgcatgtttgagtactttatataaatgtaaccataaagtatatactattttgtgtctggcttctttcaacattatgtttaaaagatttaattatattactacatgtagttttagataattcattctcttttattttctttttctttctttttttttttgagatggagtttcacttttttttttgcccaggatgaagtgcaatggcgcaatcttggct

SEQ ID NO: 96629 - DNA, 799 bp, Homo sapiens
ttttagatggaatctcactctgttgccaggctggagtgcagtggtgcgatctcggctcactgcaacctccgactccctggttccagcgattttcctgcctcagcctcccgagtagctgttgggattacaagcatgtgccaccacacccagctaatttttgtatttttagtagaccctgcagcttgttactttctagggtgaaatttgacccttgttacttggaccaagtatattttggcatattgtgagatggcagtgacatctgttttattattttgcatagattatgaccatttgtaagtgtttctacaaatggtgtgtatttaaaacataaagtgtgcacaaataaaaatcccaagagatggggactcagttgttgtcataattcattggtgcttctggcatgttggccaagatggtcttgatctcctgacctcatgatccaccagcctcggcctcccaaagtgctgggattacaggcgtgatccaccgcgcctggcagcccctagacatttttatcggctcccaatatccttctagtaattcttttgctgcctaagtgaaccatagttgaaccattatagtttgcaaaggtctctgaaatgtgctctcaaatagagaagttaagtgttaatctgcctaatattgatgctccaagagttctgaaataagaaaggtcataagtgatgccacaaatctataattaatgtggtttactcccttccgattcttcttcccctagagggaaaagaaagtaggaaggagcgttttcggcgatagaattcgttggttggggagg

SEQ ID NO: 96630 - DNA, 736 bp, Homo sapiens
agcggaagcaacctgatgaaaccaacaaattgctcagggagctccagctcaatgagcatttgaacacctgaccccttcccaatatgatgtctcttggatccctcatacaaagaaatgcatcttgctgaacaggtgaccaataatcttaaagaacttgtacaacaagtaactccaggtgatatcgtaagcatgtgtggagttcaaaaagcaatggggatttccattccttcccctgtcatggaaaacaactttgtagatttaacagaagatcttgaagaacctaaaaagacacggagtggacctagtgggagttgaggccacctggtatttgattatgtattatgtacatacttttccattcttaacttaaaaacgctttcacaagatatcaaatatttgtaaattgtgcttttaattaaacttcggaacagtgaaaacaaacaaaaaacaccttcctggaactaattatagcaaggttacaggatacaaggttaacacacaaaagtcaatcatttttcagtatgtcaacaatgaacaagtggaatataaaaattaaaaaattcactaccatctatataagcaatcaaaaaataagataggtataaatctaacaacatatgttcaagatctatatgaagacaactataaaactcttctaaaaatgttctaagaagaactaaataaatgaatagatattccatgttcatggataggaagactcaatattgtgaacatg

SEQ ID NO: 96631 - DNA, 438 bp, Homo sapiens
tgattgagtcaattacacagcgctaactggggcagccctagggattgaagggcgccctggcatcctggcagaagctgtttctaccacaaatctgatcagaaacagcgactaggaggtgaaagggaggaggaggaggaagactacaacttctgaaaagacccaagagccaacacacgagataagaggaggccaacggaggcatctgggggcaagggagccccctggcacctttgaggcagcaccaagggacccacaaggaagtaagcttccttggggcaggggagcggggaggtgctggggcgaggcccccacgctgctgggcatgactgagtgggaattggaaactgagagtaacaagcttcgctgggtgccgtgcctgccccagctcggtgcaactaccgagccccccgggtgcctgtgcccgctgtggctccagcc

SEQ ID NO: 96632 - DNA, 951 bp, Homo sapiens
tgcccgggctggtcttgaactcctgagctcaagtgatcagcctcccaaagtgctgggattacaggcgtgagccactatgcccggcccgtaagtcagtttttgaaatataaaagtggtataggctagatgtgacaaaaaacagtcaaatgatacaagagcttataaagtcatatggcaagttcctccccaccaatcatgcagtgaagtgagggtcatgtgtgtccttggaagagtcacctccagttcttgcagggggatgttttcctaaaactttctgagcattgctcttctctgctcaagccacttcaatacacctcaggcagcaaagtctcagcttttgagccgtggtctctgagggtgttggatgtgaacgaaatcaaatcggtacaatgatgactgtggcaagtgcgatgaaggaacgaacctgcagggcgcagaagacgtgtcctggggccctgccttggtttggaagacaggcaggcatccctgaggctgatggggagatgaaccccgaagccagagtgcttatccgtcagatctctgcttcatgtttggagtttgctcacttaacacatcagaagtggctttgttccgtatggcagcaagttctgcagaagcctcatttgggtggggggagttttattaaaacagtttatcatggagaattccaactatacaaaagtagagcaaacagtaaaatggactctcatctatccatcaccaacccatgaccaatgtcttcagctgtcagagatttatcttatagctccttgcttcctcctcctctctctacctgtctgaattgtgtgaagcacatcctggccataagatcagttaacttcttagtatttcagtatgtttctctcaacgttgtaaatgccactattacacctaaagaaatcaacaatatcaaaaagaaacagcataccttaaaaaaagttttaaaacaca

SEQ ID NO: 96633 - DNA, 304 bp, Homo sapiens
tataaccacagtttgtgtatccatcccccagctgtgggacatttgagttgtttgcaggtttgtttgacacaaagaaagctgccataagcactcacacataggtttttattataaacactgatttttatttcactaaaaaagtaaatatctagaagtggaattgctgattggcatcttaaatgtatgtttgacctcataagaaactgccagagcaatattcttaagatggtggaaaaagaagaaaaacagaattagagactggctttaatacatatgaaaacaatgggagatttctgaaaaaaaa

SEQ ID NO: 96634 - DNA, 467 bp, Homo sapiens
ggcatggcggtgctgctggcccagacctcaggaaacagcctgcaaacttctcctaaaaagacaattttaaataagaaaaacatgaggaaagagtgaaggggatgacacctgtttagggacttagaaggcagcagatcttgggggagaatgagtgtcgtctgttagggcttgagtgccccatgtgggacccaccccctagtgcccacagggaaaagccagagaagaaccggaatgcctggtctgccacttcccttttaggctgcttgttgtgtgtttggggttgcggcgagacccatgcaggaggcagcaggcttggccaggtgttgggaacaagcatctccagggctaggcccacacccgaagtcccagctcttggtctggcttttggggtgggggactttaacctctccttccctcttgcatgctggggctgctgacgtgtgtcggctgagctctgacggggaggg

SEQ ID NO: 96635 - DNA, 444 bp, Homo sapiens
ccagacaaggagttccaaaatgaggactgtggacccagaagtaccataacttgctacataacaataggcaagtcatttaatatctctgcatctccacttcccaatgacaaaaaaaggaggaataataaaacctttaagcaccatataaaaacatgacatggacccagcacagtggctcgtgcctgtcatcccagaactttgggaggccgaggtgggtggatcacctgaggtcaaaagttcgagaccagcctggctgacatggtgaaaccccatctctactaaaaatacaaaaattagctgggtgtggtggcacacgcctgtagtcccagttactcaggagactgaggcaggagaatcgcttgaacccaggaggtggaggttgcagtgagccaagattgtgtcattgcaccccagcctgggcaacaagagcaaaaactccatctc

SEQ ID NO: 96636 - DNA, 391 bp, Homo sapiens
ggaggaaaggaaagcaaatccacagctggggagaaaacaaaactatagtctacactaactgcccacataaaagatttaaggtcttctgaagattttagatgagaagaccttattcaacaacttgactacaggctatacaaaggggtggtttacttttagaggacagaggagcataatggttcaaaagagaacaggttttagcatcattggaattatcatttactgaactctacgtgtcaggtgcttagccaagcactatgtctatattatctcacttaagaaaactaaggtttaagtgttaggtaacgtgtttaaattcacactgccataggcatggggatggaatgcaaatcaaggtctatctcagcagttctcaaccaagaattattct

SEQ ID NO: 96637 - DNA, 329 bp, Homo sapiens
gggaatgaggaacgtcactccagcaagaccattccagtcaactctacatttttctcctggagatttgggctgggacagcaggagagagtgctagaacttcaagcatgggaggatgatgtgactgaagcaactgagggaatatggttagatgtggattatgaggtgagctctgggttatccatctcccatctcctggaggttaaattgatttcgtggagcctgaagatggggtctgagaccctctgcattcagggctcagcttctgagtcccttgtattgaatcttcatacgtctaagtctgatcaaacctgacctgtgtcctcttgggg

SEQ ID NO: 96638 - DNA, 484 bp, Homo sapiens
catttcatcctcacagcacctggacggtaagtactgctgctagcctcaccctaaggacgagggaaatcaggcgcagagaagttaagtaacccactcagagtcacactgtgttaaggggtgagctaggtccagctctttctcactctgaagtctgtgcccatgacctccaactggagtctgcccctgcagaagccgttagagaggaaagcctccaactcctgcccctgtgtgggagccatcgtggcacagcccatgtctttgtggccgaaagtgaaatgtccccatctgtagcaccgcccctctgggtctacccacctgggccttgtctggttaacttcgcgcctctgctctcaggccctgctatgcccccttcttattcatgaaatctgcgtcttgcagaggacaccagggggatgggaacctgggggaaccctgggcccattaaaccatgttccccatcccagccttcacggctggagaaaat

SEQ ID NO: 96639 - DNA, 310 bp, Homo sapiens
catttcatcctcacagcacctggacggtaagtactgctgctagcctcaccctaaggacgagggaaatcaggcgcagagaagttaagtaacccactcagagtcacactgtgttaaggggtgagctaggtccagctctttctcactctgaagtctgtgcccatgacctccaactggagtctgcccctgcagaagccgttagagaggaaagcctccaactcctgcccctgtgtgggagccatcgtggcacagaggagttctccaagcaagaaacgtgaaggtccgaaggccaggaaccccaatcaggaaacca

SEQ ID NO: 96640 - DNA, 806 bp, Homo sapiens
ctgcttgagtgatggtgcgctaaaatctcagcaccactataggattcatccacgtaacgaaaaaacacttgcaaccccaaaagccattgaaatttaaagcaacggtgggacaaatcttctgaaagcttcctaatcaacatttttctgttaaaatgtactgcatatgcacatttatatattgggagcattttaaaggtttactttgctctgaaagaaatatttaatgtgtttcaaaataatttttgagattattctagttgtggttaagcttaaaggctgagaaattacttaactattcaaatagagcctgtgcaactatatgaaatgtcattatggagacactcattatgcttttcctgtagaacaaaacaagtagttgggtttatctgcaattagggttttttgaggaacgtgagggtggctggacaagttgggtagacctgcaaaagggccagcggctctctgcatggctctggccatccggcactttcccttgacttgcacaggctgccctgtgccttggagttgctgcagtgaccttgcctgtccttgcttgtgggtctgctgctgctgctttgctgctgatggctttagcacagagggggcccgtgctttttattgctcaccagaggcagatgcatctactgctgtgctgtctcgcacaccccctatgcagcatcattaggaaagctagacacaagtgattcagaatggcttaggggtttatctaagccaagtcagataacctcttgaactatctttttgtagccatgaaagcagagtatatttccagaggtataaagatg

SEQ ID NO: 96641 - DNA, 290 bp, Homo sapiens
tccagatcccacagaacaagaccctataaaggctccatcccgctgcatcctgacagccctgtggtagtcagattattggccccattttgtaaaagagaaaatggagacttccttgcccaaggtcccacagtaagtagcagggccaggctgagaatctgagtccatggcttcacagcttacgtttgggagaagccaagtctacagccttccaacacaggcgagagctgcgggcagcctctcagcacccaacaacacactggggccctctgcttggcctggctgggtatggc

SEQ ID NO: 96642 - DNA, 222 bp, Homo sapiens
gcaggaaggagatgaggggcgcagtggtgcaggcagcatcagtgaccactgaccacacccaacacagtgagtgtgccaggaagcatgaaggctgtgtctgggcatctcgggcaggaggttgggggctgggggggagacagggaagaggaaagtgagggacaaagttgggggatagacaaggaaccagaaagaggctgatagtgaagtaggacaagagatgct

SEQ ID NO: 96643 - DNA, 501 bp, Homo sapiens
tcccagaagacagttgctactcagtaagtatttgataaatgaataaaaatgggtactaattttctcacattctctcttctttgctttcaatctttttttaatgaaaatagatatctgttcaggcctttctacttttactattgtcaaatattgcctaatttataaatcttgcattgactttccttctctgcagggcaaaagaaggaaagaaaaattacccattgattttgtagaacttcttaatcaaatcttgtctctttgcaaaatctcattctcagtaaagatgcttatgaaaatccctcagaaaaatatcacatgcgtaataaaacacaactttttaaatggatttcagtctgcccttcctcaccacacttcttgttctgtcattactgaaatattcctgggaagtttcctcaccacaaataatgcccatgagaagcagcgtgataagagtcattcacgtcccaagaatgtgggtgtgttgacaaacttcaaaactgg

SEQ ID NO: 96644 - DNA, 756 bp, Homo sapiens
ttacgtgtaagtgaaatggggggctgggttttttactaagatatttgaaacctctcaggataagaatatcttcttacatagcaaccaaatatatctaacatataatattttaaaacatttatatttttgggttgcttcaagagtcagtttcatggagtttggaaattccaaatgaaaaaatgagaagttgaccatttattagaattgccaaatagaatacagggcacttgagtaatgctggaaacatatttacactactaattattacaggttgagtagccctaatctgaaaatctgaaatgtgaaatgcttcaaaatttgaaatgttttgagtgctgatgtgagggtcgaaggaaatgttcattggagcattctggattttggattttttaattagggatgctgaactacagttcagtgtacaacacaaaccttccaaaatccgaaaaaaaatctgacatcctaaacacatctggccccaaacatttcagataagggatacttgacctgtattcattgtttatctgaaattcaaatttagctgagtgttctggatttttatttgctaaatctggcccccctactgtacatgcgttctaagtggatgcagcgttcgccatattgggaatggagtgcattatgggaattctcgtccctctgaggcacatgtctgtgttccctactcagagaggagagaactgagcaatgaaaatctgaagtttttctttgagctataaatgatcatttagagctata

SEQ ID NO: 96645 - DNA, 494 bp, Homo sapiens
cttattaacaatactcataacatttagccattaatgattactgatagcttaaataagagtgtagtttctgtttctaatgtctattaattttaaccccatttaaagatatttcctacttatcatactcaaagttaatcagaagttaaataaatgatggtccttctggttctctggaaactgaaaagaagcttctgtttctttagggtatgcaggaattttttttcttcccagtgagctgaatccatcctttacgctgctatttgctaacctcagttgtttttctgctccattaaagttgaggccaccaaaaatagtagtaatatcacaactacaaaaccctgggtggatttgtacccattgcacatacacttcttgctgccaattcctaagagacttttgaaataatagtatattcccagctggacaatatattctacttgtggcctatgtatagtgttcaacaagtccaggagccctatgaaacggaatgtgtt

SEQ ID NO: 96646 - DNA, 357 bp, Homo sapiens
cggcgtgcacaccttcccggctgtcctacagtcctcaggactctactccctcagcagcgtggtgaccgtgccctccagcagcttgggcacccagacctacacctgcaacgtgaatcacaagcccagcaacaccaaggtggacaagagagttgagcccaaatcttgtgacaaaactcacacatgcccaccgtgcccagcacctgaactcctggggggaccgtcagtcttcctcttccccccaaaacccaaggacaccctcatgatctcccggacccctgaggtcacatgcgtggtggtggacgtgagccacgaagaccctgaggtcaagttcaactggtacgtggacggcgtggaggt

SEQ ID NO: 96647 - DNA, 801 bp, Homo sapiens
tatttttgagtcagggtgtcactttgttgtccaggctagagtgcagtggcaccattatggctcactgtagcctcgacctcgcaggcgcaagtgatcttcctatcttagcctctggagcagctgggaccacaggtgtgggccaccccatccagctaatttaaattttttttttttgtagagatgggggtctcactgtgttgcccaggctggtctcaaacttctgggctcaagatgtttccaccacagtctcacaaaatgctgggattcaggtgtgagccactgcacccggcttatatgtgctgctaatttaaaatagcactatcctatgttaatattatctaatgtttatgcccaaatttctcctggattgttacaaatgtcttttttacagttgatttcttctaatctggacttaaacattgtacatttgtatgcattatgtaaatggtgtgttttgagttgtatagctgtgtcttactatttttccactaagggctatgtcgccgcatgatgtctaactagcgagtaacgcagtcctctgtggtgtacagtcacatattgtacctgttcatctctgggcatagggcaactcagttccagctctctgtcattataaacaaggctgcagtgaacatgcttaagtatgtgccctaattctgtgtgagaatttggggggatataaaaccagaggtggaattgctgggtcatagagtatacgtagaactcacctgtctaagtagcactgaattctctggaaaagctgcaccagcatactcttccacctgtagcatatgaggggcc

SEQ ID NO: 96648 - DNA, 163 bp, Homo sapiens
tccaggtggtaggttgtcaaacttgaattaaatttttccaatgtggcttcatcattaggtctgaaatttaatgaatttcaagaaggcaatttaacctgtatttaaataaaagtgattatattctacatagattcattagccaaatataagtattttgggggga

SEQ ID NO: 96649 - DNA, 592 bp, Homo sapiens
aggcagtgctgaggccgccgtcccctctaccatcagtccagtccggcccgccctcctgcagccatgtcccggcccctgtcagaccaagagaaaagaaagcaaatcagtgtgcgtggcctggccggcgtggagaacgtgactgagctgaaaaagaacttcaaccggcccgagttcacgctacctgtgcacttctacggccatgtggagcacaccagccagggtgccaagtgggtggacacacaggtggtactggccatgccctacgatacgcccgtgcctggctatcgcaacaatgttgtcaacaccatgcgcctctggtctgccaaggctcccaatgacttcaacctcaaggacttcaatgtcggtggctacatccaggctgtgttggaccgaaacctggcggagaacatctctcgtgtcctgtaccccaatgataatttcttcgaagggaaggagctgcggctgaagcaggagtatttcgtggtggctgccaccctccaggacatcatccgtcgcttcaagtcttccaagttcggctgccgtgatcccgtgcgcacgaacttcgatgccttcccagataaggtaccatgcg

SEQ ID NO: 96650 - DNA, 475 bp, Homo sapiens
acaagaatgttccaacagatttattcaaaataggaaacagctttttgcaaaactggaaataactcaagtgtttatcaacagaaaaatggattaagacattgtagtaaatacataccatggaatactaagcaataatagagaaggacagatgactgatatgtgcaacaacatgcatgaatctcaaaaatattatattgagtcaaaaagtctgggctccacatggctccatttacatgaagctcaagaataggcaaaactattctagggtaacagaagtcagaaaagtggttatttttggagtaatattgaccagaaagagatgcaggggcactggaaatatatttaatctaggtggtagttacatgagtatatacatatgtaaaatgtattaagctgtacatttaagatttgtagactattgtatgtatgttttagttaaatgaagaagattaaaaaatggaaaaatgactatatg

SEQ ID NO: 96651 - DNA, 351 bp, Homo sapiens
tgactctttcccgcctatcttatgcccgtttctaatacaggtgcacagtgcctgcagtgtctttgcatagtaagagtgactttactccatttcccaacaaattcctcatctccctctgagaccacctccgcctggaccttattgtccatatcactattaacattttggtcaaagccattcaacaagtctctaggaagttccaaactttcccacattttcctatcctcttctgagccttccaaactgttccagcctctccctgttacccatttccaaagttgcttccacattttcgggtatctttacagcagcagcccactctactggtatcaacttattgtattagtctgt

SEQ ID NO: 96652 - DNA, 660 bp, Homo sapiens
agcgtaggctccactgagccgagattgcaccattgcactccagcctgggtgacagagtgagaccctgtctcaaacaaaacaaaacaaaacaaaaacccagttagactgctggaatagtccaaataagaaatcaggaggccttgaaacgtgtcagtgggattaaagaggagagaggtggaattgaaggttatctggtaggtgctatcaacagacttagtggtttaaaacagtgagtgagaggttatagtcaggttgggactatgtattaatcctttatttttttaatttactgtactgtactatgtattattgttaatatcctttatttcagattgacatatacccttaaatattcttaagatcatatccttaaggtcttaatagtctctgaataaatattggtataagctgcttcctaaatgatttcccatttatttactggtgtttttatatatctatttagagactgagtctcactatgttgcccaggctagagtgcaggagcatgatcatagcttactgtaacctcacactcttgggttcaagtgattctcctgcctcagcttcccaagcagctaggactacaagtgtgtgccaccacacctggctcattttttaatttttgcagagacagactcttgctatgttgctcagactggt

SEQ ID NO: 96653 - DNA, 546 bp, Homo sapiens
caaggttaaagactaaattagtgatttgggagatcaagccaatgggcttgtctaaaacctagtcaaaaaggtcaaagtgataaaaattatgaaataaaatttgatatttggaggctcaagctaagaaagctgctctgtctaaaggaaatacagaggacatggaaggtaagaaagaaatgataaaaagaaaaaaaaaactccaaagttaaggaaaatcttaagccttcaagtagaagggttctatcaagtgctttctaggattattgtgggaaaaagatgttacctagacatatcatggtgaggttggtaaactccagtggtaaagagaaattgctaccctctttcagaggaacaaaagaggttaactacaaagcaactgtaagtaggcatcagacttctcatctattatcataaaaagtagggtaaggtctacaaaatactgtaaaggagtattttgaatttagaatttcttatagagctaagctatggctcgctcatatgtcagggcaaaaaatcatccaggctgaaagtttgtcaaaaaaaaaa

SEQ ID NO: 96654 - DNA, 464 bp, Homo sapiens
cctggatccgcacccaggtgagaaggccccattgcctttgctcttaacactttgctacagtgtctctgtaaaggtcttgatcaaaagatttagagattttcataaaagcccctaagcagttgtagattacttggttatatattcataaagttcatagtctcttgtcctttcacttacacaaactaacagtgtttatacccaaacctatgtttattatcagttttatgtcaaataaatttaacagtatttgtacagcacacataaccagctcctagtaataaggcagctggcaggctttctgggctaagtcaacagattcagggtggagttcactggagaaaatagctagtggtccaggtgtcctgtttgagacgtggagggacgatgaatttgtagtcaaaacacttagcaactcttcccaaaatagcattctatttccttgtagtgaatggcaaaggacacat

SEQ ID NO: 96655 - DNA, 674 bp, Homo sapiens
tgtgtatttgagtaacaacaaagcatcaaaatataactgcaagtggaagtagatgaatcaattataacatgtggaggcttcaacacccctctcagaaatgaacagattcagcaggcataaaatcataaggatatagttaaacttaacagaacccatcaattacatgaatctaattgacatctagagactacttcatccaagagcaggttacatattctccagctcacatgaaatattccccaaggtagaccacattctgggccataaaacatacttccacaagtataaaagaatagaaaaagtagaaatcatacaaagcatgtagcattttcattaaagatattagtaaaattgataaacctttagtcaggctaatcaagaaaaaagaataaagacacaaattactaatattagaataaaagaagagtgatcaatattgaccccagggatgtttaaatgaaatttaaagagtaataaaggaatattttaaacaactctatgcctataaattggataacctaggtaaaatggactaatttattgaaagaatcatgcaaggatgatctgagaaggtctacatctgttttaaaaattgaatccctaattaataaccttccagaacagaaagtaccaggtgcagttggtgtcactgttaaattctatcaaatatttaa

SEQ ID NO: 96656 - DNA, 527 bp, Homo sapiens
taacctggtatgaatgaattttatgtgttatctaatatggtaaaccatttatgctaatatataatgaaagatgcttttctctgttagaggaattgtccatgtcaagagcatgcaggagggaatatatactttgaagacataggacgcttaaaaattacccatccatggcttctcttttccgggtagatggtaccagggtgcttggcctggctctaatgaggcctcttaccagcattctgagatagtgaacctgtagtacaatactacttgcaggtctccctcaagattttaatcactcttctcccttttcttaaactctctgagctataatgtttgcctgccttccttaatcttaacctagctttcctttccgtgtctctctgcgtcaagacttctatatgggccgggcgcggtgctcacgcttgtaatcccagcactttgggaggccgaggcgggcggatcacgaggtcaggagatcgagaccatcctggctaacacggtggggccccgtctctactaaaaataca

SEQ ID NO: 96657 - DNA, 467 bp, Homo sapiens
acaaaaatgacattcacttcctacaagtctttctttggtctctatcacgtcccaaattcaattcctgttcagcactctaaaaaagcagtccactttcaactacttggacaggaataatccaggtatatccattcttagaccttacatcagccaggtccaaacaaatcaaacagtggctgccccagcatttccagagagtgggctgcagcaggagaacaaaactgcaaccaacaggtaactcagagctcgacagttgcatttctgtgtgtttgtagccgatattttcgcaaacagtagaaatcttgatccaatatgtttcttcatacaattgtgataacatagataattcaactactagcagtagaacttgttcccatgagaaatcctctgaaagaagagctctgtggggattatgggtatgtgtttcaacagaacttgggtggttgcctttaaagagtacccacagt

SEQ ID NO: 96658 - DNA, 447 bp, Homo sapiens
cttctctgagttttatttgggctatgacattccaagggccggctctgaggccagccagcctgcagacctctggtgacaggaccccaaggtcccgcctggctctcctgcctggctctctcctccaccctctcctagttcgctgggctgcctggtgagtaagcctcctgctccgtccctgcttacttcattgcaaaatgagggtggtaaaaacatttactaacctcaacaggatgttgtggcaattagtggataaataattatagagcacactcacatgtaatgctcctgataaagctacatttatttttaggagctcacaaaaggaagattttccttctgagcgtccaggggtgactcttggcgtggcctgtgatttggcctctggttgggtgtgcctccatcctcctagggacagaattctgaacatcccaactacaggcccatttc

SEQ ID NO: 96659 - DNA, 394 bp, Homo sapiens
aactggcctctagccatgctcacagctgtctcaagacctttgcccttgctttcgcttctaccctttggaatgtaattcgtttacctgagggtcctgtgttttctgttgctgtatccccagaacacgtgagcacccagtaaatatgtgaatgaatgaaagaatgaatgaatatttcactagattctaagtttcccaaggacaaggatcatttgctgctcaattattagaatctaaagcaatgcctgggcacacagtaggagagtgtgtaaatgtctgtggaataaaagaaggaataatgggctgggcgtggtggctcacacctgtaatcccagcactttgggaaggccgaggtgggcagatcacttgaggtcaggagttcaacaccagcctggcc

SEQ ID NO: 96660 - DNA, 333 bp, Homo sapiens
ccaccacgcccggctaattttgtatttttagtagagggggtttcaccatgttggtcaggctggtctcaaactcctgacctcaagtggtcgcccgactcagcctcccaaagtgttgagattacaggtgtgagccactgcgctcggccccagtgggttctttctgcgggctgcccagatagagttgatttgtcagggcaggggagttgccatggagaaggtttagttcacgcagagccggttgaaagggagactagactagaggttttttttttttttttgaggcggagtctcactttgtcccccagggtggagtgcagtgatgagatctcagct

SEQ ID NO: 96661 - DNA, 559 bp, Homo sapiens
tgtcaactgcctgagctggagaagcccacttataaggaacgttgtcatgtgtctccaggggagccaggaccgtccgtggggttggctggcccttcacaatgtgaccccacttccatgggctccctctttcctcctgcacagccctggggtgcagggctccctctggaaggcaacagcttccagcgactcaaaggcctgcagggtcgtgtgatcccagcatcacaggtctacccatagaaccagcaattttatcagtagtattaattatcctctgcaaaaagagacactgaaaacaaagttccctttctcaaagaactctgatgagaaattaaaaaatatatttgaccttggaggattcgttgttttggaagccacagagacctgcctcatgcaactcaaaagaaggattacatctgtgatgtgtgggacgggcacgaggggcctctacaaccaatctaccctgtgtcttgacttctctgagagttgcattgggttcaacagtgattccatttcctcccaaagggccactgggagataagcagcatcgagcttatatcca

SEQ ID NO: 96662 - DNA, 391 bp, Homo sapiens
atccgctacactgatccccttatcaaggtgaatgataccattcagattgatttggagactggcaagattactgatttcatcaaattcgacactggtcacctgtgtatggtgactggaggtgctaacctgggaagaattggtgtgatcaccaacagagagaggcaccctggatcttttgacattgttcacatggaagatgccaatggcaacagctttgccactcaactttccaacatttttgttattggcaagggcaacaaactatggatttctcttccctgaggaaagggtatccgcctcaccattgctgaagagagagacaaaagactgccaaacagagcagtgggtgaaatggtcccagggtgacatgttagatctttgtacgtaattg

SEQ ID NO: 96663 - DNA, 424 bp, Homo sapiens
ggccatttgtaaaacccccaagggggactaaaatgacaggcttcaaatgacagttcttacaccatgtcctgaataggagcaaactgagaaagctcccaggccacaccatgcctgggagttccaaaagtgagtatcttatactttcacagacatgtcccaaaaatccaattaattcatctcatctaattaaaggagttcattggaaatgcaatatggtatttttatcgtgctgctgcttgaatctccaagtcagtgaactagaagaaagaaatttttattttgtggagaagatacaagaaaactttgggaaaagaaaggagaggatacactccccccaccccccaaaaaagccctttataaaacagccccttgatgcttggcagaaaacaatatacaccacatgctccagaaaaattcccagcaa

SEQ ID NO: 96664 - DNA, 452 bp, Homo sapiens
taaacccaaacccaacagaaggaaagaaacagcaaagaccagagcagaactaaataaaattgaaaccaaaaaaatacaaaagataaatgaaacaaaaagctggttatttgaaaagataaccaaaattgatatatcattagcgagattaaccaagaaaagaagatgatgcaaataagctcaattagaaaggaaacaggaaatatgacaaccgatatcacagaaatgcaaaagatcattcaaggctactatgaatacctttatgtgcacaaactataaaatctagaggaggtggataaattcctggaaatatacaaccctcctagaataaaccaggaagaaatagaaactctgaatagaccaataacaagcagtgagagtaaatcagtaataaaaaaattaccaagaaaaaatgtctaagaccatgtggattcacagctgaattctatcagaca

SEQ ID NO: 96665 - DNA, 112 bp, Homo sapiens
gagcccaggtctcggtgcctctgcatgggctgcaccttgtacaacactccccgctccaggttcatttctaaatacagaactccaaacccttaatttctagaatcccatctga

SEQ ID NO: 96666 - DNA, 130 bp, Homo sapiens
ttcaactagatatcagctgtatttactttagtgtctacctttaacacttttagcactattagaaatcaaaacaagtttcattacatagatgtgtgacgtgaggccaggtgcagtggctcacgcctgtaat

SEQ ID NO: 96667 - DNA, 458 bp, Homo sapiens
aagtgttcttatccaaaaaaactgcttggctgagagtaattcttctgtaaatgttagtcattatcattctgctaaaccacagaacatcagtttaggaatcactgggctgggcgcagtggctcacacctgtaatcacagcactttggaggctaaggagtttgagaccagcctggccaacatggcaagagcccatccctactaaagatacaaaaattagaatggtgtggtggcacgtgcctgtaattccagctactcaggagcctgaggcatgagaattgcttgaatccaggaggcagggattgtagtgagccgaaatcacgccactgtacaccaacctggcgacagagactctccgtctccaaaaaaaaacaaaaaactgttctttgaaaaagcttccttcccaccttaggggcttagcacaggcttggtgttctgtctggaatgttcttgtctcacac

SEQ ID NO: 96668 - DNA, 403 bp, Homo sapiens
ccgtcgcgctgactcttgaggatcccttcgactgtgggactcatgagtgtaggaacacggagaagggaacacgataaagtcacacatccacactgttgacaggggtttggcttccagggaacacacctctgtggcctcagggctatgtcctgaattctaaaacggggctctcacggctgacccgatgtcactgggtccccgtttgctgcttgagtctcttcggagcccagtgttgactcccgctcttcgtggctgccccggctatctggccatgaggagctgaccacgcacctggccggactcacatccgctccgctagggaagacctgggggcggaggtcggtctctgaccagccagcgtccctgcaggggactgcgagtaggaggcgggtattgcccacgc

SEQ ID NO: 96669 - DNA, 369 bp, Homo sapiens
tgtagtcctccttttttggagtgtcttttatttggttttggtattaaagtaatattggcttaagagaatgaattatggctaactctttctgcctttactctgcttctatttttctgaagaggttgtagagaattggtataatttcttctttgatgtctagtagaattcacaagcaaaatcatctggatctagtgctttcctttttggaaggttgttaacaattcctttagtagatataggcctactgagattatttctctttgtgtgggttttgctagcttgtgtctttcaaggaattggtctcttttatttaaggtataaaatgtgttggcataaagctgtttctagtcttcctttaatacttatgga

SEQ ID NO: 96670 - DNA, 518 bp, Homo sapiens
aaagccgggcatacaatggcaacctcagcccctccatgggcagcacctgctccctgggcctcccccagtggccccattatcctgcacctgctgaccaccgcccccccaacctgcttcccagcccaagctccctccccagggcaggccctgcccatcctcaggcccacctgccttctctgagagccagccaagagggctggggaaccaggagggatagcagggaaggccctgggcagggaccgagggtccagctgccaagccagctctgcctggccagcagtgtgtgtgcctgcaaaacaaggctttgctccaggacctcagtctgctcacctgaaaactgggagcatccaatcctgccttcagggtctgcaagggccagtttctctctgcttggagggagggctgaggccaggttgggaagagaacagacgggggtatcttgggtcatattttcagggccgcatctgttggaccacatggagacctgagtccttactgtacacttcagagtcactgct

SEQ ID NO: 96671 - DNA, 167 bp, Homo sapiens
tgtgtcttaattttttttcaattgttttcctcttttttcccccctctcctccgagtaaggagactgtctggttcccaggaggcagttgtttgtcttttttagtctagctttctttgaaacttactttctgttcatgcagtggtatgccgttcatgtttgttttctgg

SEQ ID NO: 96672 - DNA, 2857 bp, Homo sapiens
atttcaagggatccgtagactgaaagaattaattctaagctccaacaaaattacttatctgcacaataaaacatttcacccagttcccaatctccgcaatctggacctctcctacaataagcttcagacattgcaatctgaacaatttaaaggccttcggaaactcatcattttgcacttgagatctaactcactaaagactgtgcccataagagtttttcaagactgtcggaatcttgattttttggatttgggttacaatcgtcttcgaagcttgtcccgaaatgcatttgctggcctcttgaagttaaaggagctccacctggagcacaaccagttttccaagatcaactttgctcattttccacgtctcttcaacctccgctcaatttacttacaatggaacaggattcgctccattagccaaggtttgacatggacttggagttccttacacaacttggatttatcagggaatgacatccaaggaattgagccgggcacatttaaatgcctccccaatttacaaaaattgaatttggattccaacaagctcaccaatatctcacaggaaactgtcaatgcgtggatatcattaatatccatcacattgtctggaaatatgtgggaatgcagtcggagcatttgtcctttattttattggcttaagaatttcaaaggaaataaggaaagcaccatgatatgtgcgggacctaagcacatccagggtgaaaaggttagtgatgcagtggaaacatataatatctgttctgaagtccaggtggtcaacacagaaagatcacacctggtgccccaaactccccagaaacctctgattatccctagacctaccatcttcaaacctgacgtcacccaatccacctttgaaacaccaagcccttccccagggtttcagattcctggcgcagagcaagagtatgagcatgtttcatttcacaaaattattgccgggagtgtggctctctttctctcagtggccatgatcctcttggtgatctatgtgtcttggaaacgctacccagccagcatgaaacaactccagcaacactctcttatgaagaggcggcggaaaaaggccagagagtctgaaagacaaatgaattcccctttacaggagtattatgtggactacaagcctacaaactctgagaccatggatatatcggttaatggatctgggccctgcacatataccatctctggctccagggaatgtgaggtatgaaccatgatcctcctaaaagcatttctactgcggggaaggagaggtaaatgtttgaagccctagaggtgtctctaatcactagaaagattaatgacccttttgcttttgggttttgctcagtgtgaaaggttacttaattaaattacaaccaccaggaaattgactgctttttttttttttaaatggttgaaacttgaaggaagttcattcaaggataagttggaataaagcactatgttaaaacatctgctttttaacaatttgtatacaggggttggacttaaaaacacacatacaaacaaaactcttttcattctgaaatttctgtctggttcttggtgtttgactgttgtaatggagtaaagaagagggccagcttaatttaaaaataaagtgagtttaccaaaattccagaaggtaatgaagatttaaaccaaagagcaattttcccaagggttgattttgttgtaaatttttagttttaatgaaagcatgcaacagggatctcacacccatgttacttgccatttagttattataccagcatagagaatgtcagaggcctactgtgtaattgtatcaggctcctaaggcttctttcttttttttttttgtttccttctttcctactttctttcactccttcctttccttcctttctcttccttctttttttgtttgtttgtttgttttttaattactgggatatagatccgatttcaaaggtttttatgcactggctatttgtgtttaatcagaatgaaacttcaattccatgctttggctttgtccctggtaactaaaatcaggtcacaattttgtggatgatttagcaataataaaatggcagtcataacagggactgtttgtcagtattgctgtcatccccaaaagaaatgatatgtattcttgttaaacttattaaaaaataagtgatacaaatatttataaataaaaggagagaggtttgagttctgggtatcctccctttctgtaacagcctcaaataaaggtgtaccttccatgttatattatttttgtttttataagaataaatttggacccggtttctgattatttaatttaaaagatcacttacaggatcatgttagtgagcagacaaatagtcacaaatttcaaacttgtcaataagtaatgctggatgtaaattgttcttttcttggtaatgttgatcattatgtgcaaagactgactactaaggccttgttgctggaagaaactagtgaagagaggttaaattctggcaatataatgttttagtatctgattttagatgatcactctttcaaaagacagttttaatgagtaattaaagatgttgccctttctaatgctagttaacagttggaaaatataattgctctttgatagcatatactccaatttttccatagtcctaactacaaatgctaatgaaaatgttttctgacaaagcactgaatttgaaataatctctaactcagtacaatttggactattgaactgttcttcaaagaattcattttcttcttttttgtgtatcattgaaaataagagaagtaatcccagataataaattcctaaaaggaaactgtataagcaattgccctt

SEQ ID NO: 96673 - DNA, 2959 bp, Homo sapiens
atttcaagggatccgtagactgaaagaattaattctaagctccaacaaaattacttatctgcacaataaaacatttcacccagttcccaatctccgcaatctggacctctcctacaataagcttcagacattgcaatctgaacaatttaaaggccttcggaaactcatcattttgcacttgagatctaactcactaaagactgtgcccataagagtttttcaagactgtcggaatcttgattttttggatttgggttacaatcgtcttcgaagcttgtcccgaaatgcatttgctggcctcttgaagttaaaggagctccacctggagcacaaccagttttccaagatcaactttgctcattttccacgtctcttcaacctccgctcaatttacttacaatggaacaggattcgctccattagccaaggtttgacatggacttggagttccttacacaacttggatttatcagggaatgacatccaaggaattgagccgggcacatttaaatgcctccccaatttacaaaaattgaatttggattccaacaagctcaccaatatctcacaggaaactgtcaatgcgtggatatcattaatatccatcacattgtctggaaatatgtgggaatgcagtcggagcatttgtcctttattttattggcttaagaatttcaaaggaaataaggaaagcaccatgatatgtgcgggacctaagcacatccagggtgaaaaggttagtgatgcagtggaaacatataatatctgttctgaagtccaggtggtcaacacagaaagatcacacctggtgccccaaactccccagaaacctctgattatccctagacctaccatcttcaaacctgacgtcacccaatccacctttgaaacaccaagcccttccccagggtttcagattcctggcgcagagcaagagtatgagcatgtttcatttcacaaaattattgccgggagtgtggctctctttctctcagtggccatgatcctcttggtgatctatgtgtcttggaaacgctacccagccagcatgaaacaactccagcaacactctcttatgaagaggcggcggaaaaaggccagagagtctgaaagacaaatgaattcccctttacaggagtattatgtggactacaagcctacaaactctgagaccatggatatatcggttaatggatctgggccctgcacatataccatctctggctccagggaatgtgaggtatgaaccatgatcctcctaaaagcatttctactgcggggaaggagaggtaaatgtttgaagccctagaggtgtctctaatcactagaaagattaatgacccttttgcttttgggttttgctcagtgtgaaaggttacttaattaaattacaaccaccaggaaattgactgctttttttttttttaaatggttgaaacttgaaggaagttcattcaaggataagttggaataaagcactatgttaaaacatctgctttttaacaatttgtatacaggggttggacttaaaaacacacatacaaacaaaactcttttcattctgaaatttctgtctggttcttggtgtttgactgttgtaatggagtaaagaagagggccagcttaatttaaaaataaagtgagtttaccaaaattccagaaggtaatgaagatttaaaccaaagagcaattttcccaagggttgattttgttgtaaatttttagttttaatgaaagcatgcaacagggatctcacacccatgttacttgccatttagttattataccagcatagagaatgtcagaggcctactgtgtaattgtatcaggctcctaaggcttctttcttttttttttttgtttccttctttcctactttctttcactccttcctttccttcctttctcttccttctttttttgtttgtttgtttgttttttaattactgggatatagatccgatttcaaaggtttttatgcactggctatttgtgtttaatcagaatgaaacttcaattccatgctttggctttgtccctggtaactaaaatcaggtcacaattttgtggatgatttagcaataataaaatggcagtcataacagggactgtttgtcagtattgctgtcatccccaaaagaaatgatatgtattcttgttaaacttattaaaaaataagtgatacaaatatttataaataaaaggagagaggtttgagttctgggtatcctccctttctgtaacagcctcaaataaaggtgtaccttccatgttatattatttttgtttttataagaataaatttggacccggtttctgattatttaatttaaaagatcacttacaggatcatgttagtgagcagacaaatagtcacaaatttcaaacttgtcaataagtaatgctggatgtaaattgttcttttcttggtaatgttgatcattatgtgcaaagactgactactaaggccttgttgctggaagaaactagtgaagagaggttaaattctggcaatataatgttttagtatctgattttagatgatcactctttcaaaagacagttttaatgagtaattaaagatgttgccctttctaatgctagttaacagttggaaaatataattgctctttgatagcatatactccaatttttccatagtcctaactacaaatgctaatgaaaatgttttctgacaaagcactgaatttgaaataatctctaactcagtacattgggctatgacggtctcaagattcatctctcctttcggtttatgacatagagaggtatccgaaaaaaatgctaaggaagttagcatgccttaaattaagaatagattttagcaaaaaaagggggtaaataccggggccaggagggcagttgaaggccagagggaaaggaggggaaggggaagcgttggacttggatggcacaaggaagaggctgggtaaaaaag

SEQ ID NO: 96674 - DNA, 460 bp, Homo sapiens
gcaagaccctgtctctacaaaaaataaattacctgggcatggtggcactgcttgtagccctagctatgtgggaggcttaggtgggaggatcccttgagccccggagttcgaggctacagtgagccatgatcatgccactgcattctggcctgatcagcagagtgagactgtctcaaaaaagacatccctcaattttctcccatcacttctttgttagtacatctacagagtataatttaaagataaaaagagttaatgcgatagaatcagactcagcatatcctgatggtttagaatttcttttcttaccttggcctaacagattaactgatcaaagcagtttaatccataggaatatggattttgcctgcataataaaatccatgctatgttcttaaagaatattttgaacattacaacaaggactaatttgggttgaactttttagatttaaaaaaaa

SEQ ID NO: 96675 - DNA, 504 bp, Homo sapiens
tgaggagccaaatggtgccctgcccctcccaatttcagcccatgtgacagagctggcctcccctccttcttccccacctggcatggaaggcctcccagcccagcttctccctgctctgtccagcactggcactaccctggacaactcaaagagatcaaaatgacttccagatccctatctgtgagctcccatctctccttttaaagatcaattaaagtcttggcaatgattcaccttgcagtctggatggtggctttgatgtccgctccagacatgagacctctgtttttccaaatctagaaactgctaccaaatggtgagggtagggtccctccctggggccagagcagctcctgctttgcagagatgccagccccgaggtcttaccctttctggcagggggtgccaggtcctgactggggggcatggggaaacgggccatgaatatcaggaattccttccacaaaggacaactgggaaagcaatgcatctctgcttcccttg

SEQ ID NO: 96676 - DNA, 158 bp, Homo sapiens
tacaaggcacttccaggtagttgaggacatttaaagtcgccactggatgaggcctgcggaggtgctgacagtgagggctccagcaggtgagaggaggtggctcccagacactgcctcctgctcacaagaggcgacattggaacctggggagatagagg

SEQ ID NO: 96677 - DNA, 351 bp, Homo sapiens
caagtttctgaattcggataaagtattactcagttgcttatttaaaagagtcacttattctgaaagtattcttttggtttatatgcagtcagcctcttattttcaaaagtaaaaatctaaaattcttggaacctggcatcatcagctgtttctaacctcttggtcaccttgatgactcttagctgaaacccttccaagtcccgtggagtcccctgtgcagttctggaaagggattgacttatacagaagacaatggaggattgccccaaagagtgtccagaactgctgttggcccatggtcaggccaaattcagtcttttagagattaccacatctgatctcagtaggtag

SEQ ID NO: 96678 - DNA, 179 bp, Homo sapiens
agactgctgccttgctctgtaaaatctctgggaggaataggacttagaggtgatgggtatggcatgtggtaagagtaagacatgggactgaaaacagaagggttaactgaaagtttatatctggaagcattaatcctgtactctatttatgcaaaattccaacagccaagtacctcccc

SEQ ID NO: 96679 - DNA, 781 bp, Homo sapiens
  misc_feature (550)..(550): n is a, c, g, or t
agcggagtagtgaatcgtagcatgttagagttagaaggttcagtgttgatggagttattgaagaaatgatggagtaagagactcttttctaagcaactcaagtttgcagtgattcaggcctacttctgaagagacagccttttatctcaatgaatgacacagaaaaaccagcagatactccctctgaggaagaggactttggtgatccaaggacatatgacccagatttcaaggggcctgttgccaacaggagttgtacagatgttctgtgctgtatgatcttcctactgtgtattattggctacattgttttaggacttgtggcctgggtacatggggaccccagaagagcagcctatcctacagacagccagggccacttttgtggccagaagggcactcccaatgagaacaagaccatttcgttttactttaacctgttacgctgtaccagtccctccgtattgctaaacctacagtgccctaccacacagatctgtgtctccaagtgcccagaaaaatttttaacctatgtggaaatgcaactttngtacacaaaagacaaaagctactgggaagactaccgtcagttctgtaagaccactgctaagcctgtgaagtctctcacacagcttttactgggatgatgattgtccaacagcgatttttcccagcaaaccttttctccagagatgtttccctgacttctctaccaaaaaatggccactttaacaataggacagtacgatgatgttccacgatgcgcctggccggacccgaa

SEQ ID NO: 96680 - DNA, 939 bp, Homo sapiens
  misc_feature (708)..(708): n is a, c, g, or t
agcggagtagtgaatcgtagcatgttagagttagaaggttcagtgttgatggagttattgaagaaatgatggagtaagagactcttttctaagcaactcaagtttgcagtgattcaggcctacttctgaagagacagccttttatctcaatgaatgacacagggtctgagattactgacatgcttcctgctatacccggcactgattccaaatgggactgggtctgcagaaaaaccagcagatactccctctgaggaagaggactttggtgatccaaggacatatgacccagatttcaaggggcctgttgccaacagactaaactgggaactccgtgagagaaagcatctcatctgtgtggttcaccaacgtttcatagcatctgccacagtatccggcacaaaataggagttgtacagatgttctgtgctgtatgatcttcctactgtgtattattggctacattgttttaggacttgtggcctgggtacatggggaccccagaagagcagcctatcctacagacagccagggccacttttgtggccagaagggcactcccaatgagaacaagaccatttcgttttactttaacctgttacgctgtaccagtccctccgtattgctaaacctacagtgccctaccacacagatctgtgtctccaagtgcccagaaaaatttttaacctatgtggaaatgcaactttngtacacaaaagacaaaagctactgggaagactaccgtcagttctgtaagaccactgctaagcctgtgaagtctctcacacagcttttactgggatgatgattgtccaacagcgatttttcccagcaaaccttttctccagagatgtttccctgacttctctaccaaaaaatggccactttaacaataggacagtacgatgatgttccacgatgcgcctggccggacccgaa

SEQ ID NO: 96681 - DNA, 311 bp, Homo sapiens
ggccaggaggctgagaccgcagcaagaaagggagagtgtgatggcatcttcttcaagggagctggggatgtttggggtggaaaaaagaacaatggtctgggagggaatatgggaagtttttttttttttttttttttttttttttgagatggagtttcgctgttgtcatccaggctggattgcaatgttgcaatcttggctcactgcaacttctgccttccaggttcaagtgattctcctgtctcagcttcccgagtagctgagattacaggcacacaccaccacgcctggcttacttttgtatttttagt

SEQ ID NO: 96682 - DNA, 734 bp, Homo sapiens
agtagggactgtgacatatcactgggcctataacctaggtaatgtgactctccttttcttcctgtgttctgtcccagtgaagattatgacaaatttctgggccagtcaggtggtttggtgactctcaaaccatgattcagcagacctgtgaggctgtgagttccctatcagaacacaatctgcagatggagtcttgctctgttgcccaggctggaatgcaatgatgcaatctcagctcactgcaacctccatctcccagattcaagtggttctcctgcctcagcctcccaagtagttgggactacaggtgctgccttcaggagggattatgacatatgcctggaccaaacacctggatgacgtgacactcctgcatgagccttgccctaaggggatatttttacatgttggtgaactcagcatctaggtgatgtgactctactcttctgcctgggccctgcccacagagggcattggaacatttcacttggctcagcaccaagaagatgttactctcctacctggacctctcccacaggggacacctagatgatatgatttttcttcctggttcctgcccagacttcaaattgtgatgtatatctgggcccaaaacacaggtaaggtaataactctcatagctagaccaagacaatagagagattttgacttttgtagctaggcttagaacaatgggtacatattcctggcccagctcccaggtgatatgaccc

SEQ ID NO: 96683 - DNA, 781 bp, Homo sapiens
gtgggcacttcagcataggtttcgggtgctactgtgacatacagctcaaagcatcctaatacccctgagtctgagtaacatgttctcagaataggggctccatcaatcaatcatatcaacccattaacagcaagaggaaaatgatgaagtatatagccaagagaaaaactggattctgatgacagttgaaatgtgatgaagattctgtgaagcagagataatgtaagaaagatgcctgtgtggaaattaaatgtaaaaatgccaatggatggaaattttctccaaatgtactaggcctcccctataattttaaaatggagctaaaccactttatgatgggaatattactaggcatccatgcaggagaagtcttcccaaaaacagactactggttctgaaaatttggcatggtatcaatcatacacttctgaatcttcaagatccctccaatagtttttaaaatgtggctggctacatttgaagaatgtttgtttgccttcatagccagccattcttgttagattttggaaactcaataagctctgactgttcacaatttaatattttagtgacacatttttaggtttctaaatcagttttatgaggcatgcgataaaaataaaatcaaagtcggctgaacacttatggtgctcagtcaactctgaatatgacctgtagaaacacagcagaaacaaaacgacactaagtcatttttacttcaattttattaaaagaaagagaatgattaaaccagtggaaaacataacaagttattaattta

SEQ ID NO: 96684 - DNA, 1253 bp, Homo sapiens
catctgtgcatggatgagtggccgactttggagcccaggctgttacttcctggtctggtggtgaatcctccatagtctgagagtaagatccttgatactggctcagcatggaacatctggcacacagtatgcactgaggaaatacttgttggaataatcagtgaatcatagatgaaaacttaaccttggaattaattatgagactgctcagaggaagagaatgggagacaaaggacctggtgattagacccccaagacactgggctgtctgcttgtgtctcgggtggaacaggcccagcgagagtctttagggccagaactcaagaatttattgagcccttgttctaggcacttgggattcaccagtatacaatggagacaaaaatccctgccctggagcagcttacattctagcatggcaaacaggcagtaaacagcccattctggctgctgtattgagaagagaatgtggtggacagatatagaagcatggaaacctgatagggctattgcaatcactcagaaaagaggcgatggcagcttggacctgttggaagcagtagagtgcttccagggaggagaaaggacctgaaggttaatttgatcaccaatggccaatgatgtaatcagttatgcctatgtaatgaagcttccgtaaaaaccaaaaggattgggtttgattgagcttctggatagctaaacatgtggaagttcctggaggatggtggtcctaaacagggttaccagaaaatttaaagttacgccagtcactcccattctattgctgagagaaaatacagagcggtgaagagcttacagtcggaccgcgctgcacgccggcggcagccatggcggatgtgtcagagaggacactgcagttgtccgtgctagtagccttcgcttctggagtactcctgggctggcaggcgaaccgactgcggaggcgctacttggactggaggaaaaggaggctgcaggacaagctggcggcgacgcagaagaagctggacctggcctgagactctgcgccttccgccccattctgtccccctcatggccaccttgccatgtccgcgccggagccccggtccgccggcgcccagaaccaggcttgccacacagtccccgcctgccatggccggctcttcctggagtgttgcttgttgaagatgcatatagactaccggaaagaaatgacttcttcttgcactttatgaatcaattttatttttaaaataaaaaaattaaacatc

SEQ ID NO: 96685 - DNA, 1670 bp, Homo sapiens
catctgtgcatggatgagtggccgactttggagcccaggctgttacttcctggtctggtggtgaatcctccatagtctgagagtaagatccttgatactggctcagcatggaacatctggcacacagtatgcactgaggaaatacttgttggaataatcagtgaatcatagatgaaaacttaaccttggaattaattatgagactgctcagaggaagagaatgggagacaaaggacctggtgattagacccccaagacactgggctgtctgcttgtgtctcgggtggaacaggcccagcgagagtctttagggccagaactcaagaatttattgagcccttgttctaggcacttgggattcaccagtatacaatggagacaaaaatccctgccctggagcagcttacattctagcatggcaaacaggcagtaaacagcccattctggctgctgtattgagaagagaatgtggtggacagatatagaagcatggaaacctgatagggctattgcaatcactcagaaaagaggcgatggcagcttggacctgttggaagcagtagagtgcttccagggaggagaaaggacctgaaggttaatttgatcaccaatggccaatgatgtaatcagttatgcctatgtaatgaagcttccgtaaaaaccaaaaggattgggtttgattgagcttctggatagctaaacatgtggaagttcctggaggatggtggtcctaaacagggttaccagaaaatttaaagttacgccagtcactcccattctattgctgagagaaaatacagagcggtgaagagcttacagtcggaccgcgctgcacgccggcggcagccatggcggatgtgtcagagaggacactgcagttgtccgtgctagtagccttcgcttctggagtactcctgggctggcaggcgaaccgactgcggaggcgctacttggactggaggaaaaggaggctgcaggacaagctggcggcgacgcagaagaagctggacctggcctgagactctgcgccttccgccccattctgtccccctcatggccaccttgccatgtccgcgccggagccccggtccgccggcgcccagaaccaggcttgccacacagtccccgcctgccatggccggctcttcctggagtgttgcttgttgaagatgcatatagactaccggaaagaaatgacttcttcttgcactttatgaatcaattttatttttaaaataaaaaaattaaacatcaaaaaaaaaaaaaaaaacaaaaaaaaaaaaaaggaaaaaagaaaaaaaaaaaaaaaaagaaacaagacaaaaacagagagcggcaaaaaaagaacacagagaggagacacacaaagacgaacaaaccacgagaaagagcgaccaagaagcgcacaaaaaaaagaaaagaggaggcacagaaacaaccgcgaggaaaaagaacaacagcagaccgagagcgcccggagcgggaaaacacacacgaagtgaggacagagaagacgacagccggacacaaacaaaaagaaaggaaaagagacacgagcggagggcgacacaaaaaacaaaagacagaacaaacgacgcgaagacacccgagacaaaagcgaccaggagagagaagcgaacgagcgcccaccccgacaacacaagacaaga

SEQ ID NO: 96686 - DNA, 1081 bp, Homo sapiens
catctgtgcatggatgagtggccgactttggagcccaggctgttacttcctggtctggtggtgaatcctccatagtctgagagtaagatccttgatactggctcagcatggaacatctggcacacagtatgcactgaggaaatacttgttggaataatcagtgaatcatagatgaaaacttaaccttggaattaattatgagactgctcagaggaagagaatgggagacaaaggacctggtgattagacccccaagacactgggctgtctgcttgtgtctcgggtggaacaggcccagcgagagtctttagggccagaactcaagaatttattgagcccttgttctaggcacttgggattcaccagtatacaatggagacaaaaatccctgccctggagcagcttacattctagcatggcaaacaggcagtaaacagcccattctggctgctgtattgagaagagaatgtggtggacagatatagaagcatggaaacctgatagggctattgcaatcactcagaaaagaggcgatggcagcttggacctgttggaagcagtagagtggttaccagaaaatttaaagttacgccagtcactcccattctattgctgagagaaaatacagagcggtgaagagcttacagtcggaccgcgctgcacgccggcggcagccatggcggatgtgtcagagaggacactgcagttgtccgtgctagtagccttcgcttctggagtactcctgggctggcaggcgaaccgactgcggaggcgctacttggactggaggaaaaggaggctgcaggacaagctggcggcgacgcagaagaagctggacctggcctgagactctgcgccttccgccccattctgtccccctcatggccaccttgccatgtccgcgccggagccccggtccgccggcgcccagaaccaggcttgccacacagtccccgcctgccatggccggctcttcctggagtgttgcttgttgaagatgcatatagactaccggaaagaaatgacttcttcttgcactttatgaatcaattttatttttaaaataaaaaaattaaacatc

SEQ ID NO: 96687 - DNA, 1218 bp, Homo sapiens
catctgtgcatggatgagtggccgactttggagcccaggctgttacttcctggtctggtggtgaatcctccatagtctgagagtaagatccttgatactggctcagcatggaacatctggcacacagtatgcactgaggaaatacttgttggaataatcagtgaatcatagatgaaaacttaaccttggaattaattatgagactgctcagaggaagagaatgggagacaaaggacctggtgattagacccccaagacactgggctgtctgcttgtgtctcgggtggaacaggcccagcgagagtctttagggccagaactcaagaatttattgagcccttgttctaggcacttgggattcaccagtatacaatggagacaaaaatccctgccctggagcagcttacattctagcatggcaaacaggcagtaaacagcccattctggctgctgtattgagaagagaatgtggtggacagatatagaagcatggaaacctgatagggctattgcaatcactcagaaaagaggcgatggcagcttggacctgttggaagcagtagagtgcttccagggaggagaaaggacctgaaggttaatttgatcaccaatggccaatgatgtaatcagttatgcctatgtaatgaagcttccgtaaaaaccaaaaggattgggtttgattgagcttctggatagctaaacatgtggaagttcctggaggatggtggtcctaaacagggttaccagaaaatttaaagttacgccagtcactcccattctattgctgagagaaaatacagagcggtgaagagcttacagtcggaccgcgctgcacgccggcggcagccatggcggatgtgtcagagaggacactgcagttgtccgtgctagtagccttcgcttctggagtactcctgggctggcaggcgaaccgactgcggaggcgctacttggactggaggaaaaggaggctgcaggacaagctggcggcgacgcagaagaagctggacctggcctgagactctgcgccttccgccccattctgagccccggtccgccggcgcccagaaccaggcttgccacacagtccccgcctgccatggccggctcttcctggagtgttgcttgttgaagatgcatatagactaccggaaagaaatgacttcttcttgcactttatgaatcaattttatttttaaaataaaaaaattaaacatc

SEQ ID NO: 96688 - DNA, 745 bp, Homo sapiens
catctgtgcatggatgagtggccgactttggagcccaggctgttacttcctggtctggtggtgaatcctccatagtctgagagtaagatccttgatactggctcagcatggaacatctggcacacagtatgcactgaggaaatacttgttggaataatcagtgaatcatagatgaaaacttaaccttggaattaattatgagactgctcagaggaagagaatgggagacaaaggacctggtgattagacccccaagacactgggctgtctgcttgtgtctcgggtggaacaggcccagcgagagtctttagggccagaactcaagaatttattgagcccttgttctaggcacttgggattcaccagtatacaatggagacaaaaatccctgccctggagcagcttacattctagcatggcaaacaggcagtaaacagcccattctggctgctgtattgagaagagaatgtggtggacagatatagaagcatggaaacctgatagggctattgcaatcactcagaaaagaggcgatggcagcttggacctgttggaagcagtagagtggttaccagaaaatttaaagttacgccagtcactcccattctattgctgagagaaaatacagagcggtgaagagcttacagtcggcttgttgaagatgcatatagactaccggaaagaaatgacttcttcttgcactttatgaatcaattttatttttaaaataaaaaaattaaacatc

SEQ ID NO: 96689 - DNA, 701 bp, Homo sapiens
catctgtgcatggatgagtggccgactttggagcccaggctgttacttcctggtctggtggtgaatcctccatagtctgagagtaagatccttgatactggctcagcatggaacatctggcacacagtatgcactgaggaaatacttgttggaataatcagtgaatcatagatgaaaacttaaccttggaattaattatgagactgctcagaggaagagaatgggagacaaaggacctggtgattagacccccaagacactgggctgtctgcttgtgtctcgggtggaacaggcccagcgagagtctttagggccagaactcaagaatttattgaggcccattctggctgctgtattgagaagagaatgtggtggacagatatagaagcatggaaacctgatagggctattgcaatcactcagaaaagaggcgatggcagcttggacctgttggaagcagtagagtgcttccagggaggagaaaggacctgaaggttaatttgatcaccaatggccaatgatgtaatcagttatgcctatgtaatgaagcttccgtaaaaaccaaaaggattgggtttgattgagcttctggatagctaaacatgtggaagttcctggaggatggtggtcctaaacagggtatggaagctccatgccctttcctatatgccttacactatccatctattccacctggctgt

SEQ ID NO: 96690 - DNA, 920 bp, Homo sapiens
atttcacttatctttagagacacatttatatcagaaaatttaacttgatgattaaaaaaattggtgaaatacgtgtagacttttgtaactggattatagtttcatctaagaactcactaaaaatatattgaacttcaggaagagatttttaaatggctttggtaagccatttaaaagccttattttcccaaacgaattagtgttggtgtgtggatgaggaactttgctgttattctgtgagcattacctgataagaactaatcagatgacagatggaatctgaagcttgttctgatgaatttttgaggctggaatgcaatggcgtgattatagctcaatgcatcttcatctccctgggctcaagcaatcttccaagctcagcctcccaagtagctggaactacaggtaggaccaactccactttgaactaggtcctgttgaaaaggctgttcataaaccttaccagccagtagctcctgtcctttcttgatggatgcagaagatgaaacatcctggctagaaaacaaaatggccatgattttgaagagatgaagtttcaggacaactctgcactctgaaacattctgaaacagaaatggaaggtgtgtgtgctgcatcagagcaatgagctagagcaacattagagaattagcaacatagagaagtgaggtgaggtgtaaaggaaggacagtcatctttgatcagctgttcttggcccaaacctgccatatcctaacctctggttttcataaatgtgtgaagtttgaaggcattttggcaaaaatctcaactcccgtaatcacatgaaatgctgtttcttctccaagggcaggaaattcaaaggctacatatgtagggttgcccagtgggaatctgagactctagaaactacatcctgcttttgcatatatcaagattat

SEQ ID NO: 96691 - DNA, 590 bp, Homo sapiens
ccatccttctaccctctatctccatgagtttacttgtcttagtattttagctcccagaaataagtgagaacatactaagtctgtctttctgtgcctggcttatttcacttaacataatgatttcaggttctaactatgttgttgcaaatgacaggatctcattcttctatatggctgaatagtactccattgtatatatgtgtcacattttctttatccattcatgtgttgacagacacttaggttgcttccaaatttatggtaacttctattttttgataaatgactataattattattaacacattttctacaaattttctatttcattttaacacaataacagattaaacctttgtgggttagcctggaaacttagccatcgtgaataaaaccactctatgggggaaaaaaatctgagctgtaaaaaattaaactaaaactaatttatagattctatttggagatgcttgccaattcctgaggaaacaacagatagactgagtgggatgttactgatagcctccagggatcatgcggataagaaatacagtctaaagtccaccaaggttgagtacctcaggagcctt

SEQ ID NO: 96692 - DNA, 524 bp, Homo sapiens
tacacacggtcatcagcttggcccacaaaggggacttcgtcaccacctggggagcctccgtggtggctactaactcaggagtcctgcctcccagacccccagattctcccaggaatgtccccttggctcttggtcatgtctgggggatcctggctcccagctagaatttggttcacggtcatcttcccttcttccatggttctttgtgaagaaggatccaggagggcttgagataaagaatgtgagggccagcgtggtggctcacacctgtaatcccagcactttgagaggctgaggcgggcggatcacctgaggtcaggagctcaagaccagcctagccaacatggtaaaaccccatctctactaaaaatacaaaaatttagctgggcatggtgtaatccccgctactcgggaggctgaggcaggagaatcacttgaacccgggaggcagaagctgcagtgagctgagatcatgccactgcactccaacctgggcgacggagtgagactccgtctcaaaaaaa

SEQ ID NO: 96693 - DNA, 464 bp, Homo sapiens
gcttatacagtattcaattcactgaaaaataatgtggttgtgtaaacactcagaaggaagtgtggtgtgaccggtgatcacagcttctgccagaatatctagaacaggatgcattctgcgatgaaagagatgactacaatagctgtagctatttattttataaaaaaaaattcttagccctagttcatggcctacttcttccaagcagtacaggtcaagcatccctaatctgaaaagctccaaaatgtgaaactttttgagcaccaacatcatgccacaagtgaaaaatgccacactcgggtacttaacacaaagtttgcttcaggtgcaaaattatttaaaatattgtataaaattaccttcaagctatgtgtaaaggggtgtctgtgaaacataaataaactttatgtttagacttgggtttcatccccaaaatatctcagtgtgcatgtacaaatattcca

SEQ ID NO: 96694 - DNA, 247 bp, Homo sapiens
gaataaaactaggtttcaaaatagaacagctgtaaaactatagcttaaaaagccaggaaagaatcttaagtacatgccgaaaagaaaaataattcactctattcaggatctctggttaactggaatttagaaactatttgattaaattgtatgcaaaagagtaaatcgctaagtagctttcttcagttcaaagtttgtgtataatttttgaaactgtagaggtaataaaacagaaaacacttgaaaa

SEQ ID NO: 96695 - DNA, 300 bp, Homo sapiens
ttgtttttaaaaatctctttggctgggtgtggttgctcacacgtgtgggaggctgaggtggaaggatcacttgaacctaggagtttgagaccagcctggcaacacagtgagaccccatctctataaacaaacaaatgaacaaatcactttgaagtgtgttccagttggttgcctgtctttaccctctagttgttttactagtgtctttgaccgtataattttcattgttttaaatttcaaacctgtatctattatgctaacctaatctcgaaatatttctaatgccattttctttctact

SEQ ID NO: 96696 - DNA, 244 bp, Homo sapiens
aacagctctccactcacccagagaagtaacctgaatccaacttgatactatcaaacctgatggactctcagcttggtcctatacaacttcaaatggaaaacaagctgccatattaatactatgaaactaaataatccctacattatatgcaaaaatgaattcaaaatgaatcaaagacccaaatgtaaaagccagaattattatatttttggaaaaaaacttagatgcaaatctccatcacccc

SEQ ID NO: 96697 - DNA, 230 bp, Homo sapiens
agttgttttatttagaaggtagtattgtacatgggctaggcctttttatgtgatgaaggcagaaaaaagtttattaagaggcatttttatggaaatagaaaagcaaatattaatgttggaaactatttggatgttaaagtacttttagttatagaggaggaaggcagtagtaatttgacgttttctttgtctgtgttataaggaataagctttagtttgtaaagcctcag

SEQ ID NO: 96698 - DNA, 115 bp, Homo sapiens
ggtcgtctctgaggatcccccattgagcccctgatgctattaactgagatgggaatgactgtggaggaagcagattggagattgggcatgttatgttttgaaatgcctgttagac

SEQ ID NO: 96699 - DNA, 409 bp, Homo sapiens
gtatagaaccacaaaggagtcaaataaagactatataaaggattcaatgaggaaaaataaaattggcaaaagacaggcatttctcaaaaatgttttcagttcaccaataacatagaaaagtgctgaaatcaaggaaaaattcaaattgaacccacaatgagataccccctactcactcaccagaatggctaagttaaaaaggtcaacaacatcaagtgtttgtgaggatgtggaagaacaggaaatctgataccctacatgtagtccatgtaggactataaattgatagcactttgaaaaactgtttagtaatatctaccaaagttggaagatactcatcccctaagacctaggcaacaggttccaagactgttgatagtgcaattattcataatacctaaaaactgga

SEQ ID NO: 96700 - DNA, 754 bp, Homo sapiens
acgcccggctaattttatgtatttttagtagagacagggtttcaccatctctatctcctgacctcttgatctgcccgcctccgcctcccaaagtgctgggattacaggcgtgagccacagcgcccggcccaaaaatccattcttaatggctttctcttctgatgcaaaatcctgattgccttcaaatattactattagatagaaatctccccacctttagctgaaagagataaggaggttttgcactgaggaaacaaacaaacaaacaagcaaacaacattcatcaatttttaaaaaaagtatgtattgaactatagtcaggttcaatgaggaaatgcattacattgtcactaaactggccttagttggagaaagaacactggcagattaattaaagttattagcgcttatggtaggaaactgcatgatatatgtgaaagatcttttagggactggaaacacagtgtaaattcaaactcctcccaaaactttaacaaggctggatgaaatgaaaggaatactgtgatttctacaattgacaacagtgtcaggcatgcaggaaacaaacaaaaccttttgatgaaggaaaagtaacttctggacaaagtataattggttacaggtaaacagatatgtcatccaggcagatatgacagtttataggaaaaatataatgttatgatctaaaaaatgcaagccacaaacctattgcctgggcaataattagcctgaagttgggctactaaggagctgg

SEQ ID NO: 96701 - DNA, 183 bp, Homo sapiens
tagctgggattacaggcatgcgccaccaggcccggaaggatggagagttatatctaactgtctcaggcagcagcccagtaggccagggagttcagtccagggcatacccactgtcttcatggggctggatcagcactgggccacaccccagctggcactgcccaggagcacagggtgcagtct

SEQ ID NO: 96702 - DNA, 396 bp, Homo sapiens
aaataagtataaataagaataactgcattgaaaaaaaaggcaaacaggatagattccatcactgaaccatcaaatgattccatttgaaccatcaatgaacttctggaagatgctatgcagacagaatcagattgaaggcgaaatccatgagaccaagaagtcccaaaacacaacccagtggaaagaggaaatgacaccgttctcctcccttatgaaagggaggtgatgtggagtaaacaccagccccaacatatgatgacacaatctaaatcttcaaaatattaacttgatttccagaaggggaagcagatgtattttgttttctcctcagtccttctgtgattctacaagttgagcaatatctacatgtgaaaatgactttgactgtttctttta

SEQ ID NO: 96703 - DNA, 281 bp, Homo sapiens
gaccaggcctgaactctattcaagaaagctgcctgccagtttatagcaggggttagcaaaccttttccatgaagagccagttaggaaatgtttgaggctttgcagaacatgtggtctcttgcaactactcaactcactaaagcaacaatggacaacacatccgtgaagaagcatggccgtgttctggtaaaacaaaacttggctgcagtttgcccatgcccagcctagagtttgtagcctcttcccagagagagggaatctgacagattcccaaatctgtc

SEQ ID NO: 96704 - DNA, 722 bp, Homo sapiens
gaatgtaaaaatgaatggggaaaatggtgcaaggagtcatggaacaagaattttgcagaaaaaacatatatggccagtcatcacataaaaaacatgtatgttgaagaagctgtagagctacaatatctctgatacattgctgctggcaaaagttgtaaattggtacaacactcgggaaaacagtttggctttccaccaggcgtggtggctcacgcctgtaatcccagcactttgggaggccaaggccggtggaacacctgaggtcaggagttcgagaccagcctggccaacctggtgaaaccctgtctctactaaaaatataaaaattagccaggcgtggtggcacacacctgtaatcccagctactcggaaagctgaggcaggaaaagtgcttgaacctgggaagtggaggttgcagtgtccgagatggtgccactgcactccagcctggacgacgagtgaaattctgtccccccacaaaaaaagatgaacaatcacatagtcataacccagtaattctacttgtaaaaatatactcgagaaattcttgcaaatgtacaacaggacttatgcatgagactattccaataacaaaaacttggaaacaacacaaatttattgaatgaataactgtggtacattcgcatgaaggaatatatacagtagctaaaactaaaccccagtaacatgaagcaacgtaggtaaatcttagcaatataaga

SEQ ID NO: 96705 - DNA, 405 bp, Homo sapiens
tttaagcatatgggttgctgccaaagattaaaatcattctgtgcttaatatcattctctttctttgtgttcctctgaggtttcgtattttcttttggcagagaaataaaaaggttgaagccagagatcccaaattcccaatagtatctttctatcatttcatactgtgttggtgagcattttccactagggtttctatcactgtctttaaagactagtgccctccctttcaacagtccagggaacaaatctgcacaaaggtagttcttaaaaactattaacaaactgaactgagaagggaatttgtcccagacagtgctccccacagctggacagagcgtgattttcaccaaaacagagtataattcacaggcagcaccagagataggcagggatggggccctct

SEQ ID NO: 96706 - DNA, 172 bp, Homo sapiens
atgcaaagggaagatgaaaaaaggagctaatgatcattctacatttacttgtgtctacgggcaccttatgaaaattacttttagacagatgctatgtctttcccctaaactagtggttctacaacattacagaatgccctggaaggcttgctaacatacagatggctgggac

SEQ ID NO: 96707 - DNA, 472 bp, Homo sapiens
ggtatctgtggatgcccacgtgttcagttctcctttactgactggacttggcgggtgaccaggctgggggacttggttaaaataatgaaactcaggaatccctggccagggaaggcattttcgaggtcatgtggttcccgggtctatgtgtctcttccacaggttgactgctgtatgcagggtcttcaacacatggtctttataatagtattccattgttcctggctctgcgcttggcggggtgtggagctaatgcacccccacccctggttctctgacagcttaaagtctggtgggagagactgagggagaacctgcatgcaccctgaaatgttctgtagagacatgtgataagtctgtgcaagaaggtgttgtgacaggaggagtcatttccaccaagtggaaggggctagccagaaaggcatctggaggagggacacacccaaggcttgaaagaagaaataggtggcaa

SEQ ID NO: 96708 - DNA, 522 bp, Homo sapiens
agaaatttaagaaattcacaggtcaaaagcaaaatgaatacagaaacccagagagataaggtaggactcaagctgccttttccagggatttgtgcaaaatcctctttctttaccctgagctcaatttgcacattgagggaggtgacaaagtctaaagcctaccgaagaatctaatgatacctctgttgtaaagagatctgtacccaaatggctttaccagcacgtttggggtgaactagaaataaacctgtctcacaaaaggggacaacaagaaacactgacagaaacaactttctctaggccatgggacagcaaactataacccctgggccagatctgcctactgcctgtttttgtacaacccatgagctaagaatggtatatatatctggagtgcagtggcgcgatctccactcactgcaagctccgcctcccgggttcacgccattcttctgcctcagcctccccagtagctggtacgacaggcgcctgccaccacgcccggctaagttttttgtattt

SEQ ID NO: 96709 - DNA, 387 bp, Homo sapiens
agaaatttaagaaattcacaggtcaaaagcaaaatgaatacagaaacccagagagataaggtaggactcaagctgccttttccagggatttgtgcaaaatcctctttctttaccctgagctcaatttgcacattgagggaggtgacaaagtctaaagcctaccgaagaatctaatgatacctctgttgtaaagagatctgtacccaaatggctttaccagcacgtttggggtgaactagaaataaacctgtctcacaaaaggggacaacaagaaacactgacagaaacaactttctctaggccatgggacagcaaactataacccctgggccagatctgcctactgcactccagcctgggcaacaaagcgagactccgtctcaaata

SEQ ID NO: 96710 - DNA, 833 bp, Homo sapiens
cactttgtcaggctaacaaacccaaacaaagccaacagccagaagttaaaataaacagatcattaggttgaaaatagaactgtcaaaacaggcccaattgacttcatttagtgattgcaaagaacatcaggcaagacacaggtatgctcatcataacatttatcacatgcttaattgcacatgtttgactaagaaaaacacaaagtatttaagctcatctgtagttcaaagtgcctatccatgtatttatctattcatcctgatgtatttattgagcaactcttttgtgccaggcactgtgctgtgttgcgggaagtcagggaccccaaacggagggaccagctgaagccatgacagaagaacgtggattatgaagattttatggacatttattagttccccaaattaatacttttgtaatttcttatgcctgcctttactgcaatctctaaacataaattgtaaagatttcatggacacttatcacttccccaatcaatacccttgtgatttcctatgcctgtcattactttaatctcttaatcctgtcagtcgagaaggatgtatatcgtctcaggacctgtaataattgcgttaagtacacaaattgtacagcatgtgtgtttgagcaatatgaaatgtgggcaccctgaaaaaagaaccggataacagcaattgttcagggaataagagagataaccttaaactctgaccgcccggtgagccgggcagaacagaaccatatttctcttctttcaaaagcaaatgggagaaatatcgttgaattccttttctcagcatggaacgtccctgagaaagagaatgcgcaccta

SEQ ID NO: 96711 - DNA, 477 bp, Homo sapiens
ttccggccgatcgaggtttattggtcacggtgctgcaagccgtacaggaagtatggaggcatctgcttctggggaggcctcgggaagcttccagtcatggcagaaggtgaagggggagcaggtgtctcacacggcgagagcgggggcaagagcgcgaggtgggaggtgtgccaccggatctcacgagaactcactcactatcgtgagaacagcaccaaggggatagcgctgagctgttcatataaatccaccctcaagatccagtcgcttcccaccaggccccacttccaacgacggggtgacagttcgacaggagattggtggggagaccccaactcctcaacattgcttctactgtttgctatttgctcactcagccactggccacaggtgctgctgcagtagacacgtctgttcatcgccttcacctacggttcaaagctagaagctctggttgcacggcaagcccctcctttc

SEQ ID NO: 96712 - DNA, 476 bp, Homo sapiens
catattttaaagtgggtgtgcttttgcagcgtcgcatagtctgcttgggacacgtgtgtacatatgtgggcatcagtgtctgtgtttgtcagatgacatgacttgtatttcctgttttctccatatcgcgatctcttccggaggcttcttccccctcaaccctccacattccccatggtctgctcatatctagactccccccagcccttagcccctgtgggtgtccctgctgggggtcctggcacctgtatcctctaggttcccaaacttgtgctcggtggttccactttcttgccagccactgctcctgctgctgcttccttcctgatgtccctggaatccactgactcttttcagttgtgacttcctggtgcctgggacctataaggccctgactagaaatgttctggtctctacttcccttccagccttcttgagcacagagggtagatcattctttccacaagacacctttg

SEQ ID NO: 96713 - DNA, 454 bp, Homo sapiens
gagactaagtcttgctgtcgcccaggctggagtgcagtggcgcgatctcggctcactgcaggctccgccccccggggttcacgccattcttctgcctcagcctcctgagtagttgggactacaggcacccgccacctcgcccggctaattttttgtatttttagtagagacggggtttcactgtgttagccaggatggtctcgatctcctgacctcgtgatccacccgcctcagcctcccaaagtgctgggattacaggcgtgagccaccgcgtccggcctccaaaaatagttttgtcttaacatatgatcccgcaattgcactgctaggtatttagccaattgaatttaaaagctgtctacacaaaaacacgcacatgaatcttcatagccactttactaataattgccaaaaactggaagcaaccaagatgttcttctatagatgagcagat

SEQ ID NO: 96714 - DNA, 192 bp, Homo sapiens
ctcgaactcctggtctcaagccatcctcccgcctcagcctcaggactacaggcgtgtgccaccgtgcaggctataatgttgaaatttttaaactcttcctccatcctgcttaatcattaggcattctgaatgaggtcctctgataactgacaagatcgattcagtgtgcctaccccagaagtagtgaaacta

SEQ ID NO: 96715 - DNA, 302 bp, Homo sapiens
gcttagacccaggtgtcagatggtcttcaggaaattatttggacaagggtgatgataaatcaccttccattctgtttgggccataatccctggaacccatggtgggcatatttgaaatgatttgacttaaatgtttaaagctttagtctttcattgggtaatgtcttagagaagacaatttcttagtaatatgaattgttcccaaactgaagtccatcccctttttaggaaactggcagcccaatccaggccctcctgctcccctttggagggtctttgttcctccttgagttagcaatttt

SEQ ID NO: 96716 - DNA, 270 bp, Homo sapiens
acttttgtactccttagcacgctctttcattccttatagtagttaagagtaggtcttactagttaacaattcttcacatgaaatgttcacactactggcaatgtttctctcctggttgatacagtgtttatagcaacatgttttataatagaaacatattgaaaagaataaagtattcctcaacattagaatatataattaaactgcgctatacatatgtaaaatgacgtatatagcaatgaaaatgtaaaaaccacaaccatatacata

SEQ ID NO: 96717 - DNA, 262 bp, Homo sapiens
aggtctcactatactgcccaggctgttctcaaactcccaggctcaagcaatcctcccagctgggcctcccaaagtaatgggattgcaggtgttagccactacacctggcttgatattctattataaggggattactgcattgtaataacaggaaaaaatttccaaatcaggagaagtctggttaaaacatcttgcaataaactttgattattcatcattagataccataatcaaagcctcacttagttatgggccattagac

SEQ ID NO: 96718 - DNA, 278 bp, Homo sapiens
gtagagacggggttttaccatgttggtcaggctggtctcgaacttgtgacctcgttatccgcccacctcggcctcctaaagtgctgggattacaggcgtgagccaccgtgcccggccaggcaaattatatgtacaggcaattcataaaagtcatatggatgtccaatatatagaaagaagttgctgacaccaattattatcagtgcaaataaatagagtggggaagaattctttcacctatcagattggcgaaaattaaaaagatcagtaacggtatg

SEQ ID NO: 96719 - DNA, 400 bp, Homo sapiens
cagcacagaaaaagcctagatttccttgaacacattagtaaaactacggatgttaaaagactctacttgtgaggtctcagaaggaagaggggagcatagcaggaaaaaaaaccattgcctgggagaacacctaactgggcacgaacactgctggcactgctggggagggtgcagaaggatgtcacgagcatgggattggaaactggagcaaagtggatcctgtaacacagtggtagaaagcttggctgaatcgcgtcctgcagttatgtgaaaagcagagcttctaaacactgaaactggacccagctgaggacatttcccagcacagtgttgaaggcaaggcccggtttctcctgctgcttcctcctccagagcaggacaggcccgagggcagtgttaa

SEQ ID NO: 96720 - DNA, 399 bp, Homo sapiens
ctagagtttgttgctggctgttgttgctgctgtttatttagtaacttttctgaacaaattcttaaactctgtgttctctgtcatgtggcccctgaaatctctgctcagttagctagtggtcagctgattagacagagagttccttaaatgcctagaacaaccaagtctcctggtcttttccaaagagcaaagggctcttgtgtctttaggggcacactttccacactcagctaggcagtttactaccctgccttaggcattgcttcctgcttgcatagagcctcaaggtcagctgttaagcgatagcttagtgactttctgggtttttcccttgcacagcgctatgcatgtgcattgccttctagatttctaggaatatgctggagcttttcttttctt

SEQ ID NO: 96721 - DNA, 516 bp, Homo sapiens
tgagatggtgttggcattctgtcttttttattaccaagattcactggtatcaatgatttgggcatattctgcaagtgagtgatttaaattcatggttaatcatagcatcatgaaattttgttacaatgagaaatattcattgtcttctaatccagggatcaacagacaatggccttaatccagaactagccaaccacctatttttgttcggcgtggagctaagaataatttttaaggcagggcgcagtggctcacgcctgtaatcccagcactttgggagaccgaggcgggtggatcaggagggcaggagatctagaccatcttggctaacacggtgaaaccccgtctctgctaaaaatacaaaaaaattagccgggtgtggtggcgggcgcctgtagtcccagttactccggaggctgaggcaggagaatggtgtgaacccgggaggcggagcttgcagtgagccgagatcgcgccattgcgctcctgcctgcgcgacagagcgagactctatct

SEQ ID NO: 96722 - DNA, 345 bp, Homo sapiens
ctctttcccagcacacacaatccagttgtcaataaattttagtagtttttttctctgaaataataattttttgtcccccccacccttaagaatgtgtgcctatttgaaaatggcagaaaagcatgaagaaaatgtcgtcttttttattttttgagaaggagtctcgctctgctgcccaggctggagtgcattggtgcaacctcggctcactgcaatctccgcgtcccgggttcatgccattctcctgcctcagcatcctgagtagctgggactacaggtgcccgccaccatgccctgctaattttttgtatttttagtagagacggggtttcaccgtgttggcca

SEQ ID NO: 96723 - DNA, 146 bp, Homo sapiens
gagtccccattatagctgcccaggtgaaaggctgctgcctcctcagtgaggctactcctggggattggcagggttggaaggcagcacggtagagtgtgctagtgggggcagctgactgaatgcccactcctcctctgggggctggg

SEQ ID NO: 96724 - DNA, 549 bp, Homo sapiens
gactctatgttagtgtttgccctgtttatcaggcagcctttaggcatagctatagtacagaccaagttctggcatagagtcctggggggctgcaggcattaccgaaggccttctgaacctctcctgaagtcgcggttatgtcctctctagttgggaatgtttgactgtcactttttggccactggcattcccttccttcctagtcagtctcaggagccgtaggcacacaggacctcaggtccctgacccaccctgtgggatggccaggaagggagcagccacagtgctcccctcacggtgggccaggggaggggaggtggtctcagtgggcagccctccctacccttccaacaaaggacttttccctactccaggcagtaaattcagtgaatcctgattcaaaatgaatgttcttcttttcccatcatgtgggtctaagctttcattatctttacattcgaaatgcaagggcctggggatctcaggactcacctagcccttggattggtcactaggccccacctggcaccctgaaggcagtgggcaaag

SEQ ID NO: 96725 - DNA, 450 bp, Homo sapiens
ggtgatctagaggatcctggctcccactggttgccaggcaggagtgctgagcccaggaggtttaggctggcatgagccatgatggccacttgcactctggcttgggcaacagagtgagactctatctcaacaaaaagaaattttgctgatcactgatctgtctcatcaccctgctggtgacatcattatttgaattaatatagacccagctttgttatacagtggtcctctccttgtctccctgttaactgctgtgttctgagcagcatggggtacatagtaggtgctcattaaaaatggttgattgagtcattgtgacactgtctgggccccagggagcgtctagactaatgggagaaacaggctcatatctagtgccctccagacaaggaagtaggggctccaaggaggatcaagggctcattttagccactgtaggcaggtgggtga

SEQ ID NO: 96726 - DNA, 223 bp, Homo sapiens
ggtcacacagctagttggtagaggagctcttccataagatagcaaggccacatcacctgcagggcagtgcctgctctgggaggtggcacaatgtgcccagtgatgacgatgacaataactatgaaaggattttatatttgcacagcatttggttgcctgatcttcgatgaggaagagctcctgccgatgtctgctgaattgtgcagtaaaatattcaggatgg

SEQ ID NO: 96727 - DNA, 1680 bp, Homo sapiens
ataagccagaacgagaaaggaaaagactcatatcaacactgtgatcattggacacgtagattcgggcaagtccaccactactggccatctgatctataaatgcggtggcatcgacaaaagaaccattgaaaaatttgagaaggaggctgctgagatgggaaagggctccttcaagtatgcctgggtcttggataaactgaaagctgagcgtgaacgtggtatcaccattgatatctccttgtggaaatttgagaccagcaagtactatgtgactatcattgatgccccaggacacagagactttatcaaaaacatgattacagggacatctcaggctgactgtgctgtcctgattgttgctgctggtgttggtgaatttgaagctggtatctccaagaatgggcagacccgagagcatgcccttctggcttacacactgggtgtgaaacaactaattgtcggtgttaacaaaatggattccactgagccaccctacagccagaagagatatgaggaaattgttaaggaagtcagcacttacattaagaaaattggctacaaccccgacacagtagcatttgtgccaatttctggttggaatggtgacaacatgctggagccaagtgctaacatgccttggttcaagggatggaaagtcacccgtaaggatggcaatgccagtggaaccacgctgcttgaggctctggactgcatcctaccaccaactcgtccaactgacaagcccttgtgcctgcctctccaggatgtctacaaaattggtggtattggtactgttcctgttggccgagtggagactggtgttctcaaacccggtatggtggtcacctttgctccagtcaacgttacaacggaagtaaaatctgtcgaaatgcaccatgaagctttgagtgaagctcttcctggggacaatgtgggcttcaatgtcaagaatgtgtctgtcaaggatgttcgtcgtggcaacgttgctggtgacagcaaaaatgacccaccaatggaagcagctggcttcactgctcaggtgattatcctgaaccatccaggccaaataagcgccggctatgcccctgtattggattgccacacggctcacattgcatgcaagtttgctgagctgaaggaaaagattgatcgccgttctggtaaaaagctggaagatggccctaaattcttgaagtctggtgatgctgccattgttgatatggttcctggcaagcccatgtgtgttgagagcttctcagactatccacctttgggtcgctttgctgttccgtgatatgagacagacagttgcggtgggtgtcatcaaagcagtggacaagaaggctgctggagctggcaaggtcaccaagtctgcccagaaagctcagaaggctaaatgaatattatccctaatacctgccaccccactcttaatcagtggtggaagaacggtctcagaactgtttgtttcaattggccatttaagtttagtagtaaaagactggttaatgataacaatgcatcgtaaaaccttcagaaggaaaggagaatgttttgtggaccactttggttttcttttttgcgtgtggcagttttaagttattagtttttaaaatcagtactttttaatggaaacaacttgaccaaaaatttgtcacagaattttgagacccattaaaa

SEQ ID NO: 96728 - DNA, 414 bp, Homo sapiens
gtgtatgcgtggtgtagcgggatgaaggagcaggctacacttctaatgcccattctaaaataaactttgaagatgatctagtttagccttcccctcttctcaatctacacatgggaaaccaagactcagagcgaagatacaacttaaacagggtcacaaagctattagcggtggaatggggcatttggcgcaggtttcatgatctcctgatatgcttactcctttctccctagctggggtagaatacagaggctaggggaacaggcaaccaaaggcaagcgacagcacccaggggaaaacgctttggggctgagcagtctactggcagggggtcagggaggcaagggcaatttgaccctccatgctctgcctggcaatcacaggcgaattcccggaagtgaaaggacggcggtc

SEQ ID NO: 96729 - DNA, 413 bp, Homo sapiens
taaagagacggggtctttcttttttgcccaggctggagtgcagtggcataatcatagctcactatagcctccaactcctggtctcaagtgatcctcctgtcacagcctcctgagtagttaggattacaggtgagtgtcatcccaggcacctaatttttatttttttagtttgttttgtagagacgaggtctcactatgttgcccaggctggtctcgaattcctggcctcaagtgattctcctgcctttggcttcccaaagtgctgggatcacagacgtgagccaccacgctggcaaaactctttaataactctctctttctaattgtggcaaaattcacacaacataaactttaccatcttaaccatttttaagtgcacaggttagtagattaagtggtcatgtggttgtaca

SEQ ID NO: 96730 - DNA, 1112 bp, Homo sapiens
tcataatgtaagttcttatcaataacagttttactaatggttgagtatcgtatccataaaagtttattaatgggtgctaagaaataaaaagccagaatacagtatcatagcccatgtttcacagatgttatcagaacagtctacaaaatagactctcttattgagttgtatgtaaggtcacatttgcgaagaggttttagggaagagttagtaaccatacagaggctttgccctggaaaccaatgttgttcacagctgctgctgaatgaaaggaccttattcataggattacagtctttggacagagttagaagcttctggctttatagtggttttataccaacaggatttttactatgtttcagtttagcaaaggactgttaacaaaacagttggtgtacttacataataaattgagttcattttacagtttggaagtcttaacagtgatttaccatttagacttacattgtaagatttttggtttggtttggtatttaaataacaatgggggaaataacttggagagggattcggtcacatttttgggagttaaaatattttcatagctagtttttttgtttgttttgggagactgactcttgctctgtctcccaggctggagtgcggtggcacaatctcggcccattgaaagctctgcctccgggttcaaacgattctcctgcctcagcctcctgaatagccgggattacaggcgcatgccacccacgcctggctaatttttacatttttagtagagacgttttcaccatgttggccaggctggtctcaaactcctgacctcaaatgatccacctgcttcggcctcccacattgctgggattacaggtgtgagccaccacgcctggcccatagctagttttaaaatatcttatttgcagctcaaaaaatatggacagtaattcagggaaaatgtgacaaaagtacattttagttcatgcatttaaaattcactctgggccaggtgcagtgcctcatgcctgtaatcccagcactctttgagaggctgaggcagaaggattgcttgagcccagaagtttgagatcagcctgggcaacacagcaagacctagtctccatttaaaaaaaaaa

SEQ ID NO: 96731 - DNA, 540 bp, Homo sapiens
caggcgtgcgctcgaaccttctcccgaatggccctgctccacaagcaccaagagtcgggctgctcagggggccctcgctgaccctagaggctccctcttcctctccctaccagacaccctgcccccgccaaccaacagcctccccagtttcagccatggggccttcgaaggcggtggctgacaccaggacgtgtcagagcctaagatgctctgggcctgagcagctatttcagcttcctgtttggtgtggttggcacctgtttcccaggcaatttaacaatgtctcaagagggactgtaagtaatggttgtcacttgtcggtggcctaagtggggtgctctggtctgcccaatgtatctcccagaactattttgggaacccaacaggtaggcctgggaggaagatgtttacatttttaaaagtacattggtacttatatttcatacattttgtatcaaggaaacgttttgtatagttaatgtgtgcagtttattgatatccaataaagcaatttgtgtattttttaaaaagagtattcaa

SEQ ID NO: 96732 - DNA, 252 bp, Homo sapiens
aggagcataggttttggagtcagattggggtttgtacctcagctctgttagctgtgttatcttgggtaaatcatttaaactctctgagccacagtttcttcatctgtacagtagtgaaggcaatggtaccagctcatagggttgttttgatgattaagtaagataatttatacaaagttgcatagcagagtgcctcacaaaatacatagatattgttagctcagtgtatctcgctcttagcatagagccagc

SEQ ID NO: 96733 - DNA, 177 bp, Homo sapiens
attaatctgctcttataatggagactttaataccccattatcagaaatggacagatgtagcgggcagaaaaccagtaaaaacatagatgaattcaacagtgctgtcaaacaacttgatataattgacatctatagactacttcatccaacaacagcacaatacacattcttctcaag

SEQ ID NO: 96734 - DNA, 724 bp, Homo sapiens
gtcttgctatgttgcccaggctggtcttgaactcttgggctgaagttatcctcctgcctcagcctcccaaagtattgggattataggcatgggccaccatgcccagctctcctatctttctttgtcatcaccttttctccccggcagagctccagcctcaggtatccctcttgtggatgctcctgtttttccatgggtccatgttgtgattatgctgagccaaccacactatgtctccctcctcataacccaaggcacaggcaagtctgtaggaccatctggcaggagagagccaaggcctggacaagcagccagccgtgggccccatcttggctcactgcaacctcccacctcctgagtacaagtgattctcctgcctcagcttcccgagtagctgggactataggctcttgctaccatgcctggctaatttttgtatttttagtagagatggggtttcgccatgttggccagtctcgtcttgaactcctgacctcaggtgatccaccggcctcggcctcccaaagtactgggattacaggcctgagccacaacactcggccccatcattactttattcttaccagctgcactcactggtactagcagttcatgatttgcctgagtcaataatgatatcacaacatcagattccactgatcaaaaaaggacctcgtcagtctagcactcagtggcaaaaaaaaaatgtttaagttattattgc

SEQ ID NO: 96735 - DNA, 347 bp, Homo sapiens
gaaagtatttgtgtgattgagtcacacgctgaatcaatcttcatataatgccatttttgcttaaaagaatgccagacttgggcattaggctgacattttcttgaaaacagtgaggctttgctttagggaaaatagtggtagtatttatggtcgatgataaagttcctagattttaagcaaaaattttagaaagcttgtatcagctgctgtaagtatataatgaaatctgtcattatttgattatctgcataactgagtcagtatttccaaatgatcaatgcatagtattataaaaatcatacatgggtaagaaatctttacaaagtgtcagctagaccaatggattt

SEQ ID NO: 96736 - DNA, 590 bp, Homo sapiens
ctgccttgtttctgcccagcctcatttcttctccaggactcatcatggagtgtgaagcattaaacatatgcttctcctcaggcgacctgctcctctttgatttcaaggccattggcacatattttgcaattattctgtttaccagtttttgttccagtttgaagagattcatgtctaatatataataatatcagaaaatccacagtctccatcctcacttcagtttaagctttctaagggactcctcattgcttctaaacagattctgattttgtctttctaaacaacatcagaagagtcagtaatccatccggcaaatatttattgagtgacaagtcacaaccctggctctcaaggtgtttatgttgttattgaaaatatagtcaatttaaaaggcaatggatcagagcagggttagaggggatggaggggagagggcaggcaacagaactacaaactttgtacacagatggccttgggttccagtcccgggtctgccagatgctagtagtgacacctggagcaagtcactggtcttctctaagcatcggattcctctcatctttaaaaacagagatgaaagtacctac

SEQ ID NO: 96737 - DNA, 469 bp, Homo sapiens
tgtcatattcagggcaatctgtttcttttcttctgaattagatttgctgtatcttccttcctagatgctgtccacttgctgtatctcccttcctagatgctgtccacttgctgtatctcccttcctagatgctgtccacttgctgtatctcccttcctagatgctgttcacttgctgtatctgtcttcctagatgctgtctacttcctgtatctccttcctagatgctgtccacttgctgtatctcccttcctagatgctgtccacttcctgtatctccttcctagatgctgtccacttcctgtatctcccttcctagatgctgtccacttgctgtatctctcttcctagatgctgtccacttgctgtatctgtcttcctagatgctgtccacttgctgtatctcccttcctagatgctgtccacttgctgtatctctcttcctagatgctgtccacttcctgtatctc

SEQ ID NO: 96738 - DNA, 446 bp, Homo sapiens
tactgtcatctcaaaaacagtgactaaggagcccatcttttgcagctatctttgtactacaatacaaatacaacatttacacttacataaatagcttttcagggcagaaaatacagcaagatgaatctgtcatttttatttcctaatacattccaggatattgttttgctaaattatagtcactaaagcccacaaaatatgcaaacttcctactttcccccctcaaggtacactatctgaaggaaaccattacataaatagtgcctctgctaattaattactgctggtcatactcatttttccaaactaagaaatgaaaccaaatagtgtaatttacatttttttctccaactctagttaaaagtaaaaagacagggataaattcagctgcagaatgctgcttacaatgcttccttttttttctaattactcaaatcaatgagtat

SEQ ID NO: 96739 - DNA, 813 bp, Homo sapiens
ggtagtcccagctgctcaggaggctgagacggaaggatcccttgaagctggagtgcactggcatgatcttagctcactgcaccctcgaccacctgggccctagcaagcctcctgccttagcctccccagtagctgggactacaggcacatgccaccatggtcagctttagtctaatttttaaaagaatccatggcagttccctgagttgcagttgcagaaaaagagaaacactactaagatcagagaagaagcaggaattggcaagactggcagccaagagctttataatatcactttgtggaacctagggatatatatgagcattgcaaatccaatttttagtctctaagcagcttcctgcattcgtgcttgaaaagaaactgaaggagcagcactggaaggctagtctgtttattccaaggagaaaaagaaaaaacaaaaaaaaaaaacaccagaggcctgcagtctggtttgaagtctaggcttagtttttagactgaatggtacaatagtattaggaggtgtattttaagctggaaagaattgtggtggtgaagctaatgagaagtgcaaaagcctggaaaagggtaagttagaatcagtggaacctaaggtgtttatttttctggctgaaaattcttcagttaacaccacttgggagcttaaaagttctgtactggaaattataaagatatttttattttggttttatttttaaattaattattttaagatttcacgttgccgtgagaaagtagataattttatttttagattattgctcttagtcttctttttcctagtttgtgtgt

SEQ ID NO: 96740 - DNA, 134 bp, Homo sapiens
agggcccactcgagctgggactgcactagccaggaaggctgccgccttcctcctgcgggagctccaggcacagtctgtaccacccggatacagccgccccaaagttaccggccttgggaaacgtccacagaacc

SEQ ID NO: 96741 - DNA, 700 bp, Homo sapiens
agatcactgaagcagagaactaacaaattctggacttaaactcgatacttgaacaactgaacctaataaacatctacagaatactccacctaacaaccatagaatatacattgttctcaggtgcacatgtaacatattcaaagatcaaccacatgctgagtcttaaagcaagtttcagtaaattcaaaaaaaaaattgaaataattccaaacacactctcagaccacggtgcaataaaaacagaaattgataaagaagatttctcaaaaataacacaaaaacatagaaattaaacaacctgcttctgaatgaaccattgttcattatatgaacaatgaaatcaggacagaaataaaaattctttgcaattaacaaaagcagagacacaacttataaaaatctttgggaggcagctaaagtgatgttaagaggaaagtttatagcactaaatgccttcatcaagaggtcggaaagatctcaagaatctaacatcacacctagaggaactaaaaaacaaaacaaaacaaaaattcaactctaaagctggtagaagaaataattaaaatcaaataagaattgaataaaattgagacacaattaacaacaacaaaaaacagaagatccaaataagcacaatcggaagtgacaaagatattacaacctatcccacagaaatataaaagattggagacgattatga

SEQ ID NO: 96742 - DNA, 309 bp, Homo sapiens
aacattttagaaaattaaaatttaagaaacatgaaaatatcaaattctatgaagaaacttttttcttttcatagttttactgcggctattactttttaaaaataagtgcatgtagcaaccccagaaagatgtgaagaaatggtttaatgtaatgtcaaagatctatttgatgaaagttaataattgatagctttaaagttgaaatcggatagttttttttcccccttgtgtgttaaatgtgcttttcttttttcattttaaaatcacaaaggctttggcagagatgaatttatggaggtaagtctcaag

SEQ ID NO: 96743 - DNA, 192 bp, Homo sapiens
ggcctggtatccacagggttctttacatatgagagaccgaagatatctcaattggccccatctctctggcttccctggtcctttcctgagagagtagactctgttatctatatgcctcacctctatacagcttggatcaaatgaataaaaatacacaaaaagctaatatccttactatgtagtacctggtaa

SEQ ID NO: 96744 - DNA, 696 bp, Homo sapiens
gactgcattgcttgaagagctgtcacatttggcctttgaatttcccaaatgccaaactcgaattagactagagtcccttgggagctttgtccttaaatggtcttgatgttctcggcttatgagaaacctaaagagaacatttaattatttttatgaatgtatttaattacgtttggaaatgcctggttccttttaaccctagcaacctgattgacacagccgcagaccaattatttgtcccatgtaatatttgtttatttgtttaaattgtcataagcatttaaaattggaaagatttcatgtaaatatccaaattgctggctttctctgaaaaaaaaaaatgaagatctgggaacactggcccagtatttccacctatcaacggtggtctgaaaccaagagacaactactccatttagctggagcaaatgcatttgagaatgccatagtctccactactcccgattgcccagtactttgtccacttcactcttacgttacctgcctggccgccgtaaggatggcagttataatcccttagaatcttctccatatcaaagattctttaaaaaaatgtttttaaacatggggtcttgatatgttgcccaggctggtcttgaatttctaggctcaagcaatccacccacctcaacctcccaaagtgctgggattatgggcatgagccactgcatccag

SEQ ID NO: 96745 - DNA, 752 bp, Homo sapiens
agcggcatggaatcaaccttaattctgtgtatttactaatgtaaatgcattcttacgttacaaaattgtgctttaagctggaaaatagtgctttgaccctgtttccttgctgtctgtgttttagatttactgaggaaatggagactgcttacttaaagcctgtatcatgctttagttattcttttccattttacaaatcaggagggagaatttcctgggcaaaaaataattcatgaagtagtggtgccatttttcacaaaaattgatcctgagatgaatattaattgtgtagtctacaaagagttaattttatttctccattgatagtttggacctttgaagtgaagaaattctaaccgaactcctttctgacccttaagcctttttgtttccatgcaaaagaaatctgttaataatctagcatcttgccaaagattctgtctcatttctctatagctgatttgagtattccattttaattcactgcctgtggaattagtaattatatgatttttgtagtgactccaatcttaaataatgatatccttctaataaggcttgttctatttatagggcttaaagagaaattagattgttaagaagaaacaacagaaatactagaaataactattaaaatatactcaaatctattttgtggcctgttttctcatgctttatttatatttctggccaaaagaacaggagtacaaatgatgagcatgtgaggcccttgccctggctcctcccaccca

SEQ ID NO: 96746 - DNA, 425 bp, Homo sapiens
tggggaggccacaggctactgcgcatgggcaaacgaacacagcagtactgatggagcttaaggatttgggtgacagggagggtcagaagcacatccggacgcaggaacttaatggggctgaggttcaaaagagtggctcaggctggtggttcaaatgagcctgaaccctaggacctggctgcagcttctgtggtttcctttaatctgggaagagcagcttgattctccagaggggaacaagccatctcctacatcctgtcttgatagaattttcaatcaacgtgcctgcccccaaagccaaggagtggcacatgacccaagtgaggcaacaggataccccctctccctggattctgaatcggaatcaggaggaacccagggccagtgctccttcctcctggtacccaagggatgtctgctagacc

SEQ ID NO: 96747 - DNA, 685 bp, Homo sapiens
aaacagctggatgtagccgatccaaggagccgcagcccgtggctcagtttaacccccttgactttccctctttgcctccggagaggcagaatttgcagcctgattattcgtagaaataatttttcaaatcttgcctttccggtacggttcacaaggtggcaatttccatgtcactgaacatgaagcctgggtcttaaatatagccaggatgtgaatgccctgcaggcggtgacagtggcaatgtgacatcactgccaagcaacttctttttattttggagcctgggaggggaacaacaggaagctgggcagaggggagatattcttggcagcagcagcagcgatgcagtttaaagagagacaactgtcaaggctagtgactgagcaaaccagagttcgctgaattcgtactggtgccaaacatagccgaagcaaagatgtgtgagactcgtacctgctgctgctcagtccagcctgggcaacagagcaagaccctgtctctgaatgaatgaatggcacatcctttatttttagctgtacagagggtgatgacatcttccaaaatatcgtctaattcagagccttccatgttggtacccactctggatctcttggccggtcttgtgtacagtctggaggcccctggggagatccccccatgttttttctttctctcacgctccctc

SEQ ID NO: 96748 - DNA, 536 bp, Homo sapiens
atataagtcaacaaatagtcctggcataaagcaagttctctatcaatggtatgtggattcggccttctggaaggatgtgaatcagagctccttagccatcaatccttgggaagagaacaaatctttactcagctaaaaaattcagggcctggccaccaccagggcattaatgtggtgcctgcaccagggcaaccaaccagtctctggtcttccatgctgagatccagtggcaaacaaatcagggcacacttcattgttccaagtggtttgggaaatcatcctgtaaaatccaaatatgtggacagagctgatgagttcattcaaattcctttgctgccagcttaaaagaactgggtgcaccaaactgcctatatttaatgtgaagatgtaaatgcagttgtctaacctagggcagaacgtctcatgccccaaagactccagtgaccatagccatttgcagctcacccaggggaggggctggttcccaatgggacatgacccaaaacacacaaactacattagtgagcactattatt

SEQ ID NO: 96749 - DNA, 894 bp, Homo sapiens
taatttttctctcctcagttgggaacatctatcatgctggaggactactgtgatggggctttacattttactgttttgttgctagcttattgtttcatacttgggaatcagtcatgtttctgattgtggtataaagtttgcttaagtgccccttagttaaagctgttcaatgaatgtaagcacacacacacctacacacatattttgaatagtcgtgtgttcatgcctgttctcagtcttgtcccctttaccgtttctcatgcaggttatttcttgcttttttttttttcctcttttttaaccggagaagcaacaaattacgtagttttttttgtgtttctttgattactagtgagcttgagtacttttaatattttattggatatgtttgtgactgactttaatttcttgtttgtgtgtgctgtggctgcccgatccagcacctacttccttctcccaccataccacccccacccccacccctgcaaacaattgtgcatgtggtttgggtggcattgtcacaccctcggctttctagattaacccagttaccttttagcagtgccccacttccccagtagcaatggttcaggggtaggcacctgacccagaccagactactgagataaagatgtttgcctaggctttttcaggagcaattgaagacatcttgttggagatagtgtgctgggaggagtcacattctgaacttgctgcagctcgtttttctaatataaaggaaccagcctgaggcagtaccagggtgagagggagtctattggagcccttgggaacttctggatcaaattggacctgaattgagatctatttctcagctttcacttatgtgagccaataaattccttttttgttgaaggcaaaattgacttggat

SEQ ID NO: 96750 - DNA, 183 bp, Homo sapiens
ttacctgtgcaaatcatccaatgttcatatgcccagtatttgtatccttctttaataaagtatcctctggtgttacacagatatacacatatcaataacagtgcatataagcctttattaagtatactttagattttacataaagaatttctattatctcattctgcattttttatgctttat

SEQ ID NO: 96751 - DNA, 167 bp, Homo sapiens
agtctaatccctgagaacaaggttatcttttatatcctttatattccccgaataattattagaatgttctgaatactgggtaaaataataagaatgcaaagattagttaaggcaagttaatttttcaattacattttttgatgtgaagtgtattattggttgttatc

SEQ ID NO: 96752 - DNA, 257 bp, Homo sapiens
gcttgcccactgctcaccttctgctgtgcggccaggttcctaacaggctgggctgtggaccattactcttaccagtctgtggcccaggagttggggacccctgagctaaggagtttcttcttagggtgatgaaaatgttctaaaactgactgtggtgatagatatacaattatgcaaatatgctaaaagccagtgaattgtacaatttaaatgggtgaattgtatactatgtgaattatgtctcaataaagatgttt

SEQ ID NO: 96753 - DNA, 432 bp, Homo sapiens
aacattttctttttatagaagaaattatttgtgtgaaatcatattattgagactttttcacatgcttatatgcacagtcattaatttttataactgtcaaacctaaaggacacttgtgacattttctttctttctttttttgagatggagtcttgctctatcacccaggctggagtgcagtggcacgatcttggctcactgcaacctccacctcctgggttcaagtgattctcctgcctcagcctcccaagtagatgagattacaggtacatgccaccaaacccagctaatttttgtatttttagtagagacggggtttcaccacgttggccaggctggtctccaactcctgacttcgagttatctgcccattttggcctcccaaagtcctgagattacaggcgtgacaacctcacccagccacctgtgact

SEQ ID NO: 96754 - DNA, 188 bp, Homo sapiens
tgtagtttttttttgttgtatcctttcttggatttattattagtttaatactagcttttagactgatttagggaggatttcttctttctctatcttttggaatagtttcagtaggattggtaccaattctttgaatgtctggtagaattcagctgtgaatccacctggtctgggacttttttgttgtt

SEQ ID NO: 96755 - DNA, 289 bp, Homo sapiens
tgtgtttgtgcatgtgtgcgtgtcataggagaagccttccttgtgtccccaggctcttattcatgaagccacagtgatcatcagcagtatctgctgtgatgaacgccccatgctcagggtgtcagttctggctgaagtttacttttaaagagagtttagtcttctacgtgatggcttcgtgtgattgtttcagaaaggccgcagcatgcagaggaaccagcataagctttgaaatgaggcggacttgggctcaaagtccccagtcacttgagacctgcatgatcacgag

SEQ ID NO: 96756 - DNA, 258 bp, Homo sapiens
agagggttggccttatttccattctgggcttatcagtagctcaacttcagtaagctttccagctaccactgctgcaacacgaaagtcctacttattttgctgtcatttctcacattcttaggcagaaaattgttacctctcagcgtttcttatcttcctaagcacaggcagtcacaggcctacaaaggcaccataaacacaaacgattccaaacacattgtccatctcaacctcgctgccagaagccctgacttcttt

SEQ ID NO: 96757 - DNA, 537 bp, Homo sapiens
gcacatagatgaccagcctaccaggtcttttatgcagttcgacatacaaggtgacagcaaggtttcaggacatccagaacaatcaggatcaagttacaggttcgggccactgcaatgatcgacgacctctacctttcccatccctggcaccttcaataatacctgggagatccaggagctggattttggcacctttgtatctgatgacaccaggcacagtgctcagagtagtgaattcataggctgccacctcagaatatacccctgccaggttactaagcagtgtcgacttccccacaaatggaaaaccaacaaatccaattcaagcatcacctgtctcggccacatcaaaaccttcttctgcacctccaccaccaccaccaccctttggagtagtgagttctcgacgaagcttagcaagacgagccttaagcagccccaggtggtgtgctgtggccttgttgagtccaagccatctcctcttctgtctccgcgatcttagctagggtgctgctcatcgtggcgagtaccctgtgg

SEQ ID NO: 96758 - DNA, 406 bp, Homo sapiens
gtgacagccctgctaaacctccctagaaaactacaaatccatgatgtcaactggtcgttaaactccattactccaggctctcttttcttgacaaaatttaatttaggccagtaggtggcgataattaaacagctgattaaacagggcttcttctaatcatgagagaatgcattaaaagcaatctggaaggttgcttctgggagcaagaggaggaacctttctgtgaatccagtgctgattgaggtgcaattagcagatccactaacgggatgcctctcctgactcttaaggatctcctaggctcccaccgtgatcacttttttttttgagccatggtcttactctgtcacccaggctggagtggcagtggtgtgataacggcttactgcagccttgacctcccaga

SEQ ID NO: 96759 - DNA, 457 bp, Homo sapiens
cagctcctccaaaaagctttcctgctgcactcaccctatacacaggcataaacaacaaactcgtgtaccaaatatgaatggacaatgttcctttgtgcttaccttacctatgaaactataatgtaatgtggagatgttttggtcttcctctgtcatcaaagtgaaaggtcttgaggataggaaacgatttgtaactctttgactttccatagcccttagcacaaggtctagactagggcataaagaagaactcaataaatgttagatgaataaatgaagttcagagaaacagtcattcttaagtacttcaaagaccttggctgggcacggtgcctcacgcctgtaatcccagcactttggaaggctgaggcaagaggatcacttgaactcaggagtttgaggccagcctgggcaaaacagtaagaccccatctctacaataaataaataaatttttt

SEQ ID NO: 96760 - DNA, 802 bp, Homo sapiens
agcggggcgggctcggctgcgggcggcggcgcctccttcggctcctcctcggaatagctcgcggcctgtagcccctggcaggagggcccctcagccccccggtgtggacaggcagcggcggctggcgacgaacgccgggatttcggcggccccggcgctccctttcccggcctcgttttccggataaggaagcgcgggtcccgcatgagccccggcggtggcggcagcgaaagagaacgaggcggtggcgggcggaggcggcgggcgagggcgactacgaccagtgaggcggccgccgcagcccaggcgcgggggcgacgacagctaccctatagttggctgcctggcttcagagctttttttgaacttggaagacttcaagccccaactgaggaatccttgatgctctgttgttttgtcttgctaaaatgtacaagaaacttgcacagctctgtccttcaggcttaaaatcatcccagggaggtcactctaattccttttaatgtgtgctgaagaaagggcagcacagctgaagcctgatttaaaatctgatcttctccctaatgtcacaaggacatcctgagacaatggctgaggagctatgcaccagtacccagctggatccctgatacttacattggcagatgcattatcaacagagacatcgatttagagtgaattaaaggaattacaaagatcaagatgaattcagtgaagcttcccataggactgttcaaagatctccaggcctgccattcatgcattcatgtgagagagacactttgggcctaagaaatgaagg

SEQ ID NO: 96761 - DNA, 353 bp, Homo sapiens
tcacttagctgtctggccccagggtgttctgagatcggttcaggtgtcagtcagggacagatggcacgtgctagagctagagaactcagaaggtcacccttgatcttcactaagttcccgtgtttattccaaaacaatctgtgttgtatttatgtagttttatgactagttgattatctccagtgccgacccctcttcttattccagaccattagatcagttttcagggttcttcttctctctcaacttattcatctttccatgtggttttcaatgtttttactgtctccagttcatgcctttgcagttctaacaaacttgtttcttataacctacttaaaataccaagctcc

SEQ ID NO: 96762 - DNA, 537 bp, Homo sapiens
ataccgaatggggctacaattttaggtctgtgaaattataaatatcagcattctgactaagtatccagaggcagatgaacttttaggatcataattttcctgtgctatatggattttaatttttccctagtcttcactttctgttcagtaattttatagccctttggaagagctttatttgagaggctgtgtcttatgttgaaactgtcttcatcgtgcaaatatgaccgtgtttcctgtggagtcttcataggtgactatgacaagtacctttcccatcaaagcaccttctcaattgcccgaagagctgtagcatcagcttatgtgtttgctaaccctctggtctttagttccattatttctggcatttgggtgttcctttttttgtgaatgcacttaacattttgtcactgaagatgtataggctggtgtgaaggtcgtgagttatctcagttgattgttcacagtcagttacagatcaaactccttgttctactctttcaccccttctcactactgtagttggctagtcttaaa

SEQ ID NO: 96763 - DNA, 530 bp, Homo sapiens
tgcagcacagtttatacaatttggcagatgggaatggaactctccagttaccctctgaaagccctatatgctgaatctggtattttgcaactgagaaaaatccaattttgcttgggagtctcaaattcaaattcattccaagaggagaagaatcaaaaccttcaggcaatcaaagtagggcaattccttaaaaataaaatcctccttggaggatgatgaattattgagttgtaggaatatgttttatttttaaatttaacagccatcaatattgcctttctaatatcttttaaaaatgcatcaacaaccacatttttaaacctaggtgagccccaacattttaagggatttttttctaaaagatgttatcaagttgctgtaaatcaaaatttattttaaaagcctcagagaagtactattcagaagagaatgcatacaatcctatttggaaggacaatcattttctaatttagtttccatgtaaacttgagttttcctggattatacctgtttacagcacctttgtgaaa

SEQ ID NO: 96764 - DNA, 318 bp, Homo sapiens
atctctttttaataccaagtttatcagttatcagcattgaatagttgttcctccattttttattcatttatccaacatgtcttgagtgactaatattctgcactaatatgtgcagaagatttttttaaacacatctaaatattttttgctttgccacaattaaaaacagtgactattagctgtcctgtctctttcttacctttgacctcttacctctctccagcaaagatctcttctttacaaaaacttgtacctgaccctgctattctcactttattttattttccctattatacccataagaaaactgaggcttag

SEQ ID NO: 96765 - DNA, 1932 bp, Homo sapiens
ggagatattatgaggctgttgtcattagggcgattgcggtggaatcgctgaatcttgactcggcggtggttggctctccctctcctctctccctctccctctccctctctgtctcgggttctctctctgcgcgcgcgcaccgggccgctctcctacctccctctctatgtggctgcgcgggtgtgtgtgtgtgtggatgtgtgtggggtgtgggtgtcccttacgcccttcctcctctccctcctcctcctgctcccccctcctttccttctcctcctcccccctctcctctccctcctcctggtcctcatcgcccctctcctcctcttcctcccctctctcttcctctccctgaattttctcctctcctctcaggtcagtccatggtattccgctcccccctagacctctattcctcccacttcttgttgccaaacttcgccgattctcaccaccgctccatacttctggcgagtagcggcggcgggaacggtgcgggaggcggcggcggcgcgggaggcggcagcggcggcgggaacggtgcgggaggcggcggtgctggcggagcaggcggcggcggcggcggcggctccagggcccccccggaagagttgtccatgttccagctgcccaccctcaacttctcgccggagcaggtggccagcgtctgtgagacgctggaggagacgggcgacatcgagcggctgggccgcttcctctggtcgctgcccgtggcccccggggcgtgcgaggccatcaacaaacacgagtcgatcctgcgcgcgcgcgccgtggtcgccttccacacgggcaacttccgcgacctctaccacatccttgagaaccacaagttcaccaaggagtctcacggcaagctgcaggccatgtggctcgaggcgcactaccaggaggccgagaagctgcgcggccgcccactcggcccggtggacaagtaccgcgtgcgcaagaagttcccgctgccacgcaccatctgggacggcgagcagaagacgcattgcttcaaggagcggactcggagcctgttgcgggagtggtacctacaggacccctaccccaaccccagcaagaaacgcgaactggcgcaggccaccggcctcactcccacacaagtaggcaactggtttaagaaccggcggcagcgcgaccgcgccgcggcggccaagaacaggctccagcaccaggccattggaccgagcggcatgcgctcgctggccgagcccggctgccccacgcacggctcggcagagtcgccgtccacggcggccagcccgaccaccagcgtgtccagcctgacggagcgcgcggacaccggcacctccatcctctcggtaacctccagcgactcggaatgtgatgtatgatagccaaggccgccctcctccctctccttcccctcctcccccactccttcccctccgcctcctagccctcctcctcttcctcctcttccttctcctcctccatccccagaacaaaccgaaatcaggatacccaaccatacacacatacaagtccacacacactcccaccccagccaaaaatatataaaaaacaagaaaataacaaattaaccgcaaactatcaacaacccccaaccaccatctaccactacggccaccccaaaggaccccgacgccaacagacagtcaaacgctgatgttgcgggcagaaaacataaaagaggtgacaattgtatactttctaggacaagcacggcttctcctttcggttcccatggacccggcaccccacctgcatgacgatttatttgtatctgggaaaatattctctctagttaaaaatgatttaaagagtcgactatacaaaaatcaatcaccaccacgaggacaagagggcaaaagcaaaacagacaaaaagaaaaaaaatcgccgtctccgttccgaatttgtt

SEQ ID NO: 96766 - DNA, 367 bp, Homo sapiens
ttgtccttccagcttctagcaaggtgctttgtgcacagtaaacaacccaggcctccatctaccactacggccaccccaaaggaccccgacgccaacagacagtcaaacgctgatgttgcgggcagaaaacataaaagaggtgacaattgtatactttctaggacaagcacggcttctcctttcggttcccatggacccggcaccccacctgcatgacgatttatttgtatctgggaaaatattctctctagttaaaaatgatttaaagagtcgactatacaaaaatcaatcaccaccacgaggacaagagggcaaaagcaaaacagacaaaaagaaaaaaaatcgccgtctccgttccgaatttgtt

SEQ ID NO: 96767 - DNA, 1710 bp, Homo sapiens
ggagatattatgaggctgttgtcattagggcgattgcggtggaatcgctgaatcttgactcggcggtggttggctctccctctcctctctccctctccctctccctctctgtctcgggttctctctctgcgcgcgcgcaccgggccgctctcctacctccctctctatgtggctgcgcgggtgtgtgtgtgtgtggatgtgtgtggggtgtgggtgtcccttacgcccttcctcctctccctcctcctcctgctcccccctcctttccttctcctcctcccccctctcctctccctcctcctggtcctcatcgcccctctcctcctcttcctcccctctctcttcctctccctgaattttctcctctcctctcaggtcagtccatggtattccgctcccccctagacctctattcctcccacttcttgttgccaaacttcgccgattctcaccaccgctccatacttctggcgagtagcggcggcgggaacggtgcgggaggcggcggcggcgcgggaggcggcagcggcggcgggaacggtgcgggaggcggcggtgctggcggagcaggcggcggcggcggcggcggctccagggcccccccggaagagttgtccatgttccagctgcccaccctcaacttctcgccggagcaggtggccagcgtctgtgagacgctggaggagacgggcgacatcgagcggctgggccgcttcctctggtcgctgcccgtggcccccggggcgtgcgaggccatcaacaaacacgagtcgatcctgcgcgcgcgcgccgtggtcgccttccacacgggcaacttccgcgacctctaccacatccttgagaaccacaagttcaccaaggagtctcacggcaagctgcaggccatgtggctcgaggcgcactaccaggaggccgagaagctgcgcggccgcccactcggcccggtggacaagtaccgcgtgcgcaagaagttcccgctgccacgcaccatctgggacggcgagcagaagacgcattgcttcaaggagcggactcggagcctgttgcgggagtggtacctacaggacccctaccccaaccccagcaagaaacgcgaactggcgcaggccaccggcctcactcccacacaagtaggcaactggtttaagaaccggcggcagcgcgaccgcgccgcggcggccaagaacaggttagtggcggggcccgcggcctggctacagcctcagaggcctgggaaggggagaggggttgagatggggctagcggagcggccgctgagagccagggaagccgtgactcctggccagtcggagaaagtttccgcttgtccgggacgcgcggaagagggggccgggctggctgtgggtgtattgattgctttgaccaagaggggctttcgtcagggcagagagtgtgtgcttgcgacccgagtacccgcagcccctgggagacttagccctgcgctgcacccgtgcctgcctcctcagccctgccgccagctcggcgatcctctggagcctagagacagggagggaaggaaagcactctttgccatctggttcttatttctgtgcgttgcaaaaccccgagagaaatccactagcgtcagagagaggaaagtgaacctgggtccctatcacaaggggaaaaggccagaggccactgcgcagcgggcctgtttccccgcaacgctgcacgttgcctgaccgg

SEQ ID NO: 96768 - DNA, 1701 bp, Homo sapiens
  misc_feature (2)..(2): n is a, c, g, or t
  misc_feature (5)..(5): n is a, c, g, or t
gnccnggagagaacgccggtggcggggctggtagcccggcagccgcaggtggggccacgagcgctggctgagggaccgagccggagagccccggagcccccgtaacccgcgcggggagcgcccaggatgccgcgcggggactcggagcaggtgcgctactgcgcgcgcttctcctacctctggctcaagttttcacttatcatctattccaccgtgttctggctgattggggccctggtcctgtctgtgggcatctatgcagaggttgagcggcagaaatataaaacccttgaaagtgccttcctggctccagccatcatcctcatcctcctgggcgtcgtcatgttcatggtctccttcattggtgtgctggcgtccctccgtgacaacctgtaccttctccaagcattcatgtacatccttgggatctgcctcatcatggagctcattggtggcgtggtggccttgaccttccggaaccagaccattgacttcctgaacgacaacattcgaagaggaattgagaactactatgatgatctggacttcaaaaacatcatggactttgttcagaaaaagttcaagtgctgtggcggggaggactaccgagattggagcaagaatcagtaccacgactgcagtgcccctggacccctggcctgtggggtgccctacacctgctgcatcaggaacacgacagaagttgtcaacaccatgtgtggctacaaaactatcgacaaggagcgtttcagtgtgcaggatgtcatctacgtgcggggctgcaccaacgccgtgatcatctggttcatggacaactacaccatcatggcgggcatcctcctgggcatcctgcttccccagttcctgggggtgctgctgacgctgctgtacatcacccgggtggaggacatcatcatggagcactctgtcactgatgggctcctggggcccggtgccaagcccagcgtggaggcggcaggcacgggatgctgcttgtgctaccccaattagggcccagcctgccatggcagctccaacaaggaccgtctgggatagcacctctcagtcaacatcgtggggctggacagggctgcggcccctctgcccacactcagtactgaccaaagccagggctgtgtgtgcctgtgtgtaggtcccacggcctctgcctccccagggagcagagcctgggcctcccctaagaggctttccccgaggcagctctggaatctgtgcccacctggggcctggggaacaaggccctcctttctccaggcctgggctacaggggagggagagcctgaggctctgctcagggcccatttcatctctggcagtgccttggcggtggtattcaaggcagttttgtagcacctgtaattggggagagggagtgtgcccctcggggcaggagggaagggcatctggggaagggcaggagggaagagctgtccatgcagccacgcccatggccaggttggcctcttctcagcctcccaggtgccttgagccctcttgcaagggcggctgcttccttgagcctagtttttttacgtgatttttgtaacattcatttttttgtacagataacaggagtttctgactaatcaaagctggtatttccccgcatgtcttattcttgcccttcccccaaccagtttgttaatcaaacaataaaaacatgttttgtttttttttttt

SEQ ID NO: 96769 - DNA, 830 bp, Homo sapiens
  misc_feature (2)..(2): n is a, c, g, or t
  misc_feature (5)..(5): n is a, c, g, or t
gnccnggagagaacgccggtggcggggctggtagcccggcagccgcaggtggggccacgagcgctggctgagggaccgagccggagagccccggagcccccgtaacccgcgcggggagcgcccaggatgccgcgcggggactcggagcaggtgcgctactgcgcgcgcttctcctacctctggctcaagttttcacttatcatctattccaccgtgttctggctgattggggccctggtcctgtctgtgggcatctatgcagaggttgagcggcagaaatataaaacccttgaaagtgccttcctggctccagccatcatcctcatcctcctgggcgtcgtcatgttcatggtctccttcattggtgtgctggcgtccctccgtgacaacctgtaccttctccaagcagtgagtggaccacaccacccctcagccgggactccccaggagagctggggcgcctgcccctgtgcccttgggcagctcagtttcttttgtccctgcctcaaaccacctcctttagagagctccttagatcagcccatctgaccacactggcccaagaatgcccaggccacctcccctcctgcatgtaaaagctgatttgaatactgttcttacttaaactctgtgttcatctggatgctcagttgcgagtaggaaaaaccacactcaaatgagagcaagcaaagacaaaaaaaggagatggtagtgagtcattagctcatgcaaccagcaaacccacactgggtccaggggtttagatggcgccactgggcagggttgggcaatctccccagcccctgccagccggggctgctccctttgca

SEQ ID NO: 96770 - DNA, 1306 bp, Homo sapiens
ctgccatgttcctcccggcaggattgtcccagccctagccgagggggaccgagtgctgcagtgatgaggagaacagcccatgagggagaccattgacttcctgaacgacaacattcgaagaggaattgagaactactatgatgatctggacttcaaaaacatcatggactttgttcagaaaaagttcaagtgctgtggcggggaggactaccgagattggagcaagaatcagtaccacgactgcagtgcccctggacccctggcctgtggggtgccctacacctgctgcatcaggaacacgacagaagttgtcaacaccatgtgtggctacaaaactatcgacaaggagcgtttcagtgtgcaggatgtcatctacgtgcggggctgcaccaacgccgtgatcatctggttcatggacaactacaccatcatggcgggcatcctcctgggcatcctgcttccccagttcctgggggtgctgctgacgctgctgtacatcacccgggtggaggacatcatcatggagcactctgtcactgatgggctcctggggcccggtgccaagcccagcgtggaggcggcaggcacgggatgctgcttgtgctaccccaattagggcccagcctgccatggcagctccaacaaggaccgtctgggatagcacctctcagtcaacatcgtggggctggacagggctgcggcccctctgcccacactcagtactgaccaaagccagggctgtgtgtgcctgtgtgtaggtcccacggcctctgcctccccagggagcagagcctgggcctcccctaagaggctttccccgaggcagctctggaatctgtgcccacctggggcctggggaacaaggccctcctttctccaggcctgggctacaggggagggagagcctgaggctctgctcagggcccatttcatctctggcagtgccttggcggtggtattcaaggcagttttgtagcacctgtaattggggagagggagtgtgcccctcggggcaggagggaagggcatctggggaagggcaggagggaagagctgtccatgcagccacgcccatggccaggttggcctcttctcagcctcccaggtgccttgagccctcttgcaagggcggctgcttccttgagcctagtttttttacgtgatttttgtaacattcatttttttgtacagataacaggagtttctgactaatcaaagctggtatttccccgcatgtcttattcttgcccttcccccaaccagtttgttaatcaaacaataaaaacatgttttgtttttttttttt

SEQ ID NO: 96771 - DNA, 2070 bp, Homo sapiens
  misc_feature (2)..(2): n is a, c, g, or t
  misc_feature (5)..(5): n is a, c, g, or t
gnccnggagagaacgccggtggcggggctggtagcccggcagccgcaggtggggccacgagcgctggctgagggaccgagccggagagccccggagcccccgtaacccgcgcggggagcgcccaggatgccgcgcggggactcggagcaggtgcgctactgcgcgcgcttctcctacctctggctcaagttttcacttatcatctattccaccgtgttctggctgattggggccctggtcctgtctgtgggcatctatgcagaggttgagcggcagaaatataaaacccttgaaagtgccttcctggctccagccatcatcctcatcctcctgggcgtcgtcatgttcatggtctccttcattggtgtgctggcgtccctccgtgacaacctgtaccttctccaagcattcatgtacatccttgggatctgcctcatcatggagctcattggtggcgtggtggccttgaccttccggaaccagaccattgacttcctgaacgacaacattcgaagaggaattgagaactactatgatgatctggacttcaaaaacatcatggactttgttcagaaaaagttcaagtgctgtggcggggaggactaccgagattggagcaagaatcagtaccacgactgcagtgcccctggacccctggcctgtggggtgccctacacctgctgcatcaggaacacgacagaagttgtcaacaccatgtgtggctacaaaactatcgacaaggagcgtttcagtgtgcaggatgtcatctacgtgcggggctgcaccaacgccgtgatcatctggttcatggacaactacaccatcatggcgggcatcctcctgggcatcctgcttccccagttcctgggggtgctgctgacgctgctgtacatcacccgggtggaggacatcatcatggagcactctgtcactgatgggctcctggggcccggtgccaagcccagcgtggaggcggcaggcacgggatgctgcttgtgctaccccaattagggcccagcctgccatggcagctccaacaaggaccgtctgggatagcacctctcagtcaacatcgtggggctggacagggctgcggcccctctgcccacactcagtactgaccaaagccagggctgtgtgtgcctgtgtgtaggtcccacggcctctgcctccccagggagcagagcctgggcctcccctaagaggctttccccgaggcagctctggaatctgtgcccacctggggcctggggaacaaggccctcctttctccaggcctgggctacaggggagggagagcctgaggctctgctcagggcccatttcatctctggcagtgccttggcggtggtattcaaggcagttttgtagcacctgtaattggggagagggagtgtgcccctcggggcaggagggaagggcatctggggaagggcaggagggaagagctgtccatgcagccacgcccatggccaggttggcctcttctcagcctcccaggtgccttgagccctcttgcaagggcggctgcttccttgagcctagtttttttacgtgatttttgtaacattcatttttttgtacagataacaggagtttctgactaatcaaagctggtatttccccgcatgtcttattcttgcccttcccccaaccagtttgttaatcaaacaataaaaacatgttttgttttttttttttaaaaaaaaaaaaaaaaaaaaaaaaaaaaaaaaaatggcgggggcgttatttatgtgcggggggcgggaaaaagaggggtgtaagaaaaggggccagaggggcccaaagaggggtttctcggagacaccacgtcttttctgggctaacaagagggggcgaacaactcgcgcggggtctcctcccatattagaggggagaggcgttaacataacttccgcgcgtaaagagagccgcggtgtgcacacccgcgggtctaatgaggcaccccgcgggccaacaacggggcgaggaaaacaggagaaagcaagcgggagagacgaaacagcgacgagaaggggggagaaaaacacaacagcgagcgaagagggc

SEQ ID NO: 96772 - DNA, 1728 bp, Homo sapiens
  misc_feature (2)..(2): n is a, c, g, or t
  misc_feature (5)..(5): n is a, c, g, or t
gnccnggagagaacgccggtggcggggctggtagcccggcagccgcaggtggggccacgagcgctggctgagggaccgagccggagagccccggagcccccgtaacccgcgcggggagcgcccaggatgccgcgcggggactcggagcaggtgcgctactgcgcgcgcttctcctacctctggctcaagttttcacttatcatctattccaccgtgttctggctgattggggccctggtcctgtctgtgggcatctatgcagaggttgagcggcagaaatataaaacccttgaaagtgccttcctggctccagccatcatcctcatcctcctgggcgtcgtcatgttcatggtctccttcattggtgtgctggcgtccctccgtgacaacctgtaccttctccaagcattcatgtacatccttgggatctgcctcatcatggagctcattggtggcgtggtggccttgaccttccggaaccagaccattgacttcctgaacgacaacattcgaagaggaattgagaactactatgatgatctggacttcaaaaacatcatggactttgttcagaaaaagttcaagtgctgtggcggggaggactaccgagattggagcaagaatcagtaccacgactgcagtgcccctggacccctggcctgtggggtgccctacacctgctgcatcaggaacacgacagaagttgtcaacaccatgtgtggctacaaaactatcgacaaggagcgtttcagtgtgcaggatgtcatctacgtgcggggctgcaccaacgccgtgatcatctggttcatggacaactacaccatcatggcgggcatcctcctgggcatcctgcttccccagttcctgggggtgctgctgacgctgctgtacatcacccgggtggaggacatcatcatggagcactctgtcactgatgggctcctggggcccggtgccaagcccagcgtggaggcggcaggcacgggatgctgcttgtgctaccccaattagggcccagcctgccatggcagctccaacaaggaccgtctgggatagcacctctcagtcaacatcgtggggctggacagggctgcggcccctctgcccacactcagtactgaccaaagccagggctgtgtgtgcctgtgtgtaggtcccacggcctctgcctccccagggagcagagcctgggcctcccctaagaggctttccccgaggcagctctggaatctgtgcccacctggggcctggggaacaaggccctcctttctccaggcctgggctacaggggagggagagcctgaggctctgctcagggcccatttcatctctggcagtgccttggcggtggtattcaaggcagttttgtagcacctgtaattggggagagggagtgtgcccctcggggcaggagggaagggcatctggggaagggcaggagggaagagctgtccatgcagccacgcccatggccaggttggcctcttctcagcctcccaggtgccttgagccctcttgcaagggcggctgcttccttgagcctagtttttttacgtgatttttgtaacattcatttttttgtacagataacaggagtttctgactaatcaaagctggtatttccccgcatgtcttattcttgcccttcccccaaccagtttgttaatcaaacaataaaaacatgttttgttttttttttttaaaatttgcatttttaaaaaaaaaaaa

SEQ ID NO: 96773 - DNA, 1113 bp, Homo sapiens
cagaatctagggtcaccttctcatgctgcatatgggaaactgaggatcacagcggttgagggactagcctggaccttgtgtacatggcagagtcggggctgtggctcctgccagccgaggtcctctgctgggctgacccagctccttcccatgcagcgtttcagtgtgcaggatgtcatctacgtgcggggctgcaccaacgccgtgatcatctggttcatggacaactacaccatcatggcgggcatcctcctgggcatcctgcttccccagttcctgggggtgctgctgacgctgctgtacatcacccgggtggaggacatcatcatggagcactctgtcactgatgggctcctggggcccggtgccaagcccagcgtggaggcggcaggcacgggatgctgcttgtgctaccccaattagggcccagcctgccatggcagctccaacaaggaccgtctgggatagcacctctcagtcaacatcgtggggctggacagggctgcggcccctctgcccacactcagtactgaccaaagccagggctgtgtgtgcctgtgtgtaggtcccacggcctctgcctccccagggagcagagcctgggcctcccctaagaggctttccccgaggcagctctggaatctgtgcccacctggggcctggggaacaaggccctcctttctccaggcctgggctacaggggagggagagcctgaggctctgctcagggcccatttcatctctggcagtgccttggcggtggtattcaaggcagttttgtagcacctgtaattggggagagggagtgtgcccctcggggcaggagggaagggcatctggggaagggcaggagggaagagctgtccatgcagccacgcccatggccaggttggcctcttctcagcctcccaggtgccttgagccctcttgcaagggcggctgcttccttgagcctagtttttttacgtgatttttgtaacattcatttttttgtacagataacaggagtttctgactaatcaaagctggtatttccccgcatgtcttattcttgcccttcccccaaccagtttgttaatcaaacaataaaaacatgttttgtttttttttttt

SEQ ID NO: 96774 - DNA, 865 bp, Homo sapiens
caccagccctgccccttcttctcagttcctgggggtgctgctgacgctgctgtacatcacccgggtggaggacatcatcatggagcactctgtcactgatgggctcctggggcccggtgccaagcccagcgtggaggcggcaggcacgggatgctgcttgtgctaccccaattagggcccagcctgccatggcagctccaacaaggaccgtctgggatagcacctctcagtcaacatcgtggggctggacagggctgcggcccctctgcccacactcagtactgaccaaagccagggctgtgtgtgcctgtgtgtaggtcccacggcctctgcctccccagggagcagagcctgggcctcccctaagaggctttccccgaggcagctctggaatctgtgcccacctggggcctggggaacaaggccctcctttctccaggcctgggctacaggggagggagagcctgaggctctgctcagggcccatttcatctctggcagtgccttggcggtggtattcaaggcagttttgtagcacctgtaattggggagagggagtgtgcccctcggggcaggagggaagggcatctggggaagggcaggagggaagagctgtccatgcagccacgcccatggccaggttggcctcttctcagcctcccaggtgccttgagccctcttgcaagggcggctgcttccttgagcctagtttttttacgtgatttttgtaacattcatttttttgtacagataacaggagtttctgactaatcaaagctggtatttccccgcatgtcttattcttgcccttcccccaaccagtttgttaatcaaacaataaaaacatgttttgtttttttttttt

SEQ ID NO: 96775 - DNA, 976 bp, Homo sapiens
  misc_feature (2)..(2): n is a, c, g, or t
  misc_feature (5)..(5): n is a, c, g, or t
gnccnggagagaacgccggtggcggggctggtagcccggcagccgcaggtggggccacgagcgctggctgagggaccgagccggagagccccggagcccccgtaacccgcgcggggagcgcccaggatgccgcgcggggactcggagcaggtgcgctactgcgcgcgcttctcctacctctggctcaagttttcacttatcatctattccaccgtgttctggctgattggggccctggtcctgtctgtgggcatctatgcagaggttgagcggcagaaatataaaacccttgaaagtgccttcctggctccagccatcatcctcatcctcctgggcgtcgtcatgttcatggtctccttcattggtgtgctggcgtccctccgtgacaacctgtaccttctccaagcattcatgtacatccttgggatctgcctcatcatggagctcattggtggcgtggtggccttgaccttccggaaccagaccattgacttcctgaacgacaacattcgaagaggaattgagaactactatgatgatctggacttcaaaaacatcatggactttgttcagaaaaagttcaagtgctgtggcggggaggactaccgagattggagcaagaatcagtaccacgactgcagtgcccctggacccctggcctgtggggtgccctacacctgctgcatcaggaacacgacagaagttgtcaacaccatgtgtggctacaaaactatcgacaaggagcgtttcagtgtgcaggatgtcatctacgtgcggggctgcaccaacgccgtgatcatctggttcatggacaactacaccatcatggcgggcatcctcctgggcatcctgcttccccagataacaggagtttctgactaatcaaagctggtatttccccgcatgtcttattcttgcccttcccccaaccagtttgttaatcaaacaataaaaacatgttttgtttttttttttt

SEQ ID NO: 96776 - DNA, 964 bp, Homo sapiens
  misc_feature (2)..(2): n is a, c, g, or t
  misc_feature (5)..(5): n is a, c, g, or t
gnccnggagagaacgccggtggcggggctggtagcccggcagccgcaggtggggccacgagcgctggctgagggaccgagccggagagccccggagcccccgtaacccgcgcggggagcgcccaggatgccgcgcggggactcggagcaggtgcgctactgcgcgcgcttctcctacctctggctcaagttttcacttatcatctattccaccgtgttctggctgattggggccctggtcctgtctgtgggcatctatgcagaggttgagcggcagaaatataaaacccttgaaagtgccttcctggctccagccatcatcctcatcctcctgggcgtcgtcatgttcatggtctccttcattggtgtgctggcgtccctccgtgacaacctgtaccttctccaagcattcatgtacatccttgggatctgcctcatcatggagctcattggtggcgtggtggccttgaccttccggaaccagaccattgacttcctgaacgacaacattcgaagaggaattgagaactactatgatgatctggacttcaaaaacatcatggactttgttcagaaaaagttcaagtgctgtggcggggaggactaccgagattggagcaagaatcagtaccacgactgcagtgcccctggacccctggcctgtggggtgccctacacctgctgcatcaggaacacgacagaagttgtcaacaccatgtgtggctacaaaactatcgacaaggagcgtttcagtgtgcaggatgtcatctacgtgcggggctgcaccaacgccgtgatcatctggttcatggacaactacaccatcatggcgggcatcctcctgggcatcctgcttccccagggtgggcaggccgtgggttcagagaaagtgtgacttggtgattgcagaagggcagagaaggtgcagaggggaagagcgaagaggcttttttcatagaagtcca

SEQ ID NO: 96777 - DNA, 828 bp, Homo sapiens
  misc_feature (2)..(2): n is a, c, g, or t
  misc_feature (5)..(5): n is a, c, g, or t
gnccnggagagaacgccggtggcggggctggtagcccggcagccgcaggtggggccacgagcgctggctgagggaccgagccggagagccccggagcccccgtaacccgcgcggggagcgcccaggatgccgcgcggggactcggagcaggtgcgctactgcgcgcgcttctcctacctctggctcaagttttcacttatcatctattccaccgtgttctggctgattggggccctggtcctgtctgtgggcatctatgcagaggttgagcggcagaaatataaaacccttgaaagtgccttcctggctccagccatcatcctcatcctcctgggcgtcgtcatgttcatggtctccttcattggtgtgctggcgtccctccgtgacaacctgtaccttctccaagcattcatgtacatccttgggatctgcctcatcatggagctcattggtggcgtggtggccttgaccttccggaaccagaccattgacttcctgaacgacaacattcgaagaggaattgagaactactatgatgatctggacttcaaaaacatcatggactttgttcagaaaaagttcaagtgctgtggcggggagcaccaccaatacaattggtggtgctctctggggtagctctcaagggccagtttctggatttctgcacaatgcaagctacagagctggggaagttgccggctggaggagttctctaccctccaccttccttcctctactctccggctttctgccccagtcctttgcctgacacatcgttgcttcaggtacgccaggatctgccatccccttcggatttttattctatcc

SEQ ID NO: 96778 - DNA, 1400 bp, Homo sapiens
aggaaggcactttcaagggttttatatttctgggcgtcgtcatgttcatggtctccttcattggtgtgctggcgtccctccgtgacaacctgtaccttctccaagcattcatgtacatccttgggatctgcctcatcatggagctcattggtggcgtggtggccttgaccttccggaaccagaccattgacttcctgaacgacaacattcgaagaggaattgagaactactatgatgatctggacttcaaaaacatcatggactttgttcagaaaaagttcaagtgctgtggcggggaggactaccgagattggagcaagaatcagtaccacgactgcagtgcccctggacccctggcctgtggggtgccctacacctgctgcatcaggaacacgacagaagttgtcaacaccatgtgtggctacaaaactatcgacaaggagcgtttcagtgtgcaggatgtcatctacgtgcggggctgcaccaacgccgtgatcatctggttcatggacaactacaccatcatggcgggcatcctcctgggcatcctgcttccccagttcctgggggtgctgctgacgctgctgtacatcacccgggtggaggacatcatcatggagcactctgtcactgatgggctcctggggcccggtgccaagcccagcgtggaggcggcaggcacgggatgctgcttgtgctaccccaattagggcccagcctgccatggcagctccaacaaggaccgtctgggatagcacctctcagtcaacatcgtggggctggacagggctgcggcccctctgcccacactcagtactgaccaaagccagggctgtgtgtgcctgtgtgtaggtcccacggcctctgcctccccagggagcagagcctgggcctcccctaagaggctttccccgaggcagctctggaatctgtgcccacctggggcctggggaacaaggccctcctttctccaggcctgggctacaggggagggagagcctgaggctctgctcagggcccatttcatctctggcagtgccttggcggtggtattcaaggcagttttgtagcacctgtaattggggagagggagtgtgcccctcggggcaggagggaagggcatctggggaagggcaggagggaagagctgtccatgcagccacgcccatggccaggttggcctcttctcagcctcccaggtgccttgagccctcttgcaagggcggctgcttccttgagcctagtttttttacgtgatttttgtaacattcatttttttgtacagataacaggagtttctgactaatcaaagctggtatttccccgcatgtcttattcttgcccttcccccaaccagtttgttaatcaaacaataaaaacatgttttgtttttttttttt

SEQ ID NO: 96779 - DNA, 1520 bp, Homo sapiens
ctgccatgttcctcccggcaggattgtcccagccctagccgagggggaccgagtgctgcagtgatgaggagaacagcccatgagggaggtcaggagacctgaattccagtcctggcaagaccccacccagcctgctctgtgacctcactccctccccaagtctcgagctcctcatctgtaaaacaagaggctggatggtggaggagtgtggagaggggctctggagggcaaagggaagattccagcgtgggcccatccctgggcggtagaaagagcactgggcctggaaccaggacagccagaccattgacttcctgaacgacaacattcgaagaggaattgagaactactatgatgatctggacttcaaaaacatcatggactttgttcagaaaaagttcaagtgctgtggcggggaggactaccgagattggagcaagaatcagtaccacgactgcagtgcccctggacccctggcctgtggggtgccctacacctgctgcatcaggaacacgacagaagttgtcaacaccatgtgtggctacaaaactatcgacaaggagcgtttcagtgtgcaggatgtcatctacgtgcggggctgcaccaacgccgtgatcatctggttcatggacaactacaccatcatggcgggcatcctcctgggcatcctgcttccccagttcctgggggtgctgctgacgctgctgtacatcacccgggtggaggacatcatcatggagcactctgtcactgatgggctcctggggcccggtgccaagcccagcgtggaggcggcaggcacgggatgctgcttgtgctaccccaattagggcccagcctgccatggcagctccaacaaggaccgtctgggatagcacctctcagtcaacatcgtggggctggacagggctgcggcccctctgcccacactcagtactgaccaaagccagggctgtgtgtgcctgtgtgtaggtcccacggcctctgcctccccagggagcagagcctgggcctcccctaagaggctttccccgaggcagctctggaatctgtgcccacctggggcctggggaacaaggccctcctttctccaggcctgggctacaggggagggagagcctgaggctctgctcagggcccatttcatctctggcagtgccttggcggtggtattcaaggcagttttgtagcacctgtaattggggagagggagtgtgcccctcggggcaggagggaagggcatctggggaagggcaggagggaagagctgtccatgcagccacgcccatggccaggttggcctcttctcagcctcccaggtgccttgagccctcttgcaagggcggctgcttccttgagcctagtttttttacgtgatttttgtaacattcatttttttgtacagataacaggagtttctgactaatcaaagctggtatttccccgcatgtcttattcttgcccttcccccaaccagtttgttaatcaaacaataaaaacatgttttgtttttttttttt

SEQ ID NO: 96780 - DNA, 1746 bp, Homo sapiens
  misc_feature (2)..(2): n is a, c, g, or t
  misc_feature (5)..(5): n is a, c, g, or t
  misc_feature (1703)..(1703): n is a, c, g, or t
gnccnggagagaacgccggtggcggggctggtagcccggcagccgcaggtggggccacgagcgctggctgagggaccgagccggagagccccggagcccccgtaacccgcgcggggagcgcccaggatgccgcgcggggactcggagcaggtgcgctactgcgcgcgcttctcctacctctggctcaagttttcacttatcatctattccaccgtgttctggctgattggggccctggtcctgtctgtgggcatctatgcagaggttgagcggcagaaatataaaacccttgaaagtgccttcctggctccagccatcatcctcatcctcctgggcgtcgtcatgttcatggtctccttcattggtgtgctggcgtccctccgtgacaacctgtaccttctccaagcattcatgtacatccttgggatctgcctcatcatggagctcattggtggcgtggtggccttgaccttccggaaccagaccattgacttcctgaacgacaacattcgaagaggaattgagaactactatgatgatctggacttcaaaaacatcatggactttgttcagaaaaagttcaagtgctgtggcggggaggactaccgagattggagcaagaatcagtaccacgactgcagtgcccctggacccctggcctgtggggtgccctacacctgctgcatcaggaacacgacagaagttgtcaacaccatgtgtggctacaaaactatcgacaaggagcgtttcagtgtgcaggatgtcatctacgtgcggggctgcaccaacgccgtgatcatctggttcatggacaactacaccatcatggcgggcatcctcctgggcatcctgcttccccagttcctgggggtgctgctgacgctgctgtacatcacccgggtggaggacatcatcatggagcactctgtcactgatgggctcctggggcccggtgccaagcccagcgtggaggcggcaggcacgggatgctgcttgtgctaccccaattagggcccagcctgccatggcagctccaacaaggaccgtctgggatagcacctctcagtcaacatcgtggggctggacagggctgcggcccctctgcccacactcagtactgaccaaagccagggctgtgtgtgcctgtgtgtaggtcccacggcctctgcctccccagggagcagagcctgggcctcccctaagaggctttccccgaggcagctctggaatctgtgcccacctggggcctggggaacaaggccctcctttctccaggcctgggctacaggggagggagagcctgaggctctgctcagggcccatttcatctctggcagtgccttggcggtggtattcaaggcagttttgtagcacctgtaattggggagagggagtgtgcccctcggggcaggagggaagggcatctggggaagggcaggagggaagagctgtccatgcagccacgcccatggccaggttggcctcttctcagcctcccaggtgccttgagccctcttgcaagggcggctgcttccttgagcctagtttttttacgtgatttttgtaacattcatttttttgtacagataacaggagtttctgactaatcaaagctggtatttccccgcatgtcttattcttgcccttcccccaaccagtttgttaatcaaacaataaaaacatgttttgtttttttttttttnttttttttttttttttttttttttttttttttttttttttttt

SEQ ID NO: 96781 - DNA, 1788 bp, Homo sapiens
  misc_feature (2)..(2): n is a, c, g, or t
  misc_feature (5)..(5): n is a, c, g, or t
gnccnggagagaacgccggtggcggggctggtagcccggcagccgcaggtggggccacgagcgctggctgagggaccgagccggagagccccggagcccccgtaacccgcgcggggagcgcccaggatgccgcgcggggactcggagcaggtgcgctactgcgcgcgcttctcctacctctggctcaagttttcacttatcatctattccaccgtgttctggctgattggggccctggtcctgtctgtgggcatctatgcagaggttgagcggcagaaatataaaacccttgaaagtgccttcctggctccagccatcatcctcatcctcctgggcgtcgtcatgttcatggtctccttcattggtgtgctggcgtccctccgtgacaacctgtaccttctccaagcattcatgtacatccttgggatctgcctcatcatggagctcattggtggcgtggtggccttgaccttccggaaccagaccattgacttcctgaacgacaacattcgaagaggaattgagaactactatgatgatctggacttcaaaaacatcatggactttgttcagaaaaagttcaagtgctgtggcggggaggactaccgagattggagcaagaatcagtaccacgactgcagtgcccctggacccctggcctgtggggtgccctacacctgctgcatcaggaacacgacagaagttgtcaacaccatgtgtggctacaaaactatcgacaaggagcgtttcagtgtgcaggatgtcatctacgtgcggggctgcaccaacgccgtgatcatctggttcatggacaactacaccatcatggcgggcatcctcctgggcatcctgcttccccagttcctgggggtgctgctgacgctgctgtacatcacccgggtggaggacatcatcatggagcactctgtcactgatgggctcctggggcccggtgccaagcccagcgtggaggcggcaggcacgggatgctgcttgtgctaccccaattagggcccagcctgccatggcagctccaacaaggaccgtctgggatagcacctctcagtcaacatcgtggggctggacagggctgcggcccctctgcccacactcagtactgaccaaagccagggctgtgtgtgcctgtgtgtaggtcccacggcctctgcctccccagggagcagagcctgggcctcccctaagaggctttccccgaggcagctctggaatctgtgcccacctggggcctggggaacaaggccctcctttctccaggcctgggctacaggggagggagagcctgaggctctgctcagggcccatttcatctctggcagtgccttggcggtggtattcaaggcagttttgtagcacctgtaattggggagagggagtgtgcccctcggggcaggagggaagggcatctggggaagggcaggagggaagagctgtccatgcagccacgcccatggccaggttggcctcttctcagcctcccaggtgccttgagccctcttgcaagggcggctgcttccttgagcctagtttttttacgtgatttttgtaacattcatttttttgtacagataacaggagtttctgactaatcaaagctggtatttccccgcatgtcttattcttgcccttcccccaaccagtttgttaatcaaacaataaaaacatgttttgttttttttttttattatttattaaaaaaaccacagcaaatttttaacccaaaactaaggtccaaattaatagcaccaccaaaagcccctatcaaatttc

SEQ ID NO: 96782 - DNA, 975 bp, Homo sapiens
cggacgcgtgggtcgacccacgcgttcgccacgcgtcgcatctacgtgcggggctgcaccaacgccgtgatcatctggttcatggacaactacaccatcatggcgggcatcctcctgggcatcctgcttccccagttcctgggggtgctgctgacgctgctgtacatcacccgggtggaggacatcatcatggagcactctgtcactgatgggctcctggggcccggtgccaagcccagcgtggaggcggcaggcacgggatgctgcttgtgctaccccaattagggcccagcctgccatggcagctccaacaaggaccgtctgggatagcacctctcagtcaacatcgtggggctggacagggctgcggcccctctgcccacactcagtactgaccaaagccagggctgtgtgtgcctgtgtgtaggtcccacggcctctgcctccccagggagcagagcctgggcctcccctaagaggctttccccgaggcagctctggaatctgtgcccacctggggcctggggaacaaggccctcctttctccaggcctgggctacaggggagggagagcctgaggctctgctcagggcccatttcatctctggcagtgccttggcggtggtattcaaggcagttttgtagcacctgtaattggggagagggagtgtgcccctcggggcaggagggaagggcatctggggaagggcaggagggaagagctgtccatgcagccacgcccatggccaggttggcctcttctcagcctcccaggtgccttgagccctcttgcaagggcggctgcttccttgagcctagtttttttacgtgatttttgtaacattcatttttttgtacagataacaggagtttctgactaatcaaagctggtatttccccgcatgtcttattcttgcccttcccccaaccagtttgttaatcaaacaataaaaacatgttttgtttttttttttt

SEQ ID NO: 96783 - DNA, 1004 bp, Homo sapiens
  misc_feature (2)..(2): n is a, c, g, or t
  misc_feature (5)..(5): n is a, c, g, or t
gnccnggagagaacgccggtggcggggctggtagcccggcagccgcaggtggggccacgagcgctggctgagggaccgagccggagagccccggagcccccgtaacccgcgcggggagcgcccaggatgccgcgcggggactcggagcaggtgcgctactgcgcgcgcttctcctacctctggctcaagttttcacttatcatctattccaccgtgttctggctgattggggccctggtcctgtctgtgggcatctatgcagaggttgagcggcagaaatataaaacccttgaaagtgccttcctggctccagccatcatcctcatcctcctgggcgtcgtcatgttcatggtctccttcattggtgtgctggcgtccctccgtgacaacctgtaccttctccaagcattcatgtacatccttgggatctgcctcatcatggagctcattggtggcgtggtggccttgaccttccggaaccagaccattgacttcctgaacgacaacattcgaagaggaattgagaactactatgatgatctggacttcaaaaacatcatggactttgttcagaaaaagttcaagtgctgtggcggggaggactaccgagattggagcaagaatcagtaccacgactgcagtgcccctggacccctggcctgtggggtgccctacacctgtaattggggagagggagtgtgcccctcggggcaggagggaagggcatctggggaagggcaggagggaagagctgtccatgcagccacgcccatggccaggttggcctcttctcagcctcccaggtgccttgagccctcttgcaagggcggctgcttccttgagcctagtttttttacgtgatttttgtaacattcatttttttgtacagataacaggagtttctgactaatcaaagctggtatttccccgcatgtcttattcttgcccttcccccaaccagtttgttaatcaaacaataaaaacatgttttgtttttttttttt

SEQ ID NO: 96784 - DNA, 957 bp, Homo sapiens
attaaccttcaagtattctacacatcaaggaaaacatttagtggcatacaaatgtcacctaataagtgggtgaaacctgggcatgctggctcatgcctataattctagaaatttaggaggccaagtcagaacgatcatttgaggccaaaagtttgagactagccatgaaaatatatcaagaccctgtcttgtatagggtaatatatgtgcatacatacatacatataacaaaaaagtgtaaaaatattttctaatcacatatttggtaggtgttaatttccaaaagatataaacttctaaaattcaacaacaacaaaatgttaataacttgatttagaatggtaaatgtttgaaatgacctttctccaaagaagacatagaaatgactaggtatttaaaaggatactcgtccgagggcaggactatgggaggctgccctgtacggaaaataagaagaaatggcagtaaagagggcaaccatcattccacccagcccaaaaggaataagagaaaccctatctttcaggattctcaagacacagttttcatggagtgataatgaaaggagcagcagccgccttaatatcccagagagagcaggtggaccagaaggcaacttaaaccagattgttactgaacccaatgcaaactttccccagttcttgcatgaggggtatgtaccatgccaaggtctttactcccatatcaaccagaccttgaaggaggctcacttcaacagcctgcagcagtgagggcaagctccaacatgatgaattaggacttccttattccaacctaaactgtgtttataaaagtaattgcatacacaccaaaaaaaaagtctattggtttttaagtctaaattttaagtaacaagttaatgggcagttgtttaattggggttttacttcactgctgtacttttaaaggggctgtgaataaatgtttatgaaatta

SEQ ID NO: 96785 - DNA, 732 bp, Homo sapiens
agccggacgcgcggaggtgggcaatccgctccttcccttgagcagtccacgccttgtggcggctttgcggagctgctgctttggcgggagttggaagctggtgtgaggtttctgtggggagaaggagagtgccagaggtgactggttcgtggttcttctaggctctcatggccaccatgttggaaggcagatgccaaactcagccaaggagcagccccagtggccgagaggctagcctgtggtcgtcaggctttgggatgaagctggaggctgtcactccattcctggggaagtatcgcccctttgtgggtcgctgttgccagacctgcacccccaagagctgggagtccctcttccacagaagcataacggacctaggcttctgcaatgtgatcctggtgaaggaggagaacacaaggtttcggggctggctggttcggaggctctgctatttcctgtggtccctggagcagcacatccccctctggcaggatgtcccacagaagatcatggaaagcaccggggtgcagaacctcctctcagggagggtcccaggaggcactggggaaggccaggtgcctgaccttgtgaagaaggaggtacagcgcatcctgggtcacatccaggccccaccccgtcccttcctgctgttcagctgggcgctgctgaggttcctgaactgcctgttcctgaatgtgcagctccacaagggtcagatgaagatggtccaga

SEQ ID NO: 96786 - DNA, 757 bp, Homo sapiens
agccggacgcgcggaggtgggcaatccgctccttcccttgagcagtccacgccttgtggcggctttgcggagctgctgctttggcgggagttggaagctggtgtgaggtgagaggcgcggtggtcgctccccggcgaggccaggtttctgtggggagaaggagagtgccagaggtgactggttcgtggttcttctaggctctcatggccaccatgttggaaggcagatgccaaactcagccaaggagcagccccagtggccgagaggctagcctgtggtcgtcaggctttgggatgaagctggaggctgtcactccattcctggggaagtatcgcccctttgtgggtcgctgttgccagacctgcacccccaagagctgggagtccctcttccacagaagcataacggacctaggcttctgcaatgtgatcctggtgaaggaggagaacacaaggtttcggggctggctggttcggaggctctgctatttcctgtggtccctggagcagcacatccccctctggcaggatgtcccacagaagatcatggaaagcaccggggtgcagaacctcctctcagggagggtcccaggaggcactggggaaggccaggtgcctgaccttgtgaagaaggaggtacagcgcatcctgggtcacatccaggccccaccccgtcccttcctctttatgctgctctcccagggcctgggtgtgcttcgtgtggcctgggactcccgcgcctgctcccctgccctcag

SEQ ID NO: 96787 - DNA, 608 bp, Homo sapiens
tattgttctgtctagtacagtcgtgactagctacagttggcgattgagcagttgaaatgtaccttgtggtctgtggcacagttgccatttcccgggtaagatgtctgcagtctgtgtactgaggacctggagcaggaatgctgggcagctgatttgtttcactgttttccaacatgtagtaatgttcatgttttgaagccaaattatgtgtgtttctttgattatccttcattcaagtatagtcatccacataactttctgaaaacaattaatgctgtatgtggacagcttgttcagttcagattctcagacactgaagaagggattagaaaagtaactgttaatgttatgtaaaagaaggagatacagtgtctcagtttgataacatcggtaaagttcaaagtgataaagcttctgttaccatcgctagtccttatgatggagtcattgaaaactctagcatagtctagatgatattgcctatgtggggaagccattagtaaacatagaaacagaagctttaaagggtactgttaatttgttttaccaaattgattattgtccaccttttgtcattgggtctcaattaaaagtgaccttaaaaaaaa

SEQ ID NO: 96788 - DNA, 295 bp, Homo sapiens
tttcagacacaagacttcactcccccagcagaagacagagatggtgtcatagatggtatgtcttgcctaacatgtcaggattccagcagattgatgatcaaggacagtgatgaagaccagaacaaaagggaaaagaaaagactctaaacagccaaaacatgcatctaacacccgggcaattaagaattgttattttctggctactctacacacactgcctagaaggtagccttgctctataggagtcatggagctgtaaaactgcatccttaataaagctacttctacaaaaacg

SEQ ID NO: 96789 - DNA, 285 bp, Homo sapiens
ggtattcatttaattcatcaactttttattgagtttaggaccaaatgccagcaattcagccaagttctaaagacacacatttaaattaaacagttatcttcaaggagcttggtgtctgcagttcagtagacacttataacaccaacagtaccattcatttgctgtgccctctgccgggttgctcttctcccagtgtttcatatggctggctacttcttatcctttaagatctctttttaagattctttctttctttttttttttttttttttttgagacggagtc

SEQ ID NO: 96790 - DNA, 188 bp, Homo sapiens
gctccaagtcttagccttgtgggtattatggccatgcagcctggtgaagtcaacagtgacagcgacaggtcgggggcggtggctcacgcctgtaatcccagcactttgggaggccgaggtgggcggatcacctgaggtcaggagttcaagaccagcctggccaacgcggcgaaaccccatctctacta

SEQ ID NO: 96791 - DNA, 167 bp, Homo sapiens
aagtcataaaaattcctttgaggaggaggcctttccggtaccagggcaagaaaataacccttatctccagggactgggaactgccactgagctggacctgtacagataaacttacttaataaatccttatcttccactaggtttacatccccccataaatctcctag

SEQ ID NO: 96792 - DNA, 195 bp, Homo sapiens
aaaggccaggtgcagtggctcacctgtaatcccagcacctgggaagactgatgggaagactgctgaggccattagttcagtaccagcctgggcaacataacgagaccaaatctccacaaaaaatttgaaagaacaaattaggtgagatggcacatgcctgtactcccagctactagggaggctgatagggaggct

SEQ ID NO: 96793 - DNA, 447 bp, Homo sapiens
catttctctgatggccagtgatggtgagcattttttcatgtgttttttggctgcataaatgtcttcttttgagaagtgtctcttcatatccttcacccactttttgatggggttgtttgttttttcttgtaaatttgtttgagttcattgtagattctggatattagccctttgtcagatgagtaggttgcgaaaattttctcccattttgtaggtttatgcatcacttttcaactccagtccatttattttctaatattctactctgatctcttcccctacctcctctttacgctcaataattcatggatttgcccttttgaggctattttctagatcttgcaggcatgcctaatgtctttttattctttttgttgttgttgtttctcctctgactatgtattttcatatagcctgtcttcaagctcactgattcttctgcttgat

SEQ ID NO: 96794 - DNA, 755 bp, Homo sapiens
tgcccatggtcagctagcatgtaaatggtggaaagaagacttgagcccatatctgtctggccccagagtcctcctgcagcctatctgagtctgtgcagccccagcacctgtagtaggccctcggcaagactgtaatgaatgaatgagtgaacggatgaagtcaaagagccagaagctttcaagaacaacttcatggactgttttggaatatttgtacccctagatctctcagagggcaatagtctccaccgtgcttctcccaacatcaggaggaagacagtggagtggaacatagtagataggaaaatatgttatcaattcctccccgccctgcacacggctgcttactaatgtgactttgccactgttctgggcaagaggtggagtctgtttccctaccccttgaacctgggttcgcctgggactactttggccaatagaatgtggcagaagtgatgttatgcaaattctgacattaggccttaagagaccttgcagctttcacgtttactgtcctggaacacagtcctgagactgctatgtaaggaagccagcctactggaggatgaaagaaccaatgtgtccccgccgacagccaagaccaactgccagacatgtaaatgagccatcttggaccttccagtcagctgctcctccggtttaggctcagatgcgtgagtaagcccagacaaaatcagcagaggaatggcccagccaactggatttctctatcagtcatctagagctatgtaaaa

SEQ ID NO: 96795 - DNA, 501 bp, Homo sapiens
caactggacactggtcccccaggtctccgtgtggctactgcctcattcttcatgttagagctcagatgtcaccctcctcacggagacgtcccccgaccacctgagctaaagccgcccccaacatcttacgtcaccctgttggtgtacttcacctggttcatttaattctcagtaacttaatctcatggcaagtgctttttaaaccttcactagctctgcctctcccactggaatattagctctgtgaatgcaggaacccagctagtctgagttaactgttataaccagcgccagtgcctgacacgtagcagggcctcagtaagttttgctgaatcaatgaattcttgctttcaagagagctcttttcaaaacacgctggtgcttgtctgaagcagttaaggttataacaacacttgttcaaagagacctttcagaccacacttccttaagagtgtagaagtttaaatcaccttattcaccaccgacttctaagggccaatc

SEQ ID NO: 96796 - DNA, 239 bp, Homo sapiens
agtagggaagaaatgattgtagcagtgtgggacctgttaggtctatgagcaggactttaacccaaagggccatatgttactgatagtgacaggagacagctaaatgcctaggcagataagggagggtccctggtgaaataccacctccaagctgaagacagtttaaagcctgaaagccaagctacaacttaaatccttggactaaattgagaatttgccttcctatttggtccactttc

SEQ ID NO: 96797 - DNA, 2246 bp, Homo sapiens
gaacccccccagttgtccgccatgattaggggccaagatgcagagatgttaaggtacataaccaatttagaggtgaaggaactcagacaccctagaaccggttgcaagttcaagttcttctttagaagaaacccctacttcagaaacaagctgattgtcaaggaatatgaggtaagatcctccggccgagtggtgtctctttctactccaattatatggcgcagggggcatgaaccccagtccttcattcgcagaaaccaagacctcatctgcagcttcttcacttggttttcagaccacagccttccagagtccgacaaaattgctgagattattaaagaggatctgtggccaaatccactgcaatactacctgttgcgtgaaggagtccgtagagcccgacgtcgcccgctaagggagcctgtagagatccccaggccctttgggttccagtctggttaacatttgcccttgggaatactcctgcacaaggtctcctaccaccttctgctggacctgtgcttgggcatcagcaatgagtatgccttctattgtgctttgtttttgctgacttttctgcaccctgtttcctttggatattcagttctctcaacctcaagattgagacggtggtgggtatgcttctccacttccatatgaccttcatgctgttctggaatatcacatgctacgaggtcatccttcacactacttgtaagccaagcaaatgatactgtagattgtactgcctttatctgcactgcttggaccctgtttattcccagggcctctgaactggttgctgtcacttggatttctagctttgggagcctgttccacctactcagctctgcattgagcagtatgggcacatgccctgtggacagttactggacgttaatgaactcagaggagaaaagcagtgagccacttgttctgtgtgatttatggtacttcattgctcttccttcacctctagtcactttctattgctacctgccctacattggctcctgccaaggtccctctctctccctgttttccttttttttttttttttttctgagacggaggacggagtcttgctctgtcgcccaggttggagtgcagtggcgcgatctcggctcactgcaacctccacctcccgggttcaagcgattctcctgcctcagcctcccgagtagctgggactacaggcgcgcgccgccacgcccggctaatttttatatttttagtagagacggggtttcaccatgctggccaggctggtctcgaaccccgacctcgtgatccgccctccttagcctcccaatcctctcttaaaaaagtgatagctcagaaacatttgtaaaagcaaggtttttatttcattttggctctgtcattttcagaggcaaagaagttggcctgtaaaatagagtgctagagctcttacgcccctccccttcttcccaacttcctacttcctagcccttttatcaactcctagaatagttaaagagagacacatctagatgggatgaaaggtgccctaagcaggagaaactgaacaaaaggctagaggcatgggccaggtaaaaattgggcctagagtgaagactgtgctgtcgttaagagctttcgaggaaggagtacttactccccaatgatgatgaatggaaaaatacttttcagggagaattgaaggggttaaagtgttaaatatgttgcctagacaagggttctttaaagaaagacagcgcaactttgaatgctttcttacttgttttgtgacctaatttatgtggaagattgttatttcattaggatttagtaaaatttttttttctgattctaaacttattgtgaaaattgagctgtacagatattcttttgatttcaattgggaacatttggaagaacaacagtcttacttgcctgtacaatatagagacatatgaatagtcataacagttttcaacttgttcttgtttctgttaaactatattcctagaaacatagtttgaacaacttggtctttgttaggcttgtcaaattgccttcatggaaaaataatctacaaaagtatggtttaattgattgtcttacatgataattttccctggtaacaacttagtaagtgatatatcttttttcctaaattgcttaaatactgtgaaattgctctgacaaattggaagtgtaccattggcatatttgtcttcctttttatgcatgatggtaaaataaaagcatgttgttctgct

SEQ ID NO: 96798 - DNA, 1137 bp, Homo sapiens
gagggttcaccatcttggccgtgctggtcttgaactcctgaccttgcgattctcctgcctcagcctcccgagtagctgggactacaggcgcgcgccgccacgcccggctaatttttatatttttagtagagacggggtttcaccatgctggccaggctggtctcgaaccccgacctcgtgatccgccctccttagcctcccaatcctctcttaaaaaagtgatagctcagaaacatttgtaaaagcaaggtttttatttcattttggctctgtcattttcagaggcaaagaagttggcctgtaaaatagagtgctagagctcttacgcccctccccttcttcccaacttcctacttcctagcccttttatcaactcctagaatagttaaagagagacacatctagatgggatgaaaggtgccctaagcaggagaaactgaacaaaaggctagaggcatgggccaggtaaaaattgggcctagagtgaagactgtgctgtcgttaagagctttcgaggaaggagtacttactccccaatgatgatgaatggaaaaatacttttcagggagaattgaaggggttaaagtgttaaatatgttgcctagacaagggttctttaaagaaagacagcgcaactttgaatgctttcttacttgttttgtgacctaatttatgtggaagattgttatttcattaggatttagtaaaatttttttttctgattctaaacttattgtgaaaattgagctgtacagatattcttttgatttcaattgggaacatttggaagaacaacagtcttacttgcctgtacaatatagagacatatgaatagtcataacagttttcaacttgttcttgtttctgttaaactatattcctagaaacatagtttgaacaacttggtctttgttaggcttgtcaaattgccttcatggaaaaataatctacaaaagtatggtttaattgattgtcttacatgataattttccctggtaacaacttagtaagtgatatatcttttttcctaaattgcttaaatactgtgaaattgctctgacaaattggaagtgtaccattggcatatttgtcttcctttttatgcatgatggtaaaataaaagcatgttgttctgct

SEQ ID NO: 96799 - DNA, 471 bp, Homo sapiens
  misc_feature (14)..(14): n is a, c, g, or t
  misc_feature (45)..(45): n is a, c, g, or t
aaaaccctaactgnaccctcagggtggatctgccccccccttggnctcccccaaagtgcctggggattacaggccgtgagcccactgtaccgagctcaacattccttaaaggaaagaaattcccaaccccagaatttcatatctggcaaaactaatctttataagagaagaagaaacaggatcattctcagacaagcaaatgctgagggaattgttaccatcagacctgtcttataagagttcctgaaggaagcactaaatatagaaaggaaacaccaccaaagaaaataaatatatcctacttgaaatttactctatggacttacccactgctagaataaatgtatcaaatcttatttgtaaattctcaattttgatatatatatgtatatatgcatatacatatccacacttgtctgcaagaatattgattaaaattgctaaatttgtacttgttcaccagaaaaatgt

SEQ ID NO: 96800 - DNA, 5071 bp, Homo sapiens
  misc_feature (1115)..(1115): n is a, c, g, or t
  misc_feature (1967)..(1967): n is a, c, g, or t
  misc_feature (2031)..(2031): n is a, c, g, or t
  misc_feature (2513)..(2513): n is a, c, g, or t
  misc_feature (2570)..(2570): n is a, c, g, or t
ttccagacactgtgtatgaatttgcagtccgtatttcacagggtgaaagagatggcaaatggagtacgtcagtcttccaaagaacaccagaatctgcccctaccacagctcctgaaaacttgaacgtctggccagtcaatggcaaacctacagttgtcgctgcatcttgggatgcgctaccagagactgaggggaaagtgaaagaatacattctttcatacgccccggctctcaaaccatttggagcaaagtccctcacctatcctggagacactacttctgccctggtggatggtctgcagcctggggaacgctatcttttcaaaatccgggccacaaacaggagaggcctgggacctcactccaaagccttcattgtcgctatgccaacaaccagtaaggcggatgttcagcagaacacggaggacaatgggaaacccgaaaaacctgagccttcctcaccttctcccagagctccagcttcctcccaacacccctctgtgcctgcttctccccaagggagaaatgccaaggaccttcttcttgacttgaagaacaaaatattggctaatggtggggcgccccgaaaaccccagcttcgcgccaagaaggcagaggagctggatcttcagtcgacagaaatcactggggaggaggagctgggttcccgggaggactcgcccatgtcaccctcagacacccaagaccagaaacggaccctgaggccgccaagtagacacggccactcggtggttgctcccggcaggactgcagtgagggcccggatgccagcgctgccccgaagggaaggcgtagataagcctggcttttccctggccacgcagccccgcccaggggcgcccccctcggcttcggcctctcctgcccaccacgcgtccacccagggcacctctcatcgtccttccctgcctgccagcttgaatgacaacgacttggtggactcagacgaagatgagcgcgctgtgggctccctccaccccaagggcgccttcgcccagccccggccagccctgtcccccagccgccagtccccgtccagcgttctccgcgacagaagctctgtgcaccccggcgcaaagccagcctcgccggcncggaggaccccccattcaggggccgcagaggaagattccagtgcctcagccccaccctcaagactttctccaccccatgggggatcatctcggctgctgcccacccagccacacctgagctctccactttccaagggcgggaaggatggtgaggacgccccagccaccaactccaatgcgccatcacggtccaccatgtcctcctccgtctcttctcatctctcgtccaggacgcaggtctctgagggagcggaggcttctgatggtgaaagccacggtgacggcgatagggaagacggcggaaggcaggcggaggccacggcccagacgctgcgggcccggcctgcctctggacacttccatttgctcagacacaaaccctttgctgccaacgggaggtctccaagcaggttcagcattgggcggggacctcggctgcagccctccagctccccacagtcgactgtgccctcccgagcccaccccagggttccctctcactctgattcccaccctaagcttagctcaggtatccatggagacgaggaggatgagaagccgcttcctgccaccgttgtcaatgaccacgtgccttcctcctccaggcagcccatctcccggggctgggaggacttaaggagaagcccgcagagaggggccagcctgcatcggaaggaacccatcccagagaaccccaaatccacaggggcagatacacatcctcagggcaagtactcctccctggcctccaaggctcaggatgttcaacagagcacagacgcggacacggagggtcattctcccaaagcacagccagggtccacagaccgccacgcgtcccctgctcgtccncccgcagcacggtcacagcagcatcccagtgttcccagaaggatgacacccggccgggccccanaacagcagccccctcctcccgtcgccacgtcccagcaccacccgggaccccagagcagagacgcgggtcggtcaccttcccagcccaggctctcactgacccaggccgggcggccccgccccacgtcgcagggccgctcccactcctcctcggacccttacacggcgagctccagagggatgctccccacggccctccagaaccaggacgaggatgcccagggcagctacgacgacgacagcacagaagtcgaggcccaggatgtgcgggcccccgcgcacgccgcgcgcgccaaggaggcagctgcgtcccttcccaagcaccagcaggggcggcaaagacgccgatgggagcctcgccaaggaagagagggagcctgccatcgcgcttgcccctcgcggagggagcctggctcctgtgaagcgacctctccccccacctccaggcagctcccccagggcctcccacgtcccttcccgacngccgcctcgcagcgctgccaccgtgagccccgtcgcgggcacccacccctggccgcngtacaccacgcgcgccccacctggccacttctccaccaccccgatgctgtccttgcgccagaggatgatgcatgccagattccgtaaccctctctcccgacagcctgccagaccctcttacagacaaggttataatggcagaccaaatgtagaagggaaagtccttcctggtagtaatggaaaaccgaatggacagagaattatcaatggccctcaaggaacaaagtgggttgtggaccttgatcgtgggttagtattgaatgcagaaggaaggtacctccaagattcacatggaaatcctcttcggattaaactaggaggagatggtcgaaccattgtagatctggaagggacccccgtggtgagtcctgacggcctcccactctttgggcaggggcgacatggcacacctctggccaatgcccaagataagccaattttgagtcttggaggaaagccgctggtgggcttggaggtcatcaaaaaaaccacccatccccctaccactaccatgcagcccaccactactacgacgcccctgcctaccactacaaccccgaggcccaccactgccaccacccgccgcacgaccaccaggcgtccaacaaccacagtccgaaccactacgcggacaaccaccaccaccacccccaaacccaccactcccatccccacctgtccccctgggaccttggaacggcacgacgatgatggcaacctgataatgagctccaatgggatcccagagtgctacgctgaagaagatgagttctcaggcttggagactgacactgcagtacctacggaagaggcctacgttatatatgatgaagattatgaatttgagacgtcaaggccaccaaccaccactgagccttcgaccactgctaccacaccgagggtgatcccagaggaaggcgccatcagttcctttcctgaagaagaatttgatctggctggaaggaaacgatttgttgctccttacgtgacgtacctaaataaagacccatcagccccgtgctctctgactgatgcactggatcacttccaagtggacagcctggatgaaatcatccccaatgacctgaagaagagtgatctgcctccccagcatgctccccgcaacatcaccgtggtggccgtggaaggttgccactcatttgtcattgtggactgggacaaagccaccccaggagatgtggtcacaggttacttggtttacagtgcatcctatgaagacttcatcaggaacaagtggtccactcaagcttcatcagtaactcacttgcccattgagaacctaaagcccaacacgaggtattattttaaagtgcaagcacaaaatcctcatggctacggacctatcagcccttcggtctcatttgtcaccgaatcagataatcctctgcttgttgtgaggcccccaggcggtgagcctatctggatcccattcgctttcaaacatgatcccagctacacggactgccatggacggcaatatgtgaagcgcacgtggtatcgaaagttcgtgggagttgttctttgtaattcactgaggtataaaatctacctcagtgacaacctgaaagatacattctacagcattggagacagctggggaagaggtgaagaccattgccaatttgtggattcacaccttgatggaagaacagggcctcagtcctatgtagaagccctccctactattcaaggctactatcgccagtatcgtcaggagcctgtcaggtttgggaacatcggcttcggaaccccctactactatgtgggctggtacgagtgtggggtctccatccctggaaagtggtaatcacaggaccgtcatgctgcaagcttgccctgcccagccccaccaactaagtcgcactaggggctgtgagcaaagacagccagcatgctcagccccgctgccctaggtgccaggaaggtcacagatggacactggccattctggtcatctcagtctggaactcagtcccacttcttggcctggacaatgaacaggattcagttttgctgttaactttgcttctctacttttttttgtttgtttgtaatagcacatcccagagacatcagaaaccagcaactgattcagtgtgatttccagactttttaggcatgaaattcggacacttcagtatttccaggaatagcatatgcacgctgttcttgcttcatggaatgctacatgctttctgtttttctcattttggatttctccaaaactaactgaatttaagcttcaggtccctttgtatgcagtagaaaggaattattaaaaacaccaccaaagaaaataaatatatcctacttgaaatttactctatggacttacccactgctagaataaatgtatcaaatcttatttgtaaattctcaattttgatatatatatgtatatatgcatatacatatccacacttgtctgcaagaatattgattaaaattgctaaatttgtacttgttcaccagaaaaatgt

SEQ ID NO: 96801 - DNA, 4695 bp, Homo sapiens
  misc_feature (1115)..(1115): n is a, c, g, or t
  misc_feature (1967)..(1967): n is a, c, g, or t
  misc_feature (2031)..(2031): n is a, c, g, or t
  misc_feature (2513)..(2513): n is a, c, g, or t
  misc_feature (2570)..(2570): n is a, c, g, or t
ttccagacactgtgtatgaatttgcagtccgtatttcacagggtgaaagagatggcaaatggagtacgtcagtcttccaaagaacaccagaatctgcccctaccacagctcctgaaaacttgaacgtctggccagtcaatggcaaacctacagttgtcgctgcatcttgggatgcgctaccagagactgaggggaaagtgaaagaatacattctttcatacgccccggctctcaaaccatttggagcaaagtccctcacctatcctggagacactacttctgccctggtggatggtctgcagcctggggaacgctatcttttcaaaatccgggccacaaacaggagaggcctgggacctcactccaaagccttcattgtcgctatgccaacaaccagtaaggcggatgttcagcagaacacggaggacaatgggaaacccgaaaaacctgagccttcctcaccttctcccagagctccagcttcctcccaacacccctctgtgcctgcttctccccaagggagaaatgccaaggaccttcttcttgacttgaagaacaaaatattggctaatggtggggcgccccgaaaaccccagcttcgcgccaagaaggcagaggagctggatcttcagtcgacagaaatcactggggaggaggagctgggttcccgggaggactcgcccatgtcaccctcagacacccaagaccagaaacggaccctgaggccgccaagtagacacggccactcggtggttgctcccggcaggactgcagtgagggcccggatgccagcgctgccccgaagggaaggcgtagataagcctggcttttccctggccacgcagccccgcccaggggcgcccccctcggcttcggcctctcctgcccaccacgcgtccacccagggcacctctcatcgtccttccctgcctgccagcttgaatgacaacgacttggtggactcagacgaagatgagcgcgctgtgggctccctccaccccaagggcgccttcgcccagccccggccagccctgtcccccagccgccagtccccgtccagcgttctccgcgacagaagctctgtgcaccccggcgcaaagccagcctcgccggcncggaggaccccccattcaggggccgcagaggaagattccagtgcctcagccccaccctcaagactttctccaccccatgggggatcatctcggctgctgcccacccagccacacctgagctctccactttccaagggcgggaaggatggtgaggacgccccagccaccaactccaatgcgccatcacggtccaccatgtcctcctccgtctcttctcatctctcgtccaggacgcaggtctctgagggagcggaggcttctgatggtgaaagccacggtgacggcgatagggaagacggcggaaggcaggcggaggccacggcccagacgctgcgggcccggcctgcctctggacacttccatttgctcagacacaaaccctttgctgccaacgggaggtctccaagcaggttcagcattgggcggggacctcggctgcagccctccagctccccacagtcgactgtgccctcccgagcccaccccagggttccctctcactctgattcccaccctaagcttagctcaggtatccatggagacgaggaggatgagaagccgcttcctgccaccgttgtcaatgaccacgtgccttcctcctccaggcagcccatctcccggggctgggaggacttaaggagaagcccgcagagaggggccagcctgcatcggaaggaacccatcccagagaaccccaaatccacaggggcagatacacatcctcagggcaagtactcctccctggcctccaaggctcaggatgttcaacagagcacagacgcggacacggagggtcattctcccaaagcacagccagggtccacagaccgccacgcgtcccctgctcgtccncccgcagcacggtcacagcagcatcccagtgttcccagaaggatgacacccggccgggccccanaacagcagccccctcctcccgtcgccacgtcccagcaccacccgggaccccagagcagagacgcgggtcggtcaccttcccagcccaggctctcactgacccaggccgggcggccccgccccacgtcgcagggccgctcccactcctcctcggacccttacacggcgagctccagagggatgctccccacggccctccagaaccaggacgaggatgcccagggcagctacgacgacgacagcacagaagtcgaggcccaggatgtgcgggcccccgcgcacgccgcgcgcgccaaggaggcagctgcgtcccttcccaagcaccagcaggggcggcaaagacgccgatgggagcctcgccaaggaagagagggagcctgccatcgcgcttgcccctcgcggagggagcctggctcctgtgaagcgacctctccccccacctccaggcagctcccccagggcctcccacgtcccttcccgacngccgcctcgcagcgctgccaccgtgagccccgtcgcgggcacccacccctggccgcngtacaccacgcgcgccccacctggccacttctccaccaccccgatgctgtccttgcgccagaggatgatgcatgccagattccgtaaccctctctcccgacagcctgccagaccctcttacagacaaggttataatggcagaccaaatgtagaagggaaagtccttcctggtagtaatggaaaaccgaatggacagagaattatcaatggccctcaaggaacaaagtgggttgtggaccttgatcgtgggttagtattgaatgcagaaggaaggtacctccaagattcacatggaaatcctcttcggattaaactaggaggagatggtcgaaccattgtagatctggaagggacccccgtggtgagtcctgacggcctcccactctttgggcaggggcgacatggcacacctctggccaatgcccaagataagccaattttgagtcttggaggaaagccgctggtgggcttggaggtcatcaaaaaaaccacccatccccctaccactaccatgcagcccaccactactacgacgcccctgcctaccactacaaccccgaggcccaccactgccaccacccgccgcacgaccaccaggcgtccaacaaccacagtccgaaccactacgcggacaaccaccaccaccacccccaaacccaccactcccatccccacctgtccccctgggaccttggaacggcacgacgatgatggcaacctgataatgagctccaatgggatcccagagtgctacgctgaagaagatgagttctcaggcttggagactgacactgcagtacctacggaagaggcctacgttatatatgatgaagattatgaatttgagacgtcaaggccaccaaccaccactgagccttcgaccactgctaccacaccgagggtgatcccagaggaaggcgccatcagttcctttcctgaagaagaatttgatctggctggaaggaaacgatttgttgctccttacgtgacgtacctaaataaagacccatcagccccgtgctctctgactgatgcactggatcacttccaagtggacagcctggatgaaatcatccccaatgacctgaagaagagtgatctgcctccccagcatgctccccgcaacatcaccgtggtggccgtggaaggttgccactcatttgtcattgtggactgggacaaagccaccccaggagatgtggtcacaggttacttggtttacagtgcatcctatgaagacttcatcaggaacaagtggtccactcaagcttcatcagtaactcacttgcccattgagaacctaaagcccaacacgaggtattattttaaagtgcaagcacaaaatcctcatggctacggacctatcagcccttcggtctcatttgtcaccgaatcagataatcctctgcttgttgtgaggcccccaggcggtgagcctatctggatcccattcgctttcaaacatgatcccagctacacggactgccatggacggcaatatgtgaagcgcacgtggtatcgaaagttcgtgggagttgttctttgtaattcactgaggtataaaatctacctcagtgacaacctgaaagatacattctacagcattggagacagctggggaagaggtgaagaccattgccaatttgtggattcacaccttgatgggacgaagatgtccctcagtacctccaagcaagtagctttccacatttgtcacagaaatcagaggagagatggtgttgggagccctttggagaacgccagtctcccaggccccctgcatctatcgagtttgcaatgtcacaacctctctgatcttgtgctcagcatgattctttaatagaagttttattttttcgtgcactctgctaataatgtgggtgagccagtggaacagcgggagacctgcgctagttttacagattgcctccttatgacgcggctcaaaaggaaaccaagtggtcaggagttgtttctgacccactgatctctactaccacaaggaaaatagtttaggagaaaccagcttttactgtttctgaaaaattacagcttcatcctgtcaagtagacaaggaatgcctgtgccaataaagtttctccaacttgaagtctactcatgatgg

SEQ ID NO: 96802 - DNA, 473 bp, Homo sapiens
attatcttcttccatggggagagagagatcatgccatcctagctgtgtcacacatgtgtggggactggacgatctctacagatctgtttgggataaagaaatactttacacttagtcactgggttcctatggaggaggcctgagctggtccccagctccagcatggcccctgagttacagctgggctttcccaaaaggcataagagacaggtggggaagaccccaccccaggctggggttggggctgggcccgaggtcctggcccttccccagggctatggcaaccacacacaaaaatggttcagtttatttgaaagtagcgttttgtcacaagaacaacttatcagaggccttctgtctgaaggaggctgtaaggatgagttctacctgttggttcaggggcctctgacgcttttcccctctcctgttgcccttccaggctactatcgccagtatcgtcaggagcctgtcag

SEQ ID NO: 96803 - DNA, 381 bp, Homo sapiens
gcaactgattcagtgtgatttccagactttttaggcatgaaattcggacacttcagtatttccaggaatagcatatgcacgctgttcttgcttcatggaatgctacatgctttctgtttttctcattttggatttctccaaaactaactgaatttaagcttcaggtccctttgtatgcagtagaaaggaattattaaaaacaccaccaaagaaaataaatatatcctacttgaaatttactctatggacttacccactgctagaataaatgtatcaaatcttatttgtaaattctcaattttgatatatatatgtatatatgcatatacatatccacacttgtctgcaagaatattgattaaaattgctaaatttgtactt

SEQ ID NO: 96804 - DNA, 5177 bp, Homo sapiens
  misc_feature (1115)..(1115): n is a, c, g, or t
  misc_feature (1967)..(1967): n is a, c, g, or t
  misc_feature (2031)..(2031): n is a, c, g, or t
  misc_feature (2513)..(2513): n is a, c, g, or t
  misc_feature (2570)..(2570): n is a, c, g, or t
ttccagacactgtgtatgaatttgcagtccgtatttcacagggtgaaagagatggcaaatggagtacgtcagtcttccaaagaacaccagaatctgcccctaccacagctcctgaaaacttgaacgtctggccagtcaatggcaaacctacagttgtcgctgcatcttgggatgcgctaccagagactgaggggaaagtgaaagaatacattctttcatacgccccggctctcaaaccatttggagcaaagtccctcacctatcctggagacactacttctgccctggtggatggtctgcagcctggggaacgctatcttttcaaaatccgggccacaaacaggagaggcctgggacctcactccaaagccttcattgtcgctatgccaacaaccagtaaggcggatgttcagcagaacacggaggacaatgggaaacccgaaaaacctgagccttcctcaccttctcccagagctccagcttcctcccaacacccctctgtgcctgcttctccccaagggagaaatgccaaggaccttcttcttgacttgaagaacaaaatattggctaatggtggggcgccccgaaaaccccagcttcgcgccaagaaggcagaggagctggatcttcagtcgacagaaatcactggggaggaggagctgggttcccgggaggactcgcccatgtcaccctcagacacccaagaccagaaacggaccctgaggccgccaagtagacacggccactcggtggttgctcccggcaggactgcagtgagggcccggatgccagcgctgccccgaagggaaggcgtagataagcctggcttttccctggccacgcagccccgcccaggggcgcccccctcggcttcggcctctcctgcccaccacgcgtccacccagggcacctctcatcgtccttccctgcctgccagcttgaatgacaacgacttggtggactcagacgaagatgagcgcgctgtgggctccctccaccccaagggcgccttcgcccagccccggccagccctgtcccccagccgccagtccccgtccagcgttctccgcgacagaagctctgtgcaccccggcgcaaagccagcctcgccggcncggaggaccccccattcaggggccgcagaggaagattccagtgcctcagccccaccctcaagactttctccaccccatgggggatcatctcggctgctgcccacccagccacacctgagctctccactttccaagggcgggaaggatggtgaggacgccccagccaccaactccaatgcgccatcacggtccaccatgtcctcctccgtctcttctcatctctcgtccaggacgcaggtctctgagggagcggaggcttctgatggtgaaagccacggtgacggcgatagggaagacggcggaaggcaggcggaggccacggcccagacgctgcgggcccggcctgcctctggacacttccatttgctcagacacaaaccctttgctgccaacgggaggtctccaagcaggttcagcattgggcggggacctcggctgcagccctccagctccccacagtcgactgtgccctcccgagcccaccccagggttccctctcactctgattcccaccctaagcttagctcaggtatccatggagacgaggaggatgagaagccgcttcctgccaccgttgtcaatgaccacgtgccttcctcctccaggcagcccatctcccggggctgggaggacttaaggagaagcccgcagagaggggccagcctgcatcggaaggaacccatcccagagaaccccaaatccacaggggcagatacacatcctcagggcaagtactcctccctggcctccaaggctcaggatgttcaacagagcacagacgcggacacggagggtcattctcccaaagcacagccagggtccacagaccgccacgcgtcccctgctcgtccncccgcagcacggtcacagcagcatcccagtgttcccagaaggatgacacccggccgggccccanaacagcagccccctcctcccgtcgccacgtcccagcaccacccgggaccccagagcagagacgcgggtcggtcaccttcccagcccaggctctcactgacccaggccgggcggccccgccccacgtcgcagggccgctcccactcctcctcggacccttacacggcgagctccagagggatgctccccacggccctccagaaccaggacgaggatgcccagggcagctacgacgacgacagcacagaagtcgaggcccaggatgtgcgggcccccgcgcacgccgcgcgcgccaaggaggcagctgcgtcccttcccaagcaccagcaggggcggcaaagacgccgatgggagcctcgccaaggaagagagggagcctgccatcgcgcttgcccctcgcggagggagcctggctcctgtgaagcgacctctccccccacctccaggcagctcccccagggcctcccacgtcccttcccgacngccgcctcgcagcgctgccaccgtgagccccgtcgcgggcacccacccctggccgcngtacaccacgcgcgccccacctggccacttctccaccaccccgatgctgtccttgcgccagaggatgatgcatgccagattccgtaaccctctctcccgacagcctgccagaccctcttacagacaaggttataatggcagaccaaatgtagaagggaaagtccttcctggtagtaatggaaaaccgaatggacagagaattatcaatggccctcaaggaacaaagtgggttgtggaccttgatcgtgggttagtattgaatgcagaaggaaggtacctccaagattcacatggaaatcctcttcggattaaactaggaggagatggtcgaaccattgtagatctggaagggacccccgtggtgagtcctgacggcctcccactctttgggcaggggcgacatggcacacctctggccaatgcccaagataagccaattttgagtcttggaggaaagccgctggtgggcttggaggtcatcaaaaaaaccacccatccccctaccactaccatgcagcccaccactactacgacgcccctgcctaccactacaaccccgaggcccaccactgccaccacccgccgcacgaccaccaggcgtccaacaaccacagtccgaaccactacgcggacaaccaccaccaccacccccaaacccaccactcccatccccacctgtccccctgggaccttggaacggcacgacgatgatggcaacctgataatgagctccaatgggatcccagagtgctacgctgaagaagatgagttctcaggcttggagactgacactgcagtacctacggaagaggcctacgttatatatgatgaagattatgaatttgagacgtcaaggccaccaaccaccactgagccttcgaccactgctaccacaccgagggtgatcccagaggaaggcgccatcagttcctttcctgaagaagaatttgatctggctggaaggaaacgatttgttgattgaaagacacaaacacatggatccatcaaggagagctgggggtgtgtttctgagcttggcatcaaggctgatggagcctccgtccagcaggaagagaccgaatgctccttacgtgacgtacctaaataaagacccatcagccccgtgctctctgactgatgcactggatcacttccaagtggacagcctggatgaaatcatccccaatgacctgaagaagagtgatctgcctccccagcatgctccccgcaacatcaccgtggtggccgtggaaggttgccactcatttgtcattgtggactgggacaaagccaccccaggagatgtggtcacaggttacttggtttacagtgcatcctatgaagacttcatcaggaacaagtggtccactcaagcttcatcagtaactcacttgcccattgagaacctaaagcccaacacgaggtattattttaaagtgcaagcacaaaatcctcatggctacggacctatcagcccttcggtctcatttgtcaccgaatcagataatcctctgcttgttgtgaggcccccaggcggtgagcctatctggatcccattcgctttcaaacatgatcccagctacacggactgccatggacggcaatatgtgaagcgcacgtggtatcgaaagttcgtgggagttgttctttgtaattcactgaggtataaaatctacctcagtgacaacctgaaagatacattctacagcattggagacagctggggaagaggtgaagaccattgccaatttgtggattcacaccttgatggaagaacagggcctcagtcctatgtagaagccctccctactattcaaggctactatcgccagtatcgtcaggagcctgtcaggtttgggaacatcggcttcggaaccccctactactatgtgggctggtacgagtgtggggtctccatccctggaaagtggtaatcacaggaccgtcatgctgcaagcttgccctgcccagccccaccaactaagtcgcactaggggctgtgagcaaagacagccagcatgctcagccccgctgccctaggtgccaggaaggtcacagatggacactggccattctggtcatctcagtctggaactcagtcccacttcttggcctggacaatgaacaggattcagttttgctgttaactttgcttctctacttttttttgtttgtttgtaatagcacatcccagagacatcagaaaccagcaactgattcagtgtgatttccagactttttaggcatgaaattcggacacttcagtatttccaggaatagcatatgcacgctgttcttgcttcatggaatgctacatgctttctgtttttctcattttggatttctccaaaactaactgaatttaagcttcaggtccctttgtatgcagtagaaaggaattattaaaaacaccaccaaagaaaataaatatatcctacttgaaatttactctatggacttacccactgctagaataaatgtatcaaatcttatttgtaaattctcaattttgatatatatatgtatatatgcatatacatatccacacttgtctgcaagaatattgattaaaattgctaaatttgtacttgttcaccagaaaaatgt

SEQ ID NO: 96805 - DNA, 4405 bp, Homo sapiens
  misc_feature (1115)..(1115): n is a, c, g, or t
  misc_feature (1967)..(1967): n is a, c, g, or t
  misc_feature (2031)..(2031): n is a, c, g, or t
  misc_feature (2513)..(2513): n is a, c, g, or t
  misc_feature (2570)..(2570): n is a, c, g, or t
  misc_feature (4380)..(4380): n is a, c, g, or t
ttccagacactgtgtatgaatttgcagtccgtatttcacagggtgaaagagatggcaaatggagtacgtcagtcttccaaagaacaccagaatctgcccctaccacagctcctgaaaacttgaacgtctggccagtcaatggcaaacctacagttgtcgctgcatcttgggatgcgctaccagagactgaggggaaagtgaaagaatacattctttcatacgccccggctctcaaaccatttggagcaaagtccctcacctatcctggagacactacttctgccctggtggatggtctgcagcctggggaacgctatcttttcaaaatccgggccacaaacaggagaggcctgggacctcactccaaagccttcattgtcgctatgccaacaaccagtaaggcggatgttcagcagaacacggaggacaatgggaaacccgaaaaacctgagccttcctcaccttctcccagagctccagcttcctcccaacacccctctgtgcctgcttctccccaagggagaaatgccaaggaccttcttcttgacttgaagaacaaaatattggctaatggtggggcgccccgaaaaccccagcttcgcgccaagaaggcagaggagctggatcttcagtcgacagaaatcactggggaggaggagctgggttcccgggaggactcgcccatgtcaccctcagacacccaagaccagaaacggaccctgaggccgccaagtagacacggccactcggtggttgctcccggcaggactgcagtgagggcccggatgccagcgctgccccgaagggaaggcgtagataagcctggcttttccctggccacgcagccccgcccaggggcgcccccctcggcttcggcctctcctgcccaccacgcgtccacccagggcacctctcatcgtccttccctgcctgccagcttgaatgacaacgacttggtggactcagacgaagatgagcgcgctgtgggctccctccaccccaagggcgccttcgcccagccccggccagccctgtcccccagccgccagtccccgtccagcgttctccgcgacagaagctctgtgcaccccggcgcaaagccagcctcgccggcncggaggaccccccattcaggggccgcagaggaagattccagtgcctcagccccaccctcaagactttctccaccccatgggggatcatctcggctgctgcccacccagccacacctgagctctccactttccaagggcgggaaggatggtgaggacgccccagccaccaactccaatgcgccatcacggtccaccatgtcctcctccgtctcttctcatctctcgtccaggacgcaggtctctgagggagcggaggcttctgatggtgaaagccacggtgacggcgatagggaagacggcggaaggcaggcggaggccacggcccagacgctgcgggcccggcctgcctctggacacttccatttgctcagacacaaaccctttgctgccaacgggaggtctccaagcaggttcagcattgggcggggacctcggctgcagccctccagctccccacagtcgactgtgccctcccgagcccaccccagggttccctctcactctgattcccaccctaagcttagctcaggtatccatggagacgaggaggatgagaagccgcttcctgccaccgttgtcaatgaccacgtgccttcctcctccaggcagcccatctcccggggctgggaggacttaaggagaagcccgcagagaggggccagcctgcatcggaaggaacccatcccagagaaccccaaatccacaggggcagatacacatcctcagggcaagtactcctccctggcctccaaggctcaggatgttcaacagagcacagacgcggacacggagggtcattctcccaaagcacagccagggtccacagaccgccacgcgtcccctgctcgtccncccgcagcacggtcacagcagcatcccagtgttcccagaaggatgacacccggccgggccccanaacagcagccccctcctcccgtcgccacgtcccagcaccacccgggaccccagagcagagacgcgggtcggtcaccttcccagcccaggctctcactgacccaggccgggcggccccgccccacgtcgcagggccgctcccactcctcctcggacccttacacggcgagctccagagggatgctccccacggccctccagaaccaggacgaggatgcccagggcagctacgacgacgacagcacagaagtcgaggcccaggatgtgcgggcccccgcgcacgccgcgcgcgccaaggaggcagctgcgtcccttcccaagcaccagcaggggcggcaaagacgccgatgggagcctcgccaaggaagagagggagcctgccatcgcgcttgcccctcgcggagggagcctggctcctgtgaagcgacctctccccccacctccaggcagctcccccagggcctcccacgtcccttcccgacngccgcctcgcagcgctgccaccgtgagccccgtcgcgggcacccacccctggccgcngtacaccacgcgcgccccacctggccacttctccaccaccccgatgctgtccttgcgccagaggatgatgcatgccagattccgtaaccctctctcccgacagcctgccagaccctcttacagacaaggttataatggcagaccaaatgtagaagggaaagtccttcctggtagtaatggaaaaccgaatggacagagaattatcaatggccctcaaggaacaaagtgggttgtggaccttgatcgtgggttagtattgaatgcagaaggaaggtacctccaagattcacatggaaatcctcttcggattaaactaggaggagatggtcgaaccattgtagatctggaagggacccccgtggtgagtcctgacggcctcccactctttgggcaggggcgacatggcacacctctggccaatgcccaagataagccaattttgagtcttggaggaaagccgctggtgggcttggaggtcatcaaaaaaaccacccatccccctaccactaccatgcagcccaccactactacgacgcccctgcctaccactacaaccccgaggcccaccactgccaccacccgccgcacgaccaccaggcgtccaacaaccacagtccgaaccactacgcggacaaccaccaccaccacccccaaacccaccactcccatccccacctgtccccctgggaccttggaacggcacgacgatgatggcaacctgataatgagctccaatgggatcccagagtgctacgctgaagaagatgagttctcaggcttggagactgacactgcagtacctacggaagaggcctacgttatatatgatgaagattatgaatttgagacgtcaaggccaccaaccaccactgagccttcgaccactgctaccacaccgagggtgatcccagaggaaggcgccatcagttcctttcctgaagaagaatttgatctggctggaaggaaacgatttgttgctccttacgtgacgtacctaaataaagacccatcagccccgtgctctctgactgatgcactggatcacttccaagtggacagcctggatgaaatcatccccaatgacctgaagaagagtgatctgcctccccagcatgctccccgcaacatcaccgtggtggccgtggaaggttgccactcatttgtcattgtggactgggacaaagccaccccaggagatgtggtcacaggttacttggtttacagtgcatcctatgaagacttcatcaggaacaagtggtccactcaagcttcatcagtaactcacttgcccattgagaacctaaagcccaacacgaggtattattttaaagtgcaagcacaaaatcctcatggctacggacctatcagcccttcggtctcatttgtcaccgaatcagataatcctctgcttgttgtgaggcccccaggcggtgagcctatctggatcccattcgctttcaaacatgatcccagctacacggactgccatggacggcaatatgtgaagcgcacgtggtatcgaaagttcgtgggagttgttctttgtaattcactgaggtataaaatctacctcagtgacaacctgaaagatacattctacagcattggagacagctggggaagaggtgaagaccattgccaatttgtggattcacaccttgatggaagaacagggcctcagtcctatgtagaagccctccctactattcaaggctactatcgccagtatcgtcaggagcctgtcaggtttgggaacatcggcttcggaaccccctactactatgtgggctggtacgagtgtgggggtgtnggggataacatgtagatcctctaga

SEQ ID NO: 96806 - DNA, 355 bp, Homo sapiens
gtcaagctgcccctctccaacatcaaactgtagtctcttatgtccagctgcttctcctcttctctgctctgtcagtggagcctggggtttttatgggcataagattgggggtggggcgggacatgagtggttttggaaaaggcaacatcacatgggaaaacaggaatgcatgttctcacttggggccatggttccaggcttggacttgatgccttcacagctggattctatcaaatatttaaagaagaactaataccaatcctactcaaactattccaaaaaatagaggaggaggggatacttagaaactcatcctacaaggccagtattaccctgataccaaaaccagacaaag

SEQ ID NO: 96807 - DNA, 934 bp, Homo sapiens
tgcaaacttcttggccttccaagatttgtgtctatctctgtaactatctctaatattttccctaccagcctgactgaacccaacaacattctagatgcttctcttctagaaactatgtcaactacagcatctgtatttcaaccatattgctttacaacgattgtcttttacttttctatctcacttgcaaaagtaccattgctgaaataattcctcaacttcattgaggaccaattccttgacctcgcgattttctcattaccatactgtctccttgtatattagttttccttttaaaccacattagattatatggttccacactaccatcactcattaaaaaaacttgtttgcaaatatcctcaatttctctacatctgccactttctatggtaattctctgacaaaccaaatttttaatgagtaattcaccttctaacatgaagacagaagaaacttctgtggctggaaagaaatatcatatgagtaagctgactggtttttacttaaagggaacatcatgagctttaagtgggcattctacatgggcagtcatattctaatgaggaaacagaaacagtcagagaagaactttcttgttttcttctaaccaaatctataaaatggccttaatctgcatctatctgaaactttttgcagtgtattttccatcactaatcacagcatacaggtttcaaagaatttctacaggactgaaaaaaaccaaatcatgccaaatagtgggaggaagagctaccttattccaaaaaatactagtatcagaactcaggtttcattaaatacattgatacctagaataaaagactctcttgcagctttctgtggccagatgacttttgttcaatgaaatattaagcactgtgttgtatctccagaaagtccccattttgcttttctcttctttattcttatt

SEQ ID NO: 96808 - DNA, 369 bp, Homo sapiens
ccaaagaaaaatattacctagtaaattatgaggcttcttgaggatgttctatgctttacctattaaagaaggcaattacagaggttatgtggaaacacagaaaaacatttgtgatatgccaccgtgggaaaagcagaaaacaaaataccttcaagtattacatataggcaagaataaggaaacctatgaaaatgaaatagccatttggctggctgccgaaccactgaatttttccttttctaaattttctttaacactattactatatcagcattttggggaaaaggatagtgtgtgtatgtgtgtgtaggggggtagtgcaacaacatggtacgtgtgtttaatgaaatcgagcattttaaaagtatt

SEQ ID NO: 96809 - DNA, 177 bp, Homo sapiens
aaaggttgctccactactgtctgcatctgaacagaaaactacttcagaaaaccttcttggaaacaacaacagagcaaaatgaagcagggtctggccaatgattttcaggaagcctgagacttaaagggattctcagaagaaactcagaaaagtcgctaacttgtctgtgaagccaga

SEQ ID NO: 96810 - DNA, 487 bp, Homo sapiens
aacacacatcttgactcatttttaatatatctgtaagtaagagatggaattcctggggcttaaagtatattatacattttggtaaataatgtcacattgccctatgactgtcataaaggttatgacagtcttaactaatttttgctcttatttaatctgagcatatgttatttgtacttgtctactatttcatacttttggcatattttattccatatattctgccttagcctgtgctcctttttcccctacactatcaggaatacatagtgctttaatagtagatgttcaatacgatatgggttttaggaagaaaaaacctccctactcatttgagaataatgtagtaaccccaagctcagtgcattgtcctgtcatttttgtggacactgttttgatattccttaaaaatggatagtaaacatcaggtaggtactaagatatcaattaagagaaagtactcctattcactagacactagtagtga

SEQ ID NO: 96811 - DNA, 419 bp, Homo sapiens
gactccagccttactcaaatagacagaattttttgctgaagaatagaacagtttgtacactgctcacttatttgttagacaccaagtaaatgacagacaaagttctagatgcaagaatatagcagcaaacaacactgacaaaaattctattcttatggagcttgcctttcacaatgccagatattgtacaaaagaaacaagtgaattatatggtctatagaaattgataaatgttagtaagaccaacagagcataaaacggggatacacagtgctgagaggaagttgcaatcttaaattttgctttactaatggagaatatagagtcataaagtatatataatctattttagagacttaaagtagttttggttgctcttaaataaaagctagattctgagcaaaaatgttcctagctgg

SEQ ID NO: 96812 - DNA, 258 bp, Homo sapiens
atcgcagcggcacagctccctctagagttccttcacactcacatcctctcccgcctcaggtagaaatatccgcctgcttagctccaggctcccatgacatactcccgtacctcctctcaccccaccctcatcgcggtcagcccgtcttcattacttctgccacagaacagtgtcccgcagtgaggcggtgaagccttccttcccagaatgtgcctcatcctcttcctatggcgtgaacaactgttgccctgacctgca

SEQ ID NO: 96813 - DNA, 368 bp, Homo sapiens
tcaaattgtgaaatttagaattctgctatgacaagtggaaaattgagaaaagacgcagagccactttttgtcatcgtgtaggtgacaaggagtctcccaagtatatcctgctaataggagtagctctcaaaagttaatctcaataaagcctcctaaagtctctggcaaagaaaactgctgcaatcccttgtgcaattctccagactaagctgtatgggggaagcctaccttttttcagcccgaagttcaggagactgaggatgtaactggggacatgatcattgattcaaaggtgattgcttaagtatcttaaaaatgtatagagctaatctgagtacctgcttaaatttcaaagaagccctgtggct

SEQ ID NO: 96814 - DNA, 793 bp, Homo sapiens
cttggaacagactcccgccctaaagggagcctggggagccctctagatgagctgagagttcccttcatgtcttgtttccttaattcccggattctgatgggcttccctatatagagcatgcctcttgaaacaggtatgctactgtagaaagagtcaatgagggccgggcttggtggctcacgcctgttatcccaacactttgggaggctgaggtgggcagatcacctgaagtcgggagttcaagaccagcctggccaacatggtgaaaccccatctctactaaaaatacaaaagttagctgggcatggtggcgcacacctgtagtcccagctactcgggaggctgagggaggagaatcgcttgaaccaggggggcagaggctgcagtgagctgcgatggtgccactgcactccagcctgggtgacagaatgagactccgactcaaaaaacaaaaaaagagtcaatgagttcaaatcagaacagcctgctctgtctcttactggctgtgtttccatgaggaaaatgagttccttaaccttcctgggcgttattgttctcatctataaatttgctacagtaagaagtgaattataggattatagtaagggaagtcatgtgtgttaaagggctcaagggcctgacacagtaccctggcaaatcgtatgttagttatgtcaggaaaaactgcctgcgtttcagcaccctgtgaccaccaaccttacaagattacatctagtcacctgactagtgaccccaaattcatttgactaccactttcccccaaaacagcccc

SEQ ID NO: 96815 - DNA, 280 bp, Homo sapiens
cactgcactccagcctgggcaacagagcgagactccaactcaaaagaaaaacaaacaagtactgactctgtcatgctctttgggggcctgcgctgctctaccatctcatgtcacagtcagggagctctggctgagcatcagccaggatgtgacctggaaacctggcttggctcttaggttgatagtgttattcctttcaatggactcactcatcacaactcaagaactgcagagtaggcagcacggagccagtcagagaatccttgcctccttaacagcc

SEQ ID NO: 96816 - DNA, 417 bp, Homo sapiens
gttttttcccaaattatttgacagtttaagggagtcaacgctttcagattttacttttttttttttgagacggggtctcactctgttgcccaggctggagtgcagtggtgcaatcttggctcactgcagcctctgcctcccgggttccagcgattctcctgcctcagcctgctgggtagctggagttataggcatgcaccaccgcacctggctaatttttctatttttagtagagatgggatttcgccatgttggccaggctggtctcgaactactgacctcaggtgatccacccgccttgacctcccaaagtggtaggataacatttgtgagccaccgtgcctggcccagattttacttttaaaaaaacttttcaatcaaaattttactacttctgattcatgagggtggcataat

SEQ ID NO: 96817 - DNA, 811 bp, Homo sapiens
actcacttcattttgtcacactctggcttgtaattatctcataatgtctgcagatgctcaggaggaaagttaatgagatttccactgtttgaagttttaacagggtttctaatgggaaaatgggaagggagaagttttctattaggtaaaaaatagtgctattctcaaatggattctcccatttgcagggacaaggaaaactttaattttcgatgcccccatgacaccccaggaataatctaaagtttcctatactctaaggaaacttcagtaacggttttaagcaaatactttatttctaatcaaaactttctttctgaacatttgccctcgtattattcatttattcacccaagaaattatttggaagctctaagctctcattgttcctcacagcatttattttatcgtatcaaaggttaaaacttggattgcaatcttagaggaaaattaattcagtgattaagaaaaatgcactttaagcaatacacatttaaataactgacaggcatggggcaatgtatttctgaattttgttttttggaaaaacacttttttctacttaaaattttaggcagctgcaattcttctaccctatagcctggagaaacagcatgaattactaataagggagcaccaatctgcagtgcagtgaccactttcagaacaaaagggtgaaagctaaaaccagaaaaatagattttttaaaatctactggttgcttaaagcatatttggaccttggctgtacttgagaacattttgcaatattctaccatccttgagcagaaggcatttggccccagagacta

SEQ ID NO: 96818 - DNA, 841 bp, Homo sapiens
tgcagaggaaggaaggggtgaatggaaaaagagtggcaacttccttggctctcctatcctgcagtaggtgagccctctgcatgggatctttcggggctgagagctcttttctgttaaaggaatgtctgcaaaagacaagacaaatacatttgaacagtcccgaggagaggtaatttcagagtagacacctatttctccaccagaaacaaagcagatcccagatctgaaaagcaggcttgaggaggcaagaggaagcatccaggaaccccagagcaggcagtggattacccattggctctgggtaaagccaagagggtttagagagggatttgcgctgtttcagcctcctgattcaactcctctccaaggaaagaggctcagtaggccaaccaagccacttttcctctcttgagggaagacgaccaaagatgcaacttgcccagctgtctgttatgaacgaaattgcatccccgcaaaattcatatgttgaaggcctaacacctcgtacctcagtatttgactgtatttggagacagggtctttacagaggtaataaaggtgacacgaggtcattagagtgggccctaatccattatgatgggcatttataaacacggaggagattaggacacagagaagaatgcatggagaaaagaccatgtgaagactcagggagggtgtggtcatctacaagccaaggagagaggcatcagaagaaacaatcctcacaacaccttgatcttggagttctagcctccagagcagtgagaaaaacaaaccgccatccaggatgtggccctttgttatggcagccctcgaaaaccaacacacagcagaacaa

SEQ ID NO: 96819 - DNA, 176 bp, Homo sapiens
accctgaagggatctcaggacggaaatatgaaagcgaggggctgagggggcggagcagccctcaccacagagctgtcccgaatggcccagcagactcgggaagagggggctcccggggctgttccccagtggacagtggctctggggcaaggtggggacacagacagcaactccca

SEQ ID NO: 96820 - DNA, 460 bp, Homo sapiens
agtttggatataaaaatatcttggcaaaagcattcatgcctgtggattcttctcttaaggtaaaggaccagtgacatccttactggggcctgctgattaaggaacaagaataatgggtcaaaggggatgtgagttccctctctgtgatataaaattaggacatctttcatatttaagtgatgagaagatgtagcaagccagaaatttttgtcgcctctgatctaataatgaacagtgtatgggaccagggtggtcaggaggaaggtgagccattgaagggcaattgtccaaagccaccctctgattccacttttcaatgcttctggaaagtgagtttttaacataatgggaaggggatatattaaaatattgaacaaagcctaatatttatcattactgtgaaagtttgattatttgggccaggtataaagtaaggcctagtctgttcctttgatgacct

SEQ ID NO: 96821 - DNA, 3845 bp, Homo sapiens
cggccgcggggcctggagcccgggatttgtgggcggcgagggcgcgaggggccgcgcgccatgctccgggccccgacggcgcggacgccccctcgcgcgccagcgtccggcgcgaccccggatcccggtctgcgcattgccccccgacggctgcgctagggagcgcggggcccggcggggggcggccgagctgggcgccctcccccggcgcggagtccccgcaccccggagggatggggcgggcagccgcgggcgcctaagatgccggccatgcggggcctcctggcgccgcagaacaccttcctggacaccatcgctacgcgcttcgacggcacgcacagtaacttcgtgctgggcaacgcccaggtggcggggctcttccccgtggtctactgctctgatggcttctgtgacctcacgggcttctcccgggctgaggtcatgcagcggggctgtgcctgctccttcctttatgggccagacaccagtgagctcgtccgccaacagatccgcaaggccctggacgagcacaaggagttcaaggctgagctgatcctgtaccggaagagcgggctcccgttctggtgtctcctggatgtgatacccataaagaatgagaaaggggaggtggctctcttcctagtctctcacaaggacatcagcgaaaccaagaaccgagggggccccgacagatggaaggagacaggtggtggccggcgccgatatggccgggcacgatccaaaggcttcaatgccaaccggcggcggagccgggccgtgctctaccacctgtccgggcacctgcagaagcagcccaagggcaagcacaagctcaataagggggtgtttggggagaaaccaaacttgcctgagtacaaagtagccgccatccggaagtcgcccttcatcctgttgcactgtggggcactgagagccacctgggatggcttcatcctgctcgccacactctatgtggctgtcactgtgccctacagcgtgtgtgtgagcacagcacgggagcccagtgccgcccgcggcccgcccagcgtctgtgacctggccgtggaggtcctcttcatccttgacattgtgctgaatttccgtaccacattcgtgtccaagtcgggccaggtggtgtttgccccaaagtccatttgcctccactacgtcaccacctggttcctgctggatgtcatcgcagcgctgccctttgacctgctacatgccttcaaggtcaacgtgtacttcggggcccatctgctgaagacggtgcgcctgctgcgcctgctgcgcctgcttccgcggctggaccggtactcgcagtacagcgccgtggtgctgacactgctcatggccgtgttcgccctgctcgcgcactgggtcgcctgcgtctggttttacattggccagcgggagatcgagagcagcgaatccgagctgcctgagattggctggctgcaggagctggcccgccgactggagactccctactacctggtgggccggaggccagctggagggaacagctccggccagagtgacaactgcagcagcagcagcgaggccaacgggacggggctggagctgctgggcggcccgtcgctgcgcagcgcctacatcacctccctctacttcgcactcagcagcctcaccagcgtgggcttcggcaacgtgtccgccaacacggacaccgagaagatcttctccatctgcaccatgctcatcggcgccctgatgcacgcggtggtgtttgggaacgtgacggccatcatccagcgcatgtacgcccgccgctttctgtaccacagccgcacgcgcgacctgcgcgactacatccgcatccaccgtatccccaagcccctcaagcagcgcatgctggagtacttccaggccacctgggcggtgaacaatggcatcgacaccaccgagctgctgcagagcctccctgacgagctgcgcgcagacatcgccatgcacctgcacaaggaggtcctgcagctgccactgtttgaggcggccagccgcggctgcctgcgggcactgtctctggccctgcggcccgccttctgcacgccgggcgagtacctcatccaccaaggcgatgccctgcaggccctctactttgtctgctctggctccatggaggtgctcaagggtggcaccgtgctcgccatcctagggaagggcgacctgatcggctgtgagctgccccggcgggagcaggtggtaaaggccaatgccgacgtgaaggggctgacgtactgcgtcctgcagtgtctgcagctggctggcctgcacgacagccttgcgctgtaccccgagtttgccccgcgcttcagtcgtggcctccgaggggagctcagctacaacctgggtgctgggggaggctctgcagaggtggacaccagctccctgagcggcgacaatacccttatgtccacgctggaggagaaggagacagatggggagcagggccccacggtctccccagccccagctgatgagccctccagccccctgctgtcccctggctgcacctcctcatcctcagctgccaagctgctatccccacgtcgaacagcaccccggcctcgtctaggtggcagagggaggccaggcagggcaggggctttgaaggctgaggctggcccctctgctcccccacgggccctagaggggctacggctgccccccatgccatggaatgtgcccccagatctgagccccagggtagtagatggcattgaagacggctgtggctcggaccagcccaagttctctttccgcgtgggccagtctggcccggaatgtagcagcagcccctcccctggaccagagagcggcctgctcactgttccccatgggcccagcgaggcaaggaacacagacacactggacaagcttcggcaggcggtgacagagctgtcagagcaggtgctgcagatgcgggaaggactgcagtcacttcgccaggctgtgcagcttgtcctggcgccccacagggagggtccgtgccctcgggcatcgggagaggggccgtgcccagccagcacctccgggcttctgcagcctctgtgtgtggacactggggcatcctcctactgcctgcagcccccagctggctctgtcttgagtgggacttggccccaccctcgtccggggcctcctcccctcatggcaccctggccctggggtcccccagcgtctcagagctccccctggcctcgagccacagctttctggacctccacctcagactcagagccccctgcctcaggagacctctgctctgagcccagcacccctgcctcccctcctccttctgaggaaggggctaggactgggcccgcagagcctgtgagccaggctgaggctaccagcactggagagcccccaccagggtcagggggcctggccttgccctgggacccccacagcctggagatggtgcttattggctgccatggctctggcacagtccagtggacccaggaagaaggcacaggggtctgagtaccagccctagaactcagcgttgccaggtgtgctgccatctgctgttcggcccaacctcagagtgaaggcagggtggcagcctccccacggactccatgcggcccgctggctcagggcagggagcctggaagcaaaggaggacctggctcctgactctcagagaggataggctggatccctggggcaggcctctcctcggcctgctcctctgacctcccggtctccctctgcaggctgggggcagaggcctgaggacaaggaagagctttgccatcccctgcatgtgcccctgcctctacctgtccccaaatttttatattaaaaaaaaa

SEQ ID NO: 96822 - DNA, 1314 bp, Homo sapiens
tcatgctgctcaagcttggccccccagctaaactgtaagctcctaggggaagggaccccatgttagctttctcctgggctcctggtcagttccacgctcctgcagcctgtgtgtgtggacgctggggcatcccgtcccgtatgaccccacagtggctgcctgtccattgatttgttgtcctggtacctgggttcacagggtagtagatggcattgaagacggctgtggctcggaccagcccaagttctctttccgcgtgggccagtctggcccggaatgtagcagcagcccctcccctggaccagagagcggcctgctcactgttccccatgggcccagcgaggcaaggaacacagacacactggacaagcttcggcaggcggtgacagagctgtcagagcaggtgctgcagatgcgggaaggactgcagtcacttcgccaggctgtgcagcttgtcctggcgccccacagggagggtccgtgccctcgggcatcgggagaggggccgtgcccagccagcacctccgggcttctgcagcctctgtgtgtggacactggggcatcctcctactgcctgcagcccccagctggctctgtcttgagtgggacttggccccaccctcgtccggggcctcctcccctcatggcaccctggccctggggtcccccagcgtctcagagctccccctggcctcgagccacagctttctggacctccacctcagactcagagccccctgcctcaggagacctctgctctgagcccagcacccctgcctcccctcctccttctgaggaaggggctaggactgggcccgcagagcctgtgagccaggctgaggctaccagcactggagagcccccaccagggtcagggggcctggccttgccctgggacccccacagcctggagatggtgcttattggctgccatggctctggcacagtccagtggacccaggaagaaggcacaggggtctgagtaccagccctagaactcagcgttgccaggtgtgctgccatctgctgttcggcccaacctcagagtgaaggcagggtggcagcctccccacggactccatgcggcccgctggctcagggcagggagcctggaagcaaaggaggacctggctcctgactctcagagaggataggctggatccctggggcaggcctctcctcggcctgctcctctgacctcccggtctccctctgcaggctgggggcagaggcctgaggacaaggaagagctttgccatcccctgcatgtgcccctgcctctacctgtccccaaatttttatattaaaaaaaaa

SEQ ID NO: 96823 - DNA, 1553 bp, Homo sapiens
cggccgcggggcctggagcccgggatttgtgggcggcgagggcgcgaggggccgcgcgccatgctccgggccccgacggcgcggacgccccctcgcgcgccagcgtccggcgcgaccccggatcccggtctgcgcattgccccccgacggctgcgctagggagcgcggggcccggcggggggcggccgagctgggcgccctcccccggcgcggagtccccgcaccccggagggatggggcgggcagccgcgggcgcctaagatgccggccatgcggggcctcctggcgccgcagaacaccttcctggacaccatcgctacgcgcttcgacggcacgcacagtaacttcgtgctgggcaacgcccaggtggcggggctcttccccgtggtctactgctctgatggcttctgtgacctcacgggcttctcccgggctgaggtcatgcagcggggctgtgcctgctccttcctttatgggccagacaccagtgagctcgtccgccaacagatccgcaaggccctggacgagcacaaggagttcaaggctgagctgatcctgtaccggaagagcgggctcccgttctggtgtctcctggatgtgatacccataaagaatgagaaaggggaggtggctctcttcctagtctctcacaaggacatcagcgaaaccaagaaccgagggggccccgacagatggaaggagacaggtggtggccggcgccgatatggccgggcacgatccaaaggcttcaatgccaaccggcggcggagccgggccgtgctctaccacctgtccgggcacctgcagaagcagcccaagggcaagcacaagctcaataagggggtgtttggggagaaaccaaacttgcctgagtacaaagtagccgccatccggaagtcgcccttcatcctgttgcactgtggggcactgagagccacctgggatggcttcatcctgctcgccacactctatgtggctgtcactgtgccctacagcgtgtgtgtgagcacagcacgggagcccagtgccgcccgcggcccgcccagcgtctgtgacctggccgtggaggtcctcttcatccttgacattgtgctgaatttccgtaccacattcgtgtccaagtcgggccaggtggtgtttgccccaaagtccatttgcctccactacgtcaccacctggttcctgctggatgtcatcgcagcgctgccctttgacctgctacatgccttcaaggtcaacgtgtacttcggggcccatctgctgaagacggtgcgcctgctgcgcctgctgcgcctgcttccgcggctggaccggtactcgcagtacagcgccgtggtgctgacactgctcatggccgtgttcgccctgctcgcgcactgggtcgcctgcgtctggttttacattggccagcgggagatcgagagcagcgaatccgagctgcctgagattggggttgctgatctgacattaagaagaccttcagctcccaagaatctctgagctccacaggatgggcaagggtggatcgacccttgcagatacacattatattc

SEQ ID NO: 96824 - DNA, 1181 bp, Homo sapiens
cggccgcggggcctggagcccgggatttgtgggcggcgagggcgcgaggggccgcgcgccatgctccgggccccgacggcgcggacgccccctcgcgcgccagcgtccggcgcgaccccggatcccggtctgcgcattgccccccgacggctgcgctagggagcgcggggcccggcggggggcggccgagctgggcgccctcccccggcgcggagtccccgcaccccggagggatggggcgggcagccgcgggcgcctaagatgccggccatgcggggcctcctggcgccgcagaacaccttcctggacaccatcgctacgcgcttcgacggcacgcacagtaacttcgtgctgggcaacgcccaggtggcggggctcttccccgtggtctactgctctgatggcttctgtgacctcacgggcttctcccgggctgaggtcatgcagcggggctgtgcctgctccttcctttatgggccagacaccagtgagctcgtccgccaacagatccgcaaggccctggacgagcacaaggagttcaaggctgagctgatcctgtaccggaagagcgggctcccgttctggtgtctcctggatgtgatacccataaagaatgagaaaggggaggtggctctcttcctagtctctcacaaggacatcagcgaaaccaagaaccgagggggccccgacagatggaaggagacaggtggtggccggcgccgatatggccgggcacgatccaaaggcttcaatgccaaccggcggcggagccgggccgtgctctaccacctgtccgggcacctgcagaagcagcccaagggcaagcacaagctcaataagggggtgtttggggagaaaccaaacttgcctgagtacaaagtagccgccatccggaagtcgcccttcatcctgttgcactgtggggcactgagagccacctgggatggcttcatcctgctcgccacactctatgtggctgtcactgtgccctacagcgtgtgtgtgagcacagcacgggagcccagtgccgcccgcggcccgcccagcgtctgtgacctggccgtggaggtcctcttcatccttgttactgtgagaactaagacgatgtatgggaagggccggggacagtgtcaactactgagaaagtgagcaggtgtccaggcaagagtggctgccccccc

SEQ ID NO: 96825 - DNA, 645 bp, Homo sapiens
ctgtcgtttcacgatgggctgaggggtggggggtttccaacacttgctgcggaggaccgtgggcagccagggtcggtgaaggatcccaaaatggctgggcgaaaacttgctctaaaaaccattgactgggtagcttttgcagagatcataccccagaaccaaaaggccattgctagttccctgaaatcctggaatgagaccctcacctccaggttggctgctttacctgagaatccaccagctatcgactgggcttactacaaggccaatgtggccaaggctggcttggtggatgactttgagaagaagtttaatgcgctgaaggttcccgtgccagaggataaatatactgcccaggtggatgccgaagaaaaagaagatgtgaaatcttgtgctgagtgggtgtctctctcaaaggccaggattgtagaatatgagaaagagatggagaagatgaagaacttaattccatttgatcagatgaccattgaggacttgaatgaagctttcccagaaaccaaattagacaagaaaaagtatccctattggcctcaccaaccaattgagaatttataaaattgagtccaggaggaagctctggcccttgtattacacattctggacattaaaaataataattataca

SEQ ID NO: 96826 - DNA, 906 bp, Homo sapiens
ctgtcgtttcacgatgggctgaggggtggggggtttccaacacttgctgcggaggaccgtgggcagccagggtcggtgaaggatcccaaaatggctgggcgaaaacttgctctaaaaaccattgactgggtagcttttgcagagatcataccccagaaccaaaaggccattgctagttccctgaaatcctggaatgagaccctcacctccaggttggctgctttacctgagaatccaccagctatcgactgggcttactacaaggccaatgtggccaaggctggcttggtggatgactttgagaagaagtttaatgcgctgaaggttcccgtgccagaggataaatatactgcccaggtggatgccgaagaaaaagaagatgtgaaatcttgtgctgagtgggtgtctctctcaaaggccaggattgtagaatatgagaaagagatggagaagatgaagaacttaattccatttgatcagatgaccattgaggacttgaatgaagctttcccagaaaccaaattagacaagaaaaagtatccctattggcctcaccaaccaattgagaatttataaaattgagtccaggaggaagctctggcccttgtattacacattctggacattaaaaataataattatacaaaaaaaaaaataattaaccaactaagaataccacaaaaaggggggcgcgcgccgctataaaagaattccccgagaggggacaagggttatgctggtcacccaggttgttgttggtccaacggggccccaaataggaagccgaatttaacgcagcgcccggcgccccgttataccaccctgtgcagggaaaccacgcgaaccggacagatctggggagcaccttatttggcgcggcgcacatttggaaccaactcccctaag

SEQ ID NO: 96827 - DNA, 711 bp, Homo sapiens
ggctgaggaaagatcttcccgtgacccacttccgttacttgctgcggaggaccgtgggcagccaggtcggtgaaggatcccaaaatggctgggcgaaaacttgctctaaaaaccattgactgggtagcttttgcagagatcataccccagaaccaaaaggccattgctagttccctgaaatcctggaatgagaccctcacctccaggttggctgctttacctgagaatccaccagctatcgactgggcttactacaaggccaatgtggccaaggctggcttggtggatgactttgagaagaagtttaatgcgctgaaggttcccgtgccagaggataaatatactgcccaggtggatgccgaagaaaaagaagatgtgaaatcttgtgctgagtgggtgtctctctcaaaggccaggattgtagaatatgagaaagagatggagaagatgaagaacttaattccatttgatcagatgaccattgaggacttgaatgaagctttcccagaaaccaaattagacaagaaaaagtatccctattggcctcaccaaccaattgagaatttataaaattgagtccaggaggaagctctggcccttgtattacacattctggacattaaaaataataattatacaaaacaaaaaaaaaacacatccacaagacaactcatgatcatccacaacttgtagatacatcaaaccaaaaac

SEQ ID NO: 96828 - DNA, 639 bp, Homo sapiens
ggctgaggaaagatcttcccgtgacccacttccgttacttgctgcggaggaccgtgggcagccaggtcggtgaaggatcccaaaatggctgggcgaaaacttgctctaaaaaccattgactgggtagcttttgcagagatcataccccagaaccaaaaggccattgctagttccctgaaatcctggaatgagaccctcacctccaggttggctgctttacctgagaatccaccagctatcgactgggcttactacaaggccaatgtggccaaggctggcttggtggatgactttgagaagaaggtgaaatcttgtgctgagtgggtgtctctctcaaaggccaggattgtagaatatgagaaagagatggagaagatgaagaacttaattccatttgatcagatgaccattgaggacttgaatgaagctttcccagaaaccaaattagacaagaaaaagtatccctattggcctcaccaaccaattgagaatttataaaattgagtccaggaggaagctctggcccttgtattacacattctggacattaaaaataataattatacaaaacaaaaaaaaaacacatccacaagacaactcatgatcatccacaacttgtagatacatcaaaccaaaaac

SEQ ID NO: 96829 - DNA, 577 bp, Homo sapiens
gtataattattatttttaatgtccagaatgtgtaatacaagggccagagcttcctcctggactcaattttataaaattggcctcaccaaccaattgagaatttataaaattgagtccaggaggaagctctggtcattcaagtcctcaatggtcatctgatcaaatggaattaagttcttcatcttctccatctctttctcatattctacaatcctggcctttgagagagacacccactcagcacaagatttcacatcttctttttcttcggcatccacctgggcagtatatttatcctctggcacgggaaccttcagcgcattaaacttcttctcaaagtcatccaccaagccagccttggccacattggccttgtagtaagcccagtcgatagctggtggattctcaggtaaagcagccaacctggaggtgagggtctcattccaggatttcagggaactagcaatggccttttggttctggggtatgatctctgcaaaagctacccagtcaatggtttttagagcaagttttcgcccagccattttgggatccttcaccgacctgctgcccacgg

SEQ ID NO: 96830 - DNA, 631 bp, Homo sapiens
cgagctccggtaccccttgcatgtaccgggggctgcggaggaccgtgggcagccagggtcggtgaaggatcccaaaatggctgggcgaaaacttgctctaaaaaccattgactgggtagcttttgcagagatcataccccagaaccaaaaggccattgctagttccctgaaatcctggaatgagaccctcacctccaggttggctgctttacctgagaatccaccagctatcgactgggcttactacaaggccaatgtggccaaggctggcttggtggatgactttgagaagaagtttaatgcgctgaaggttcccgtgccagaggataaatatactgcccaggtggatgccgaagaaaaagaagatgtgaaatcttgtgctgagtgggtgtctctctcaaaggccaggattgtagaatatgagaaagagatggagaagatgaagaacttaattccatttgatcagatgaccattgaggacttgaatgaagctttcccagaaaccaaattagacaagaaaaagtatccctattggcctcaccaaccaattgagaatttataaaattgagtccaggaggaagctctggcccttgtattacacattctggacattaaaaataataattataca

SEQ ID NO: 96831 - DNA, 602 bp, Homo sapiens
ggctgcaggaattcggcacgatgtctgtgtcggtgaaggatcccaaaatggctgggcgaaaacttgctctaaaaaccattgactgggtagcttttgcagagatcataccccagaaccaaaaggccattgctagttccctgaaatcctggaatgagaccctcacctccaggttggctgctttacctgagaatccaccagctatcgactgggcttactacaaggccaatgtggccaaggctggcttggtggatgactttgagaagaagtttaatgcgctgaaggttcccgtgccagaggataaatatactgcccaggtggatgccgaagaaaaagaagatgtgaaatcttgtgctgagtgggtgtctctctcaaaggccaggattgtagaatatgagaaagagatggagaagatgaagaacttaattccatttgatcagatgaccattgaggacttgaatgaagctttcccagaaaccaaattagacaagaaaaagtatccctattggcctcaccaaccaattgagaatttataaaattgagtccaggaggaagctctggcccttgtattacacattctggacattaaaaataataattataca

SEQ ID NO: 96832 - DNA, 678 bp, Homo sapiens
  misc_feature (658)..(658): n is a, c, g, or t
ctgtcgtttcacgatgggctgaggggtggggggtttccaacacttgctgcggaggaccgtgggcagccagggtcggtgaaggatcccaaaatggctgggcgaaaacttgctctaaaaaccattgactgggtagcttttgcagagatcataccccagaaccaaaaggccattgctagttccctgaaatcctggaatgagaccctcacctccaggttggctgctttacctgagaatccaccagctatcgactgggcttactacaaggccaatgtggccaaggctggcttggtggatgactttgagaagaagtttaatgcgctgaaggttcccgtgccagaggataaatatactgcccaggtggatgccgaagaaaaagaagatgtgaaatcttgtgctgagtgggtgtctctctcaaaggccaggattgtagaatatgagaaagagatggagaagatgaagaacttaattccatttgatcagatgaccattgaggacttgaatgaagctttcccagaaaccaaattagacaagaaaaagtatccctattggcctcaccaaccaattgagaatttataaaattgagtccaggaggaagctctggcccttgtattacacattctggacattaaaaataataattatacaaaaaaaaaaaaanaacaaaacaccacagaaaaa

SEQ ID NO: 96833 - DNA, 717 bp, Homo sapiens
ctgtcgtttcacgatgggctgaggggtggggggtttccaacacttgctgcggaggaccgtgggcagccagggtcggtgaaggatcccaaaatggctgggcgaaaacttgctctaaaaaccattgactgggtagcttttgcagagatcataccccagaaccaaaaggccattgctagttccctgaaatcctggaatgagaccctcacctccaggttggctgctttacctgagaatccaccagctatcgactgggcttactacaaggccaatgtggccaaggctggcttggtggatgactttgagaagaagtttaatgcgctgaaggttcccgtgccagaggataaatatactgcccaggtggatgccgaagaaaaagaagatgtgaaatcttgtgctgagtgggtgtctctctcaaaggccaggattgtagaatatgagaaagagatggagaagatgaagaacttaattccatttgatcagatgaccattgaggacttgaatgaagctttcccagaaaccaaattagacaagaaaaagtatccctattggcctcaccaaccaattgagaatttataaaattgagtccaggaggaagctctggcccttgtattacacattctggacattaaaaataataattatacaaaacaaaaaaaaaacacatccacaagacaactcatgatcatccacaacttgtagatacatcaaaccaaaaac

SEQ ID NO: 96834 - DNA, 580 bp, Homo sapiens
ctgtcgtttcacgatgggctgaggggtggggggtttccaacacttgctgcggaggaccgtgggcagccagggtcggtgaaggatcccaaaatggctgggcgaaaacttgctctaaaaaccattgactgggtagcttttgcagagatcataccccagaaccaaaaggccattgctagttccctgaaatcctggaatgagaccctcacctccaggttggctgctttacctgagaatccaccagctatcgactgggcttactacaaggccaatgtggccaaggctggcttggtggatgactttgagaagaagtttaatgcgctgaaggttcccgtgccagaggataaatatactgcccaggtggatgccgaagaaaaagaagatgtgaaatcttgtgctgagtgggtgtctctctcaaaggccaggattgtagaatatgagaaagagatggagaagatgaagaacttaattccatttgatcagatgaccattgaggacttgaatgaagctttcccagaaaccaaattagacaagaaaaagtatccctctatcgagggtaccgagctcgagtcggatcatgtca

SEQ ID NO: 96835 - DNA, 873 bp, Homo sapiens
atttcagatatactcaacaaagctgttagaaacaaggagtggaattagaaaaattacccaagtagtattcaaatacctaattatttgcttgaaagcactgaaggccaactatggaactcagtggctccaccagagagaagtctggctaggtgctcaggtggcgtgtcctgaccattcagtggctgagccctgtgaaaacaggcattctgtaggtcttcggatgaggaacttgcagaagcagccgggtgctgccatcctaagctggttttccatatgggcttctctgtgagtgttaagaaaagctgtggtttgcctgtcagagtgagcgcccccactcagggtaaccacagtttctccatagagcaataggacagcaggagtgggctgggacgactcctaccttagcagctgctggggtagaatgcagcctggtttcagaactgaatttctctttcttcttaaaggtgaaatcttgtgctgagtgggtgtctctctcaaaggccaggattgtagaatatgagaaagaggtaaggatgatgggtagccgttgcctataatatgggttctctctttcatgaccacacatctttcacctggtggcaggaacctgccttggatattctgctttccgtctctgtttacattaactaaacacattccccctctttccagatggagaagatgaagaacttaattccatttgatcagatgaccattgaggacttgaatgaagctttcccagaaaccaaattagacaagaaaaagtatccctattggcctcaccaaccaattgagaatttataaaattgagtccaggaggaagctctggcccttgtattacacattctggacattaaaaataataattataca

SEQ ID NO: 96836 - DNA, 231 bp, Homo sapiens
ctcgataaggccaagatccaggataaagagatggagaagatgaagaacttaattccatttgatcagatgaccattgaggacttgaatgaagctttcccagaaaccaaattagacaagaaaaagtatccctattggcctcaccaaccaattgagaatttataaaattgagtccaggaggaagctctggcccttgtattacacattctggacattaaaaataataattataca

SEQ ID NO: 96837 - DNA, 293 bp, Homo sapiens
tttgcagagatcataccccagaaccaaaaggccattgctagttccctgaaatcctggaatgagaccctcacctccaggtcagtatgtttctgagagggaaccccatacttgccactgaatctagaaacaaaacagtattaaggaattacatatgaattcttgatgcccttatgacaacatataaagaaatccttgcattttcatgatgatcttaggagaggaaagtgtggtgaccctccaggccataggaagaagggataggaaaattaccatgtgaattttctactgcttat

SEQ ID NO: 96838 - DNA, 792 bp, Homo sapiens
cagaatttctttacaattcaaggtgctaagaggccattttttggtcatcaagtccagctgtccttttcagatgaagaaaatgaagcttatcatcataaagaattgtccagggttccgagttagtgatagggctgagaagacccttgagctcctgttcccagtctaatattctttctactccagtattgagatgcgtattcgtttccgcttgggacacagaatgtctttcagtatgacctttaaggattcgtagcttccagccctttgagctcctgggtgtattggcgacgactcactgtccttgtgtttgtagtttaatgcgctgaaggttcccgtgcccttgtgtttgtagtttaatgcgctgaaggttcccgtgccagaggataaatatactgcccaggtggatgccgaagaaaaagaagatgtaagtagttgaggctcctgcttattctaaaattctcttgatcttgacagctctctattatagctaagttaagttagagtgaattaaatggaagagttaacagccatataaaggaatgacttgtcaataaatgcaacaacatggacgaatttcaaaataattatgcggagtgaaagaagccaacaagaaaaagaagagtatagcatatgattccatctttgtaagactctagaaaatgtagtttgtctacagtggctgcctggggatggttgagaggggactgctggtttcacaggtggatacctatatcaaaacttatcaaatggtgttctttaaatatgtgcattttatcatatttcagatatact

SEQ ID NO: 96839 - DNA, 639 bp, Homo sapiens
ggctgaggaaagatcttcccgtgacccacttccgttacttgctgcggaggaccgtgggcagccaggtcggtgaaggatcccaaaatggctgggcgaaaacttgctctaaaaaccattgactgggtagcttttgcagagatcataccccagaaccaaaaggccattgctagttccctgaaatcctggaatgagaccctcacctccaggttggctgctttacctgagaatccaccagctatcgactgggcttactacaaggccaatgtggccaaggctggcttggtggatgactttgagaagaagtttaatgcgctgaaggttcccgtgccagaggataaatatactgcccaggtggatgccgaagaaaaagaagatgtgaaatcttgtgctgagtgggtgtctctctcaaaggccaggattgtagaatatgagaaagagatggagaagatgaagaacttaattccatttgatcagatgaccattgaggacttgaatgaagctttcccagaaaccaaattagacaagaaaaagtatccctattggcctcaccaaccaattgagaatttataaaattgagtccaggaggaagctctggcccttgtattacacattctggacattaaaaataataattataca

SEQ ID NO: 96840 - DNA, 728 bp, Homo sapiens
atttcagatatactcaacaaagctgttagaaacaaggagtggaattagaaaaattacccaagtagtattcaaatacctaattatttgcttgaaagcactgaaggccaactatggaactcagtggctccaccagagagaagtctggctaggtgctcaggtggcgtgtcctgaccattcagtggctgagccctgtgaaaacaggcattctgtaggtcttcggatgaggaacttgcagaagcagccgggtgctgccatcctaagctggttttccatatgggcttctctgtgagtgttaagaaaagctgtggtttgcctgtcagagtgagcgcccccactcagggtaaccacagtttctccatagagcaataggacagcaggagtgggctgggacgactcctaccttagcagctgctggggtagaatgcagcctggtttcagaactgaatttctctttcttcttaaaggtgaaatcttgtgctgagtgggtgtctctctcaaaggccaggattgtagaatatgagaaagagatggagaagatgaagaacttaattccatttgatcagatgaccattgaggacttgaatgaagctttcccagaaaccaaattagacaagaaaaagtatccctattggcctcaccaaccaattgagaatttataaaattgagtccaggaggaagctctggcccttgtattacacattctggacattaaaaataataattataca

SEQ ID NO: 96841 - DNA, 567 bp, Homo sapiens
ggctgaggaaagatcttcccgtgacccacttccgttacttgctgcggaggaccgtgggcagccaggtcggtgaaggatcccaaaatggctgggcgaaaacttgctctaaaaaccattgactgggtagcttttgcagagatcataccccagaaccaaaaggccattgctagttccctgaaatcctggaatgagaccctcacctccaggttggctgctttacctgagaatccaccagctatcgactgggcttactacaaggccaatgtggccaaggctggcttggtggatgactttgagaagaaggtgaaatcttgtgctgagtgggtgtctctctcaaaggccaggattgtagaatatgagaaagagatggagaagatgaagaacttaattccatttgatcagatgaccattgaggacttgaatgaagctttcccagaaaccaaattagacaagaaaaagtatccctattggcctcaccaaccaattgagaatttataaaattgagtccaggaggaagctctggcccttgtattacacattctggacattaaaaataataattataca

SEQ ID NO: 96842 - DNA, 634 bp, Homo sapiens
  misc_feature (18)..(18): n is a, c, g, or t
  misc_feature (29)..(29): n is a, c, g, or t
ggtcgatacggctgcganaacacgacagnagggggctgcggaggaccgtgggcagccagggtcggtgaaggatcccaaaatggctgggcgaaaacttgctctaaaaaccattgactgggtagcttttgcagagatcataccccagaaccaaaaggccattgctagttccctgaaatcctggaatgagaccctcacctccaggttggctgctttacctgagaatccaccagctatcgactgggcttactacaaggccaatgtggccaaggctggcttggtggatgactttgagaagaagtttaatgcgctgaaggttcccgtgccagaggataaatatactgcccaggtggatgccgaagaaaaagaagatgtgaaatcttgtgctgagtgggtgtctctctcaaaggccaggattgtagaatatgagaaagagatggagaagatgaagaacttaattccatttgatcagatgaccattgaggacttgaatgaagctttcccagaaaccaaattagacaagaaaaagtatccctattggcctcaccaaccaattgagaatttataaaattgagtccaggaggaagctctggcccttgtattacacattctggacattaaaaataataattataca

SEQ ID NO: 96843 - DNA, 509 bp, Homo sapiens
ggatcccctgaacattcgtgtcccaaaaggccattgctagttccctgaaatcctggaatgagaccctcacctccaggttggctgctttacctgagaatccaccagctatcgactgggcttactacaaggccaatgtggccaaggctggcttggtggatgactttgagaagaagtttaatgcgctgaaggttcccgtgccagaggataaatatactgcccaggtggatgccgaagaaaaagaagatgtgaaatcttgtgctgagtgggtgtctctctcaaaggccaggattgtagaatatgagaaagagatggagaagatgaagaacttaattccatttgatcagatgaccattgaggacttgaatgaagctttcccagaaaccaaattagacaagaaaaagtatccctattggcctcaccaaccaattgagaatttataaaattgagtccaggaggaagctctggcccttgtattacacattctggacattaaaaataataattataca

SEQ ID NO: 96844 - DNA, 1137 bp, Homo sapiens
ctgtcgtttcacgatgggctgaggggtggggggtttccaacacttgctgcggaggaccgtgggcagccagggtcggtgaaggatcccaaaatggctgggcgaaaacttgctctaaaaaccattgactgggtagcttttgcagagatcataccccagaaccaaaaggccattgctagttccctgaaatcctggaatgagaccctcacctccaggttggctgctttacctgagaatccaccagctatcgactgggcttactacaaggccaatgtggccaaggctggcttggtggatgactttgagaagaagtttaatgcgctgaaggttcccgtgccagaggataaatatactgcccaggtggatgccgaagaaaaagaagatgtgaaatcttgtgctgagtgggtgtctctctcaaaggccaggattgtagaatatgagaaagagatggagaagatgaagaacttaattccatttgatcagatgaccattgaggacttgaatgaagctttcccagaaaccaaattagacaagaaaaagtatccctattggcctcaccaaccaattgagaatttataaaattgagtccaggaggaagctctggcccttgtattacacattctggacattaaaaataataattatacaaaaaagaaaacagaaaaacaaaaaaaaaaaagcgtgtgtgtgggccggcccgcgggcccccggaagaaggcttcccagaaacccctcgcggtggggcggcgcgggggccccgggtgggtcaaggcggaacacgggggcccaagaggcggtgtccccgagagggacaactcgggggccacgagaacaaagggggggggagatccccacccaaataaaaaagagcccgggggggcaacacgggagggtttcgtgaaaacaacctccgagaaggggagaaacgcggagaggcaccaacacgagggggcactttcactaacaaggggggggggctccaaaggagagacgccccgagaatatctaacaattataagcgcccccggagttcgggggggaggaaaaaaaagtggagatgcagggacgaaaaacacaacaaaaaacaaagacaaaagaacaacacaaagagaaagaacaaaaaaaacaaacaacgaggga

SEQ ID NO: 96845 - DNA, 637 bp, Homo sapiens
ctgtcgtttcacgatgggctgaggggtggggggtttccaacacttgctgcggaggaccgtgggcagccagggtcggtgaaggatcccaaaatggctgggcgaaaacttgctctaaaaaccattgactgggtagcttttgcagagatcataccccagaaccaaaaggccattgctagttccctgaaatcctggaatgagaccctcacctccaggttggctgctttacctgagaatccaccagctatcgactgggcttactacaaggccaatgtggccaaggctggcttggtggatgactttgagaagaagtttaatgcgctgaaggttcccgtgccagaggataaatatactgcccaggtggatgccgaagaaaaagaagatgtgaaatcttgtgctgagtgggtgtctctctcaaaggccaggattgtagaatatgagaaagagatggagaagatgaagaacttaattccatttgatcagatgaccattgaggacttgaatgaagctttcccagaaaccaaattagacaagaaaaagtatccctattggcctcaccaaccaattgagaatttataaaattgagtccaggaggaagctctggctatcgagggtaccgagctcgagtcggatcatgtca

SEQ ID NO: 96846 - DNA, 291 bp, Homo sapiens
gcagagcaggggtaggaggaaaatgaaaggaaggcaggaaaagaggcaggagagggtggaaagggctggcctattccattggtaaacacctccagttatttgaaaatgtgttcttatgttgagtcaaaaatctacctccaggtaactttccaaataatttacttaggagccatgctgaacaaaccagctttctctgggccacaacacttcttaagatatttgcatgatagcacatcttcacttcatctcttctctgagcagggattctaaaagggtggtctccaatcagca

SEQ ID NO: 96847 - DNA, 429 bp, Homo sapiens
gtggagtggccttagtaggggtgaccattcacagaaataattatgaaatgtttgctaggaaaagtttctgattagcaaatttctaggaaaataacgtttcctcctcaatgtgcttgctaataaaagggtacactttggcatcaagcagacgcagtattcaaatcctggctctgccacttaaaagctggatgataccccacctctgcccccagcctcaatttcctcatttgagctataggtataataatctccacttcacagagtccttatgaagattaaagatgatccattcaaagtgcctggtacactgtaccagtggtactggtggcaccagtatgtggcacatgaagaaggtactcaagaaatgtggtttcctttccccccaggtggactgcaggaatataagctgaattgctgctaagtagttca

SEQ ID NO: 96848 - DNA, 152 bp, Homo sapiens
tctgccttggcctccaaagtgctcggattagaggcgtgagccattgtgcttggctgagtcctctgagacagtgaaactatctgaggctctagaggcgatgccgttcaaagtcatgccacttgttggtggtgtggactgatgtgaatatccag

SEQ ID NO: 96849 - DNA, 378 bp, Homo sapiens
accactttgtgagaacaaggcttccagattctgttaaactaaggggcaattaaaaatgaaaaatagaacattagagattttaagaatgtgggatttagaacagttaatataacaaatttgataagaaattagaaaaactaaaattattaaattgtactaatgtgtttggtatgggttaatcctaaaacttgagattttccttggatgttggattgtttctgaaaagatttaattttctttttaaaattatattgtgatgcatgaagagttttaaaaacttttattttttatgcttgtgaaaatcataaacgacacaaaagcatatctactcttagtgtaaatgttgcttatgtcagagctatgtagaatgaactgttg

SEQ ID NO: 96850 - DNA, 470 bp, Homo sapiens
ccctatctggaacagtttggggcagtcccttgtggaaactcccccgccaccacttttgaggcaactccagctgtgggttcagccagtaagaatagcagtatagtattaaaatcctgtgatggccaggaagcagccttattgataaagataaaaactcaacggtgccatagactttttgcagtgtttctgaaaggttttccattaggaaaataccttgtgcctacaaaaacagtatgtaaaatagactgatattatttaattagatatagaaatacctgttttcttatcagatgaaagtatgatggaaaagaacaggttaaaaacactctaatatggcttgaaaaaactaactcaaagttacatgaatccgcagtctcttcaacaaaacataatatttatttatatactggatagacacagcctagaaaggatttcttaaaaagcacagaatagtcctctgtgaagattta

SEQ ID NO: 96851 - DNA, 429 bp, Homo sapiens
caagggtgggaaaaaaagaaaggcaaggctggggtctgactcaggagaccaacaggctggaaggtgatttcagagggagaaggcctgtaagtgtgagcccacccttctcaagaatgcctgccaagaaattcttacttcccaaggcttaggggttagcttctcaatttccaatgcacccccctcccctctgcaacttgatccaataagcctgtaagtgctaagatggcactggaagagagaagcaatgaatgggtgggaaactttaaaaagaaccttcccagtcctagtgctccaccctggcctcaaagtcctgaagcctgatctgaaagagctggtgacagatttatcatttatttggggcaggacctagagaaagtggagagatcagtgaaacactagctctgggcgtcaattcttgtcaccaccttc

SEQ ID NO: 96852 - DNA, 977 bp, Homo sapiens
ctcttagttcactgattccactaatttctgaagcatcttttaagctacctcttgatttcctcatcacaaaatttagtctctcttcccatgagatcaaagttagaaaaagtgcctatatttttaccatttcaaaataaaatgtagacttaaaaatttcaaccaactttgagaaactatagacagagtttttatatagaaggaccccaaaacaacaaattttgtccaggatcgctcagtacaaatgctaacctgaaacttgtatttcagaacttccattctcctaaagggcagagtcactggaccagtatgtgttatatgtattttggctctttacatttactctttagttccatcttaatacacacaagcacgcgtgcacacaaacacacacacacattcacacatttatttaaaaccttaacattttaatagttacttctaaagtgtgtcaacttaatctcactctgagtgtgacagggagttagtgcctatgtgaatatattttttcatcacattcagtttttgctattgagggaaaattatctttccatctcatgtagtgcaaacttaaatcttaaatcatttaaatatgttttatttttccaaagcttacatttctgcattacaaatggtgtccattgattggaagtcaagctcactagcattcactgcatgagctatgcatgagcatgttaaggccaccatgttctgcctggcaaaataaatactttatcattttcctaagtgttggataattccctgacctttaaaaaggactttggagaacagattttcctctaaataatgtattaatagaccaacaagtaatttttttaaaataataatcatgaagtttaacatacttcaagctatctttacaactctgaaggttatctttgggtttctgttattcccatagaataagttgaaccaaaatttgtaattgtcttgctgtcactcaaaagaaatagatatgt

SEQ ID NO: 96853 - DNA, 165 bp, Homo sapiens
ctgttttcagttcttttatgtatatatctagcagggtaattgctggattatatggtaattctgtgtttaacttaataaggaactgacatactgttttcaacagcgattgcaccattttacattcctatcagctatataccagggttacagtttctctacatcttt

SEQ ID NO: 96854 - DNA, 720 bp, Homo sapiens
acagatatttaataaggaaatattccttcctgttcccactttcagggaggcctcttaagacatgaagaggaccaaaataacaattgcagtataacttcacatggtggggtggggggtgtggagttcaaatgtggttgatcaaaatagtgttgttactttcgtttagacttgattccaacatgtaaaaaaatcaggcactttagtgggagtgattttaacttcagtagtgaaagggcaatgcaattaagagttagggtagtgtttctcaaacttcatcctcagaggtgctttagaaattgactacctttggtttgaatttatttttagaaatatatcttcttttcagtatttttaaaactgtaaaaggtaaaccatgttttctcaaatgtgttaaatggaattttaactcattatgtttcaagttttaaccagtgtgttgactttataagaagtttataatattaacttaaactttaaaaggtggtatgcacttatacctttaaggtattggggtttcacataatttttcctttgacgggggagtgttttgctgctcaacagaaaaggtctgaagtctactgtgtatgctagggttattatgatattgtaggaccatttaggaaatgaggaactggcttctttagcatcagcaagacttagaacacctgcatatctttgcttaggctattctggcctggccctgggagaggggaccttgtg

SEQ ID NO: 96855 - DNA, 282 bp, Homo sapiens
gaacctccactatatccttgattttgatctccattccatttctcttatcattgttaaccacagccctgtaagaccagtaataaatttctgtctactgatgattctattgaattgaaatgcagagccaatggcatctttcagaaaaggtaacctgaatttcagaaccagataataagagaattctcctttaccagtaagatatgtttttcctgcttaggacaaacccattacttgtcactttggatatactttatttcatcaaatctaagacattactcattt

SEQ ID NO: 96856 - DNA, 781 bp, Homo sapiens
attcctctcccctccccatccactctagttagagggatgtggactagaatgggaataaggacgcagactccagagcagactgcctgcatgaactccaggtccccaccagccagttctaaactaaaagttcagatattctgaaccatggaacaaacatgatgtggcctgctgaagtagaaatgtggacttttgggatgtgagaccgaaatcactcatagataagggtccttcctaaatctacagagtgggcaacaaacctaattcacttgttaaaataatcattgagatggaaattgcaaacgttctgactctggagagacagagggtgactggcaggcaaaggagaaatctcaggcttcagtaatgagaatttttcatgagtcgcctaatcaagctcatgagacctggagagtctatgaggaaagggttcagtgatagagaaagccggagatgatgaggctgggagagtaagcttctcttaccattgttctctattctccctactcccatattcttccagtgggacaaagtgccccaaagtataagtcagtgtgtcccaaggggtctggagtttaggtacctgaacatggaagagggccttgctaaactggtttgacctttctctcatccccagcaaagttctgaatgcgggttctgactctgagctgaaggcatacttcatgaagtttcctgctgccctttcactacacagctggacttggaggcaaacttggagataaaaatatagttcccgtgctatcccttataaagatttaagaga

SEQ ID NO: 96857 - DNA, 610 bp, Homo sapiens
ttttccattggataaagtggttgtagtttttgtgtggatttttatgtgtcataagttgatgtttttaataatctatacaatttaacatcatatgctcagtttttgtaaacatatatacattataactagttaccaaattaattttataaagtcatatttcctctagggcccactaactagtaaacattggagccagaattctatctcagcaatgagtaactacaaaactggagtgggttttttccctataccatgctttcttgttaatgtttgatatgttaggactacagaggttatataaaaaatataaacaaacattgtggtgtaacgtaagaatagctactgttatttatgtacttaattaggataaaatatatttctttggaagaaacaaatgggtgtttgtttttattacagctagatttaaatagttttctttgaaatgttggtaaatgtatttattcaggaacctcaggcactatatgatgaagtaagaactgtgccaattgcaaagctggataggacagttgctgagaaagctgttaaaaaatatgtagaagatgaaatggcaaggtaagtcacacttcaagatgcatgacaaaaataagaa

SEQ ID NO: 96858 - DNA, 303 bp, Homo sapiens
gacacttcccctcttttatggaagcatagtaagattttttctttatggcgatcatgatggagaagtatatgctacaggaggagaggttcaaattgcaatggaacctcaggcactatatgatgaagtaagaactgtgccaattgcaaagctggataggacagttgctgagaaagctgttaaaaaatatgtagaagatgaaatggcaaggctccctgatagattgtcagtaacttggcctgaaggagatgaattattgcctaatgaggttaggcctgctggaacccctattggtatgtttgttta

SEQ ID NO: 96859 - DNA, 386 bp, Homo sapiens
tcctaggaagggagttttgcaatatatctattcatctgctcctgactagtgcattaaagagagctcttcttcaatcttgtcttcccacaaatgaagtagcactttgttctcctagagaagctctttttatggaactgcattaatcacctacataaacccacctcctcgtgcatcccaatgcttatgttcctcctttctgaagctctccccagttggcaatgaaaggaagtgcagacaatgagctgtggcttcttgaagggcagaggcagactcctcagtcaccctctgatgaatgattacaagaactcattgtgcaaggcaatgaagaacatttatgttgatacaatacctgggctttaaaatgccttccgatgacataacaccag

SEQ ID NO: 96860 - DNA, 589 bp, Homo sapiens
aggaaaaagaaattgaaacagagtcatcatactgacatgacaggcgttataacagagggatttgaaccctaaactgtggtaggatttagactgctcgggtttgaatagcaactgtaccttgcatgagccaggcaagagtcttaggttgagttcctccagacacaggtcatgagcaaggattggaaaggaggtgatttactggggaatgtgcttccaagaagaaaagtgaaggagtagggaagcaagccagggaaggggaagaagccagctcaggctgatccttggagagtcctggagcatggctcacacttcaacctctccctccttgaggccaacgatctgggtgcttgtgttcctacaccagttccttctgtcactggcaaggggggagagggacacaaactcccagagcctttccactctccccccagtgaggggtaatgtgcagaagtttccagagaaagcatttgcagccaagcccacaggggtctgagcatgcagagctggaaaagaggacccaggggggatctgggcagggcatacctggcagtataatagggatcataaatggtctaccttatatagtgtg

SEQ ID NO: 96861 - DNA, 396 bp, Homo sapiens
gtggctatactaagagtttaaaagaaatcatttatgtggctagacatactgacttctgtagcagagaatagatagggagcagtggctctcattagctttggagatgataataaaactggaaaagatcagaaaagtggaaaatgatctttgcatctgagtgcactgattcatgatgtggaaagataaaagaaagtcctattttttttaatagtccttaaaacgcaaatggaaaagtaaaaaatctgcagaaagtgagccagcttttctttccttttgatagaacgaagaacattccagtggaaggtgtagaaatacatggctaatttcctgtggactaatttagctttctatggaaatgaggaaagtaaataaatcaggatcaaataattcaacatg

SEQ ID NO: 96862 - DNA, 452 bp, Homo sapiens
caggagccaaggcactgctctttcaccccgagaaccctgggactcacccgtgcttctctcccagtatcagattcgttctctgtggcagtggttgggcttcctccacttccctgctcttagggtctaaactggcagtgtcacgtcgtgagcatacctctgccttcaagttcaaatgcagacagacacaagtctctgtttaaattcctgaggaagaatttggttggcccaatgtggtcagctgtctacccaagtccaatgaactctgctcatgggaatggggctggggaataaatgtggcttagagggctgacgtgagatcccagagtctggaagctatttcaaggttctggaaatagtctagtagggctacaaaactcagagcaagccatagggtccggacagtaccctatttcctttatttctaattattttctgctctgccttttgaggga

SEQ ID NO: 96863 - DNA, 449 bp, Homo sapiens
ggcgtggtgggaggctgaggcaggagaatcacttgaacctgggaggtggaggttgcagtgagctgagatcgtgccactgcactccatcctgggcaacagagcaagactccatatatatttgggcccatttcatgctgcaaatcttaattacgtctgacaatttacctaaatattccaacagcaaaattcaactgaattacaataccacatacctatcagaactctgtgactcagagttcagaactctcaaaaggctttgtggtttctggcagcaatgacaggagctcactctgggattgcctctcacggattcttaacactttttttttttgccatggaaaccttatgcagtccaatgaaagctatttcagataacgtttttgaataaaacacataagattactaaggaaatcaatcacactgaaagcagttctatccctgaccttaaa

SEQ ID NO: 96864 - DNA, 541 bp, Homo sapiens
gcccaggctggagtgcaatggcgtgatctcagctcattgcaacctccgcctcctgggttcaagcaattctcctgcctcagtctcccgagtagctgggactacaggtgcacgccaccatgcctggctaatttttgtatttttagtagagacggggtttcaccatgttggccaggctggtctcgagctcctgacctcaagcgatcctcccatctcagcctcacaaagtgctgggattacaggcatgagccaccatgcctatcccgatgttgtgattctgttatccccatttaacagacaagaaagtacaaagtggggaagtcctttatccaagaattctggaagccaggcaggcttgtgccacactgatgttcatcaagcctgggcacatttaacccctcctgccctccatgcacctgtggctccagcaaaagggctgtggcccctcctccatggattagaacctgtggctgagccacaatccagcacggaggataacagcaaggatgggtgtgcattcagggtcttcctctgcctacggtct

SEQ ID NO: 96865 - DNA, 1706 bp, Homo sapiens
gggaaggcatttgagccattttggggtgtatagatgtagtaagacgatgggttccgtagtggggagaggtgactagacttcgaggtgctaagtgtaggaacaggatggaaaagccctagtgaaatgtggggaattgggttagtggggctctggggaggtacctagagaggaagtgagggaggccacggaatatgaagatggggaggccctgcggcatgtagtggggacggagggccaggaggccgatacgggggccggtgggggggtagggggcggcaaagggaggggaagtaaactgaactggggctgggcaacaggaaaaaagaagaaaccacagattagagaaatctcggcggtcaggaggcccggggtctaagatgtaaagaggtaaacagatttagggattgattgtctgctggggtgggttgagaggagaaaagggaagaaaagtcgggggactacgtcctcagacctgacctgagtggtgagaggtggacccaggaggagtggcaggtggtggcggggttttgcagagctcagttggaggccctctccgaggcagcttgatggaacgtgggagagccgggctggagtcacagtttttattttgctagggaggtagtcagtggcgcacaaagggtaacaagcagtgatagtggggatgctttccattttaggaaacttttcctaaaaggaagtggcaattttaactaatctcccctccgccgctcccagctgccactccagatgctgctgctgccgccgcggccaccccaccctcggtcctcctctccggaggccatggacccaccgccccccaaggctccccctttccccaaggcggaaggcccctcctccactccttcctcggcggcggggccccgacccccgcggctgggccgccacctcctcatcgacgccaatggggtcccctacacatacacggtgcagctggaggaggagccccggggcccgccccagcgcgaggcgcccccaggagagcccggccctcgcaagggctacagctgcccggagtgcgcccgtgtctttgccagccctctgcggctgcagagccaccgcgtgtcgcactcggacctcaagcccttcacgtgcggcgcctgcggcaaggccttcaagcgctccagccacctgtcgcggcatcgcgccacgcaccgcgcccgcgccgggccgccgcacacctgcccgctctgcccacgccgcttccaggacgccgcggagctggcgcagcacgtgcgcctccactaagctcgagacccggcctgtgctgccctgcccgtctcagggccaccaagtctgacccacacagcgtcactcactcccacacacaccccctggctctgctgaggttactgccttaccctgggcctcagccccaccttccaaagggaggagcatcattccttccttaccccctttctagctgtgtgatgtagaccaaagtcgttgcccctccctgggcctgggaaccagtcggaactgggttccagtccagctgtgctgtgtgagcctgtgcaagtgacatgacctctctaaaccttggttttctgctctctggagcggtgaaccggtggttgtctgcggggaagagatgataaagagcacgggcacggtctggttcatttctgtatctaccccccttccgcccacgcccccgaccctttgctcaataaacattccgcactcca

SEQ ID NO: 96866 - DNA, 1220 bp, Homo sapiens
  misc_feature (2)..(2): n is a, c, g, or t
  misc_feature (4)..(4): n is a, c, g, or t
  misc_feature (6)..(6): n is a, c, g, or t
cnangngtgggagcgccggctccaggcggcggaacctccgcactgggctcgcgcgcttccggccggcgccttttcccagggactccgccaacccctcgcacccccgcgcccccagtccccgcgtccccggcgccgccggcccggagctgcccggaagtctcggttccgccgccggcgctcgccaggggaagcccggggccgcccgggacctcggcccgttcctccggacccgagaggccgccgcacgggctgccactccagatgctgctgctgccgccgcggccaccccaccctcggtcctcctctccggaggccatggacccaccgccccccaaggctccccctttccccaaggcggaaggcccctcctccactccttcctcggcggcggggccccgacccccgcggctgggccgccacctcctcatcgacgccaatggggtcccctacacatacacggtgcagctggaggaggagccccggggcccgccccagcgcgaggcgcccccaggagagcccggccctcgcaagggctacagctgcccggagtgcgcccgtgtctttgccagccctctgcggctgcagagccaccgcgtgtcgcactcggacctcaagcccttcacgtgcggcgcctgcggcaaggccttcaagcgctccagccacctgtcgcggcatcgcgccacgcaccgcgcccgcgccgggccgccgcacacctgcccgctctgcccacgccgcttccaggacgccgcggagctggcgcagcacgtgcgcctccactaagctcgagacccggcctgtgctgccctgcccgtctcagggccaccaagtctgacccacacagcgtcactcactcccacacacaccccctggctctgctgaggttactgccttaccctgggcctcagccccaccttccaaagggaggagcatcattccttccttaccccctttctagctgtgtgatgtagaccaaagtcgttgcccctccctgggcctgggaaccagtcggaactgggttccagtccagctgtgctgtgtgagcctgtgcaagtgacatgacctctctaaaccttggttttctgctctctggagcggtgaaccggtggttgtctgcggggaagagatgataaagagcacgggcacggtctggttcatttctgtatctaccccccttccgcccacgcccccgaccctttgctcaataaacattccgcactcca

SEQ ID NO: 96867 - DNA, 351 bp, Homo sapiens
tcggtacccggtgtttatcgatgccaccacctgacctgagtggtgagaggtggacccaggaggagtggcaggtggtggcggggttttgcagagctcagttggaggccctctccgaggcagcttgatggaacgtgggagagccgggctggagtcacagtttttattttgctagggaggtagtcagtggcgcacaaagggtaacaagcagtgatagtggggatgctttccattttaggaaacttttcctaaaaggaagtggcatcgataaacaccaggtggcatcgataaacaccaggtggcatcgataaacaccaggtggcatcgataaacacaggtggcaatcgataaaca

SEQ ID NO: 96868 - DNA, 1726 bp, Homo sapiens
  misc_feature (2)..(2): n is a, c, g, or t
  misc_feature (4)..(4): n is a, c, g, or t
  misc_feature (6)..(6): n is a, c, g, or t
cnangngtgggagcgccggctccaggcggcggaacctccgcactgggctcgcgcgcttccggccggcgccttttcccagggactccgccaacccctcgcacccccgcgcccccagtccccgcgtccccggcgccgccggcccggagctgcccggaagtctcggttccgccgccggcgctcgccaggggaagcccggggccgcccgggacctcggcccgttcctccggacccgagaggccgccgcacgggctgccactccagatgctgctgctgccgccgcggccaccccaccctcggtcctcctctccggaggccatggacccaccgccccccaaggctccccctttccccaaggcggaaggcccctcctccactccttcctcggcggcggggccccgacccccgcggctgggccgccacctcctcatcgacgccaatggggtcccctacacatacacggtgcagctggaggaggagccccggggcccgccccagcgcgaggcgcccccaggagagcccggccctcgcaagggctacagctgcccggagtgcgcccgtgtctttgccagccctctgcggctgcagagccaccgcgtgtcgcactcggacctcaagcccttcacgtgcggcgcctgcggcaaggccttcaagcgctccagccacctgtcgcggcatcgcgccacgcaccgcgcccgcgccgggccgccgcacacctgcccgctctgcccacgccgcttccaggacgccgcggagctggcgcagcacgtgcgcctccactaagctcgagacccggcctgtgctgccctgcccgtctcagggccaccaagtctgacccacacagcgtcactcactcccacacacaccccctggctctgctgaggttactgccttaccctgggcctcagccccaccttccaaagggaggagcatcattccttccttaccccctttctagctgtgtgatgtagaccaaagtcgttgcccctccctgggcctgggaaccagtcggaactgggttccagtccagctgtgctgtgtgagcctgtgcaagtgacatgacctctctaaaccttggttttctgctctctggagcggtgaaccggtggttgtctgcggggaagagatgataaagagcacgggcacggtctggttcatttctgtatctaccccccttccgcccacgcccccgaccctttgctcaataaacattccgcactccaaaaaaaaaaaaacaaaaacaaaaaaaacaactttggcgggcggcatcagggaccaagcagaaacgctccaaagcccaaagcgtacgcgcgacgcagaccccaacgacacaggcacactgggacaatacgggtacccaaggaaactcgcgcaagaaaagggcgcgcattcacccaaaaacaaacgcgcggggacacagcgagtgtttcgaaaacaaaccagagaggagaccggggggcacaaacgggggaatacaacacggggggccaacggaggcgcaataaaatagccccccgcgcggaaacagagagaacaagcacaacacaaacaacacacaaacacgaccgacgaggaacagagcaagcaccgaggacgaacacgaccgaaaaagcaaagcaaaggggccggaagaaaacggggagaagacagagcgaacagacacgaagcgaacgggagagaagagcaacgcgcagacacgacgaacgagaggaaagaaaagaggaagaaa

SEQ ID NO: 96869 - DNA, 2175 bp, Homo sapiens
gggaaggcatttgagccattttggggtgtatagatgtagtaagacgatgggttccgtagtggggagaggtgactagacttcgaggtgctaagtgtaggaacaggatggaaaagccctagtgaaatgtggggaattgggttagtggggctctggggaggtacctagagaggaagtgagggaggccacggaatatgaagatggggaggccctgcggcatgtagtgggggggtagggggcggcaaagggaggggaagtaaactgaactggggctgggcaacaggaaaaaagaagaaaccacagattagagaaatctcggcggtcaggaggcccggggtctaagatgtaaagaggtaaacagatttagggattgattgtctgctggggtgggttgagaggagaaaagggaagaaaagtcgggggactacgtcctcagacctgacctgagtggtgagaggtggacccaggaggagtggcaggtggtggcggggttttgcagagctcagttggaggccctctccgaggcagcttgatggaacgtgggagagccgggctggagtcacagtttttattttgctagggaggtagtcagtggcgcacaaagggtaacaagcagtgatagtggggatgctttccattttaggaaacttttcctaaaaggaagtggcaattttaactaatctcccctccgccgctcccagctgccactccagatgctgctgctgccgccgcggccaccccaccctcggtcctcctctccggaggccatggacccaccgccccccaaggctccccctttccccaaggcggaaggcccctcctccactccttcctcggcggcggggccccgacccccgcggctgggccgccacctcctcatcgacgccaatggggtcccctacacatacacggtgcagctggaggaggagccccggggcccgccccagcgcgaggcgcccccaggagagcccggccctcgcaagggctacagctgcccggagtgcgcccgtgtctttgccagccctctgcggctgcagagccaccgcgtgtcgcactcggacctcaagcccttcacgtgcggcgcctgcggcaaggccttcaagcgctccagccacctgtcgcggcatcgcgccacgcaccgcgcccgcgccgggccgccgcacacctgcccgctctgcccacgccgcttccaggacgccgcggagctggcgcagcacgtgcgcctccactaagctcgagacccggcctgtgctgccctgcccgtctcagggccaccaagtctgacccacacagcgtcactcactcccacacacaccccctggctctgctgaggttactgccttaccctgggcctcagccccaccttccaaagggaggagcatcattccttccttaccccctttctagctgtgtgatgtagaccaaagtcgttgcccctccctgggcctgggaaccagtcggaactgggttccagtccagctgtgctgtgtgagcctgtgcaagtgacatgacctctctaaaccttggttttctgctctctggagcggtgaaccggtggttgtctgcggggaagagatgataaagagcacgggcacggtctggttcatttctgtatctaccccccttccgcccacgcccccgaccctttgctcaataaacattccgcactccaaaaaaaaaaaaacaaaaacaaaaaaaacaactttggcgggcggcatcagggaccaagcagaaacgctccaaagcccaaagcgtacgcgcgacgcagaccccaacgacacaggcacactgggacaatacgggtacccaaggaaactcgcgcaagaaaagggcgcgcattcacccaaaaacaaacgcgcggggacacagcgagtgtttcgaaaacaaaccagagaggagaccggggggcacaaacgggggaatacaacacggggggccaacggaggcgcaataaaatagccccccgcgcggaaacagagagaacaagcacaacacaaacaacacacaaacacgaccgacgaggaacagagcaagcaccgaggacgaacacgaccgaaaaagcaaagcaaaggggccggaagaaaacggggagaagacagagcgaacagacacgaagcgaacgggagagaagagcaacgcgcagacacgacgaacgagaggaaagaaaagaggaagaaa

SEQ ID NO: 96870 - DNA, 1659 bp, Homo sapiens
ggctggtacccggccgagttttttggatgccgggctggagtcacagtttttattttgctagggaggtagtcagtggcgcacaaagggtaacaagcagtgatagtggggatgctttccattttaggaaacttttcctaaaaggaagtggcaattttaactaatctcccctccgccgctcccagctgccactccagatgctgctgctgccgccgcggccaccccaccctcggtcctcctctccggaggccatggacccaccgccccccaaggctccccctttccccaaggcggaaggcccctcctccactccttcctcggcggcggggccccgacccccgcggctgggccgccacctcctcatcgacgccaatggggtcccctacacatacacggtgcagctggaggaggagccccggggcccgccccagcgcgaggcgcccccaggagagcccggccctcgcaagggctacagctgcccggagtgcgcccgtgtctttgccagccctctgcggctgcagagccaccgcgtgtcgcactcggacctcaagcccttcacgtgcggcgcctgcggcaaggccttcaagcgctccagccacctgtcgcggcatcgcgccacgcaccgcgcccgcgccgggccgccgcacacctgcccgctctgcccacgccgcttccaggacgccgcggagctggcgcagcacgtgcgcctccactaagctcgagacccggcctgtgctgccctgcccgtctcagggccaccaagtctgacccacacagcgtcactcactcccacacacaccccctggctctgctgaggttactgccttaccctgggcctcagccccaccttccaaagggaggagcatcattccttccttaccccctttctagctgtgtgatgtagaccaaagtcgttgcccctccctgggcctgggaaccagtcggaactgggttccagtccagctgtgctgtgtgagcctgtgcaagtgacatgacctctctaaaccttggttttctgctctctggagcggtgaaccggtggttgtctgcggggaagagatgataaagagcacgggcacggtctggttcatttctgtatctaccccccttccgcccacgcccccgaccctttgctcaataaacattccgcactccaaaaaaaaaaaaacaaaaacaaaaaaaacaactttggcgggcggcatcagggaccaagcagaaacgctccaaagcccaaagcgtacgcgcgacgcagaccccaacgacacaggcacactgggacaatacgggtacccaaggaaactcgcgcaagaaaagggcgcgcattcacccaaaaacaaacgcgcggggacacagcgagtgtttcgaaaacaaaccagagaggagaccggggggcacaaacgggggaatacaacacggggggccaacggaggcgcaataaaatagccccccgcgcggaaacagagagaacaagcacaacacaaacaacacacaaacacgaccgacgaggaacagagcaagcaccgaggacgaacacgaccgaaaaagcaaagcaaaggggccggaagaaaacggggagaagacagagcgaacagacacgaagcgaacgggagagaagagcaacgcgcagacacgacgaacgagaggaaagaaaagaggaagaaa

SEQ ID NO: 96871 - DNA, 1784 bp, Homo sapiens
  misc_feature (2)..(2): n is a, c, g, or t
  misc_feature (4)..(4): n is a, c, g, or t
  misc_feature (6)..(6): n is a, c, g, or t
cnangngtgggagcgccggctccaggcggcggaacctccgcactgggctcgcgcgcttccggccggcgccttttcccagggactccgccaacccctcgcacccccgcgcccccagtccccgcgtccccggcgccgccggcccggagctgcccggaagtctcggttccgccgccggcgctcgccaggggaagcccggggccgcccgggacctcggcccgttcctccggacccgagaggccgccgcacggggaaacttttcctaaaaggaagtggcaattttaactaatctcccctccgccgctcccagctgccactccagatgctgctgctgccgccgcggccaccccaccctcggtcctcctctccggaggccatggacccaccgccccccaaggctccccctttccccaaggcggaaggcccctcctccactccttcctcggcggcggggccccgacccccgcggctgggccgccacctcctcatcgacgccaatggggtcccctacacatacacggtgcagctggaggaggagccccggggcccgccccagcgcgaggcgcccccaggagagcccggccctcgcaagggctacagctgcccggagtgcgcccgtgtctttgccagccctctgcggctgcagagccaccgcgtgtcgcactcggacctcaagcccttcacgtgcggcgcctgcggcaaggccttcaagcgctccagccacctgtcgcggcatcgcgccacgcaccgcgcccgcgccgggccgccgcacacctgcccgctctgcccacgccgcttccaggacgccgcggagctggcgcagcacgtgcgcctccactaagctcgagacccggcctgtgctgccctgcccgtctcagggccaccaagtctgacccacacagcgtcactcactcccacacacaccccctggctctgctgaggttactgccttaccctgggcctcagccccaccttccaaagggaggagcatcattccttccttaccccctttctagctgtgtgatgtagaccaaagtcgttgcccctccctgggcctgggaaccagtcggaactgggttccagtccagctgtgctgtgtgagcctgtgcaagtgacatgacctctctaaaccttggttttctgctctctggagcggtgaaccggtggttgtctgcggggaagagatgataaagagcacgggcacggtctggttcatttctgtatctaccccccttccgcccacgcccccgaccctttgctcaataaacattccgcactccaaaaaaaaaaaaacaaaaacaaaaaaaacaactttggcgggcggcatcagggaccaagcagaaacgctccaaagcccaaagcgtacgcgcgacgcagaccccaacgacacaggcacactgggacaatacgggtacccaaggaaactcgcgcaagaaaagggcgcgcattcacccaaaaacaaacgcgcggggacacagcgagtgtttcgaaaacaaaccagagaggagaccggggggcacaaacgggggaatacaacacggggggccaacggaggcgcaataaaatagccccccgcgcggaaacagagagaacaagcacaacacaaacaacacacaaacacgaccgacgaggaacagagcaagcaccgaggacgaacacgaccgaaaaagcaaagcaaaggggccggaagaaaacggggagaagacagagcgaacagacacgaagcgaacgggagagaagagcaacgcgcagacacgacgaacgagaggaaagaaaagaggaagaaa

SEQ ID NO: 96872 - DNA, 386 bp, Homo sapiens
accatgactggggttaagatgataagagcacgggcacggctggttcatttctgtatctacccccccctcagccccaccttccaaagggaggagcatcattccttccttaccccctttctagctgtgtgatgtagaccaaagtcgttgcccctccctgggcctgggaaccagtcggaactgggttccagtccagctgtgctgtgtgagcctgtgcaagtgacatgacctctctaaaccttggttttctgctctctggagcggtgaaccggtggttgtctgcggggaagagatgataaagagcacgggcacggtctggttcatttctgtatctaccccccttccgcccacgcccccgaccctttgctcaataaacattccgcactcca

SEQ ID NO: 96873 - DNA, 252 bp, Homo sapiens
gagaactagtctcgaaaaaaaaaaaaaaaaaatcacacaactagaaaatgctggagccatgatctattctgattttgattccaggtctgattctatagcctgtgttcttacccattagaccacactgcctatgtgaaatacagctttcaatgtggccctgaggggttaaacatgacgatagacgaagtgcttagcccagttgcctgccatgccattagtcctcattagatgctgattgcgaaagaaagaagc

SEQ ID NO: 96874 - DNA, 416 bp, Homo sapiens
cttcattttcttctaatttcactgaaatatagtcttccttcttctgaaacaaaaatcactacatgctccttttatttctataattcattttttaaaaatgtcctactgtcctttttttgttcaaattaactcttcacatttttactctcacagcagacttaattcattttcacttaaaatatgcattatagtcaatattggattggaaagtatagctttgtataagtgattactgtaatgcttcctagtatactagttaattgtaaacatactgaagacactgttggaatagagttggccaaatctctctagtttctggattatgtagctaaggtgtctatatctatacctgtgtctatctatctgtctccacttatctatctatatttaatcaaattggtttgttttttgattga

SEQ ID NO: 96875 - DNA, 270 bp, Homo sapiens
ggaacgtcactgggatgaggaacgtcactgggatgaggaacgtcactgggatgaggaacgtcactgggatgaggaacgtcactgggatgaggaacgtcactgggatgaggaacgtcactgggatgaggacgtcacttgttgaatgtcccacaactattagatggtagagactaaaggtaaaactgactccaaaaatcagtgcttaccttatgttgtactactactcacagttttaggaacagaaacgggaagttaaaggcgtcttatgta

SEQ ID NO: 96876 - DNA, 591 bp, Homo sapiens
aatcctagaatggatgctcttaaactgatttaagcacgcttccatggtcagaagccttatggttgccacagggtattaggagcatggagaccaataatggatgtccttgttctgatttgaggatgcctccaaggtcacatactctgtttgcaccacgcttaggaaggagcgtgaagaccaaggggagtaatagtcaaagtccttacctttgtttgggtggtttgtttaagagtaatcaacgtattatttaaaagtgtgaaatacagtcaaagatggccaatgttattccagtgatatgggagtgacatgaagtattatattgatgatgcatatataaaaaacaggatagttaatgaaacacccaatgtttgagtgattctgtatactgatagggaatatcaagagtgttactgggttttgtgaatcacgggccttgaaagtattattaatgaataaatgacataatcaatagacaaggtagaaatgaatagcaaaacccagtaacactcttgatattccctctcagtatacagaatcactcaaacattgggtgtttcattaactatcctgttttttatatatgcatcatct

SEQ ID NO: 96877 - DNA, 427 bp, Homo sapiens
tatcatgagtttatctccacgctaaggttcacttatggactcacttggtcccacgggcccccaagttaagaatgcattttgcagattatcccatgctttattagtacctgtttatccgctaattagaacgacaatcttaatctaggccacaatattttctgaagctcaagaaaataatttaggggaggaagagaggaagatggaaatagacaaattttcactacaaggcactgtgatctaactatttttacctgttctcccttctatcagcacaattaagagtatgcacaattaagagtataacattccacttttattactacgagctaacaactgttcatacttactgacaggtgaacaaaattacaaattattcaatgttctccagcttagctttcatactttagcttacatcttttaatttata

SEQ ID NO: 96878 - DNA, 581 bp, Homo sapiens
ctctgtttacatttgctggtcgctggaagatcgaaagactggacaaaatccatatggcggccggccggcgcggtggctctcgcctgtgatcccgcgctttgggaggccgaggcgggaggttcttctgagctgaagagttcgagaccagcccgggaaacgtagtgagacccccaccatctctacaaataataacaaacaaacaaaaggtccccccgccccgccggccgcgggttgccgtcgcacccaggcacatttgaagggcggcaggagccaaggcctggctgtcactgctgtcccggacccctttgacggcccctgggggttcaccagagggctggcccgtggctcactgcccagtcctctatgaggacacttcgccatagacattttgttattgcagactgctctgggaacacccctgactgggccctaaaatgaattccagaaaaggaatcgcaggtcaaggggcggttctaaaaggcttgggctagggtcagccagagctctgtgcagcagatgggggcctggaaaagtctgcagaagtggccttccgcccaggccctgcctcccccgacgggggc

SEQ ID NO: 96879 - DNA, 203 bp, Homo sapiens
cacgccccacaaatttttgtatttttagtagagacggcatttcactatgttggccaggctggtctcgagcttctgacctcaggtgatctgtccacctccacctcccaaagtgctgggattacaggtgtgagccaccgcgcccagcctgcattttcttaattcgtttaggcttagggtctttattttttctctgttttacaggg

SEQ ID NO: 96880 - DNA, 306 bp, Homo sapiens
gctgagcctcctaggggtaacgcaacaggagcaatgtcattgcttctaagaggcagagctgggatttaagcctcaaagctttctgattgatcccctggcctggctcttttgtcggccaatttgtgctatgttgacagtgctacggtgatgaagggaaagcatctctctggggcaggaacctgctcacaaaactttgctggctggatgcagtggctcacgcctgtaatctcagcactttgggaagccgaggtggggggattgcttgaggccagcagtttgagaccaacatgggcaacatagcaagac

SEQ ID NO: 96881 - DNA, 190 bp, Homo sapiens
cctccctagcactgtctccgtggggaataagcttctccccacacttcccaaacacccaggatgccgagggcgatggaggagcagcaaacacttaagcataatgagggcaaaaccgattctcaagtggggagaacgttttccgtcaggcatgtccacccttttgaagttgtggacacaccttcaaaccagc

SEQ ID NO: 96882 - DNA, 305 bp, Homo sapiens
gatggaagctgtagtgagagagaagcttctcacacaggactctgatgcatgctcccccatgacctgtccttagctgaggcaccaccacaaccctgaccctgaaagcagagaccttggccatgtccctactttccctcttttccttacctggcacatttcattggtggtgagtcctggtctttttccttcctggctccagtcctttccagcctcccctgcccctcattcatggccctagccccggtcctcccaacttgcatcgacctcctccttgggcctcctcctctgcctccaacctggctccc

SEQ ID NO: 96883 - DNA, 468 bp, Homo sapiens
tcaggtggggtgtcctgggcttgttcttcactgaaacagacctgggctccttttcttcctgtcctcaggccagaaatcccccatcaatttgtctaagggaaccatcactggccaagatacagagggggcaagaacacaggagaccgagtcttcttaccaggagaggtgatttcaaaactccaaacaatctccaagtaaaatccagccccagtaagggcctgtagcataaatttgaattttggagggagtccagccctccacgtgtttctctgataggaactgggagagcttcccccatacagccaagtcctgtcgcggagcagtcccccgaccaccctgtctctgccccaacccctccttatggaggcaaacaggccaccaaactacagcctcccacggtgttccatcagcagtcacaggaaaaccctcatggcttctgggctttgcctccccaatatgccacccagc

SEQ ID NO: 96884 - DNA, 228 bp, Homo sapiens
aagacaactcagatatggtttcttatgttccaaaaatgattccattagcacggggtccccaacccccaagccacagaccagtagcagtctgtggcctgttgtgaactgggccatacagcaggaggtgagtgagtggtgggtgagtgggtaaaacttcatctgtatatacagccgctccccatagctcacattaccacttgaagtccactttctgtcagatcagtgatg

SEQ ID NO: 96885 - DNA, 858 bp, Homo sapiens
agcaagttcttttgccaatggcaaccagcagagcttcccctgaagattggaggggatgagtcaggggcaaggaaggattaacagattctgcctcaagtcctggtgaaccaactcctctccccaagacagacacatactagtgaaataaattggatttaaatcatcacctgaggcaatcctgaaagagaaaagcagtcctagaaaagagtggaggaaaagaggacagccccattctctttgtgaccacgaagactgccgccatgtggttgggagccacgtaacttcttttagtgccagctgagattcttctgccctggaactagttcctccgagttattgccaggcctggagattgaattcctgcagctggaaggtggggaaaggtacggacaaatgagctatgaatttaacaggctaacatcccagctccacagggctgtggccagagaggaattctcccctttcaaagctgactccggattgcttagagaaagaagcgaataataattgagtcagaatgagaagtccttccttccttctcaggaggatgtcctgttagcaacttctttggacacaaggaggaaattaagaagcatcattactgttaatatcattttctttttcagaatgttaacagccttgatattatacaaaggttgataaaaatgtatttcataagtcaaaaaacaccaacggaaacaaaaagttctccaagggggagaacggggcaataggggcgaagaacctcgaagggggcgcgcggtacccagttgtggtgccctttaaggaggggttaatcgaagctgggggaacccagggcaacagtggtccggtgggagatggtatcggcacaatcag

SEQ ID NO: 96886 - DNA, 332 bp, Homo sapiens
tacagatatatttatcatggtatgtttgatgggatgactgacacaggaaatctgttaaagtcttaaaatggaatgagaatgttgttttaaaagaaaatagcaaaacaacaaaaaagcaaaccttaaaatgtgaagaaagtgtgaattttagttttgtcacagttaactgtgtcaaagagaattaaaaaaaaaaacttcagattttgtttacatattttactacatttttgctggtataattccttagccacctatgtacatactgctttaagaaatgtttttttcctgtttatttctgtttggtttatattctggttgtctttttctttttg

SEQ ID NO: 96887 - DNA, 663 bp, Homo sapiens
ccacctcggtctcccaaagtgctgggattacagacatatggcattttaaaaattatttataatacgtgaaaaatgcaagttacaaagcagctgctcagtatgagcccgttctgggagcagtggggagaggagtggtcatattgcacaggtttcattgtgttctcagtggctgtctgctgatttttactgtttccctttgactcatctatttaccttaactgtagtttctaagtttttttgaagtgttcattactaaggtaatttttcttttttctttttctttggaggggacagagtcttgctctgttgcttaggctggagtgcagtggctcaatctctactcactgcaaccttggcctcacaggttcaagcgattctcctacctcagcctcctgagtaactgagtaactggcattacaggcgcctgccaccatgcccagctaatttttgtacttttagtagagatggttttaccacattggccaggctggtcttcaactcctgacctcaagtgatctgcccaccttggcctccccaaagtgctgggattacaggcatgagccactgtgcacggtctaactttcaacaggagttttaatttttttttttaaatttaaaagaaaagaccgagaataaaatgtacagagtttaaaggtagaggca

SEQ ID NO: 96888 - DNA, 180 bp, Homo sapiens
ctttgtcatggatacctacgggatgatctgctcagcaaccatcacccacatgccttaagtgacctgaactccttctgtatcagaaagagctgtgttgcttttgtgtactgaggggaagaaaccaaccatgaagattttgtatcactcaagagacatcataaaaaataaacaagagtttaa

SEQ ID NO: 96889 - DNA, 643 bp, Homo sapiens
gattataggcgtgagccaccacacctgaccgcaagatacttcttacacagaggctgccatcgcagaagcttgtgttgtactatcgacccccattttgggtcattttttatcagaaagatgagttgttctgcagctacagattgcgtgtataatcctggccagcatctctaaagcttgtcagctgcttcacgagtgagtacccctgttcacagaggagatcaggtgagtgtgcaggtctgaacttactactgcaatgggaaggtcagctcagagagcattaactttggatacagatgataacacaacaaaactattacctcatatctacgtcgctatgagcagactgggaatagggtaatagtgcttggagttggcagaggtgcaacagtagatggccatgggtgctgctttggaagggcctaaggatacagttgttgaatgattgtaagaacaagagaaaggtggagtctcaataaggcagccgtacaatatgtttatcaagccttcaataggtttagtatatactcctttggcgcatgcttacaagtttactgaactataaccaaacatcccactgggaaatgttttgaattgatgtgagaatttgacattaagtagcaacttgggacatcagagaggcctc

SEQ ID NO: 96890 - DNA, 671 bp, Homo sapiens
aactgcaggccaaatcaacagcaaccctaagaacaagcattcttttttttttttcaacagaactaggccacacatattttttgtcgttatttaaatttttagttgtactacatagaaaataaactcattttaaaaagttatttcagtaggcaatgcatcttcatgacttttacatatgagttttattttttattacttttgaagaaaagtctgtagaaacctacttttcaaggcatctgacccaaccattgccttggatggcagcaatccagctcaggcacagcatcaccgccgcccggccgggaagaagacgccggctcgggcagcccgcagccttcgagagaagatgcctgagaagcgcggcgtcggcgtgggtcctgcgcagcctgccccgcgagcgcccgctgcaagtgcgaggaaacccgcggtttctccagatacagttaaactgttagctctctctaggagtcacagaagatgaaacagtctcatgccaggaaagcaaaatccctggaggtgaagcccctccatccatgtaacggttaatactgtatgctgtgattcactgtgtctatttgccatcgtctagtagagtattcaccaagctagcaactcagttgagctccaactcaaccaatgaattgcctgcctgtcacaacgtgttggggtac

SEQ ID NO: 96891 - DNA, 457 bp, Homo sapiens
tatgtacatataattcactgggagagttttactagcacacttttgaattatggagttaatttcaaaacgtacatcaacttaagtaacataatgccatctcagtagaaatgcttcattttcctgatcttggaactaggtattgccacttgagtagccaatactgatccacttgaggcagccctcaaaccctagcctggacgaatataatggtcttctgtacagttttttttgctatggcttttcagcttcctcattgattaaaaatatgtgagaatctctcaaaagttatgggacaatttgagttttattactttttaaaagtcagatgagaaaatctgctccttaagaatataataacaattgcataagcatcattctgttgtccagcaatcatttgtaatgaagaggatttttacttccaaataaaataatacatgaacttttgactaaaagcctt

SEQ ID NO: 96892 - DNA, 374 bp, Homo sapiens
agcacgattcttacaatgagatctaaatgggaccattgttcactttcttgagtgtgataaagatccagcaaggagcctcccagatggagtacatggagaccatgactgtgaaagatgaggatcaagtgcagatttggtggcctctgattgccagtatctggcagccacattctcttcccacaagatgtgctggaaatatgaccaagcagaagttcacttaagtgaatccaacagttaaacctaccatggaagggtgtggtgcacagagggcatgtggagaagagaagaccacagtgggaacctccaaggaactaacatctagctggggatgaggggggatttggctatgtagagagtaaataaagtgatatgag

SEQ ID NO: 96893 - DNA, 218 bp, Homo sapiens
taataatttgtaccatgacatgcagagatatttctattttgttgcccctccttgaaagaactaagaacaattctatttcagagtttactatagctgcctagtaaatatttattcacttgaaaagaattatatgcaataagttcaactattgtggtagttcaaatgaaaaaatattttttaaccttgtgatcacattacccacttgtactttaaagtat

SEQ ID NO: 96894 - DNA, 488 bp, Homo sapiens
gatctcatgtgttgagatctctgtgccacttaagggatataccattgataagctaagctgaaggtatattccctgttctgctaagtgttctaggatgccgtcagtccaggactatttatactttttgaacctgaaaacttcatggaaatgtgtatactttctagaacattccccaaccccacctcagtgtgtgcgccttagtttcctatagttgctgtaacaaatcaccgcaaatttagtggcttataacatatctttattatcttacagttctggaggtcagaagtttgaaatgggtttcactgagctaaaattaatatgtggatagggctgtgttccttctagaagcactaggggagcatctgttcccttgccttttttcagcttctagaggccacctgcacttttggcgcatgaccccttcatccatctttaagtcaccaatggccagttgagtctttttcgtatggcatcactgatcagtactg

SEQ ID NO: 96895 - DNA, 601 bp, Homo sapiens
tattacagaatgttctttcacttagactagttttccaaaataaatttatttacttattttagagatagggtctcactctgtcacccacactagagtgcagtggcatgaacataattcactgtagcttcaaactcctgaattcaagcaatccttccgccttagccttctgagtaggtgggattacagatacatgccatcacaccctgctaacttttttaaattttttatagagatgggcgtcttgctatgttgctgaggctaatctcaatctcctggcctcaagagaccctcttgcctaggcttcccaaagcactggaattagaggtatgagccacctctcccagctacccaataaattatttctttcagattttattcaaaattgaactttttcaataaaagcaaaataagtaatgttcttgggtcctctgggattctgcattaatttcattaactctgaggagtatacaacagattttgtcttccaccacctccttaaggatattgctagttcctttttagccaaagctttcaaattatttttatttgtccaataatccctgtgaccctgaatatgcctcaataaaccatatgtttaaac

SEQ ID NO: 96896 - DNA, 428 bp, Homo sapiens
aacgatactgggggaggagtgaggaggaggaaaatgctgatgatgaagctgaccaggccaaggaagggagatgagaaaaaccagatcaagcttcacctactcctgcctacgtctaacaccaaaggtgttttgttccatgctttgaatcctttatctacacaggacaactacaaatagcaattggttaccctacccttgatagtaaattggtgtgtcagtgtctttcctgattttcttttcacgacaattgagtaacctccaaacactgtttctgaaatcagtgggaatgagaggaatcatacagtatggactgttttgtgactggcttccttgtttccacattatgtctgtgaaattcatccctcttgtggcagacaggaggagctcactgcctttcactgtcttgtaatcttccatggccggagcac

SEQ ID NO: 96897 - DNA, 643 bp, Homo sapiens
gtcacttacccagagtccatatattgaagtgaaaatggaatttcatgaagcaaatatagttataggatggtaactctggacaaattttataaaagatgaactccaattgcttcatttcacagataacagctctgagcactagggagagagggagggattggcctagcatttgctttgtgtcttgagcagtcacatctattatggaagtactcactactcagctatactcactccctgagacaggatggttggaaagaaaccccaccttagcttcatcattaaccaagaaaccccaaggatgcttagagaaaaactctggaattatttgggaattcctggaagaagctatgccctctctcctgcatcccaaagcccactctacaccatcttgaaaaatgtcaaggaactgcatggattaggttgactctggatgaccctgggtagagacacattcagtttcctgctgacaccgcaccaagaaagtgatttggtcaggtgactctaggagaaattggtactgatagtatccaaggcagatttttaagtatcagacttaatacataatgattcttgggaaagccatttaaatccctgagactttaagtggataaatgtaggtaaagtagtatagtacttggctcat

SEQ ID NO: 96898 - DNA, 448 bp, Homo sapiens
  misc_feature (2)..(2): n is a, c, g, or t
  misc_feature (65)..(65): n is a, c, g, or t
  misc_feature (181)..(182): n is a, c, g, or t
angagtgaaaaacacatgaatgcacagaataggagattgaaatataaaccacagaacattcatanaatggaatactttgcagtcataaaaatcttctcatagaagaatatttgacagcatagggatatctgtggcatattaagtagaaagtcagacttgtaaacattatatacatattcanntatatttaaacaccatgatcccatatttagatataacaactaaaagttcagatggctatatatcaaaatgtgtcaaatgttcaaccttgcataggctgactgtagatgaattttatattattctttgtgctttcttgtagttcccaaattttctttattgaatctatattacttttgcaatttaaagaatttaatttataaaattttataaaataacttataaatttgaaatgtattgcatttaagaataaaaagtgtttaattac

SEQ ID NO: 96899 - DNA, 719 bp, Homo sapiens
aataagtggataaatatcttacctgaaagatagcttcattaaataaactaactcctgagaggatttctttggcctttaatatcctatttaatagatttcttataaccatatcagcaaagccactctgctctggacaatggtcagaaggtaggaagaagtgttatagggtaatgagcaatgataaggccaccaaatataatcccattgtaatgggattctacccacttgtagaagtttattcaccactacaaattactaaagttaacctaaacaattaaagaaagaaatcttagtctttaagaacagaggattgtaaagtgagccagaccttccaatcagctaaaataatgtaaaataatgtacttttcaacctgacttggcttaatgtagttaagtaaattttaggataggttctaaaaaaccttgagaggcattttgttgttgttgttgttgttgttagtttgccttaaagttaaatgtacattgacctttggtatttcttagaaaaacctgttactgaacctagtacagaatgtgaatcatttcatgcctgaaatacaagattgatgtttacagggcaattgtccagaatcttgctgaattggaaagtatttcactcttcatcactgtagatccgtttaactttacaaatgtgttatttaaaacataaaccattttggtgcacaggaaacccacttaaaattaaattttaaaaagct

SEQ ID NO: 96900 - DNA, 518 bp, Homo sapiens
acccccacacaacaacaaaaaaggaaggaagcaagaaattttaaaaagaggtgagtcttcttttcttcccacccatgggcttttccagtccctagaaagttcttcttatagtctaacctaattccttcttgaacaaatgtaagacatatgtctctaattttcatgggaaatggagaggagttcacaactatgtccatattacctatcttcaaatacttaagggcctctctctgccttctcttctctaagataaacaagttctcttctttaagtctgtaataatcatccaatttatttcatggcccccttgatcttgaaacacggcaaatttgaataagatatttgttttaaagtagttatgttgctgtaagttctgctcctctaatacttaaactttccccattatgatacctctttgcttgttatattttaaacagtgccttgctgtttaaatgaggaatgagaaaagatttgccttgctagcatctgtcaccgccgaccctaggttgcctctgaag

SEQ ID NO: 96901 - DNA, 237 bp, Homo sapiens
gtaagagctaaatctacgcaacttttagaagaaaacataggagtaaatctttatgacctgagattaggttatgtttggtttcttagatatgacaccagaagtacaagaaacaaaagaaaaaatagataaatagaaatatatcaaaatgtaatacttttgtgcagtagacaataccattaagaaagtgaaaggacaaaccatagaatgggagaaaatatttgcaaatcatttatcaga

SEQ ID NO: 96902 - DNA, 324 bp, Homo sapiens
atcgtcatagctgactctagagggtccacggccgcatctgacccagatatttgaaaaacaattaagccactcagtaaatgaactgccttagagaagattataatgttggccttaatttcttttaccaactttccatttccttgaaatgcagctaatcaacttatattaactgtcctggaaaattttttggtttacagagctttttgtttttaaattgttaccactaatttaagaaatttagactgaaaatgttacttttaataaaaaggaaatgtcttagacatattaatgcatataatttttcatatcacgaggtgcaatcat

SEQ ID NO: 96903 - DNA, 313 bp, Homo sapiens
gcagcctccaggctttagttacaccccccccaccagtgcggaagaagacattcttcaaatttataaattataagaaatcagaaaatgaaaagatcaaaatgctaaataaactggcgttaaggagctctcgctctgctcttgcgcgtggtagtggtgagagcggggcatccgagagccctagagctggtgactgggcgacctcagcctaacacctgcctttgagcctgtatcctcgccaggtggctggaagagtaactgatggggattgggacaaaggtccccacaggtgtcttcttagtttatattcatttcc

SEQ ID NO: 96904 - DNA, 161 bp, Homo sapiens
agcagaagggtaggggcaagagtaagtgctggtaaaggcatcacacatgcagaatcagaggtctccaactgcatgaggacagaggactcccacaggctgcttaaggtaaagaggaaagaaaggagctggtaaatcaacttaggacttagaagatataatga

SEQ ID NO: 96905 - DNA, 140 bp, Homo sapiens
aaaaaaagaagggaaataaaagtgggaagaaactgatggataaggcaccaagtaaaggaaacagcagactacaggtcttaatgtaggtacaggtggggaataaatttttgtggcaaggtggatgggcacgaagaagtggg

SEQ ID NO: 96906 - DNA, 818 bp, Homo sapiens
atggaacgctcatctggctgtggcagcctgtgactgaatgagagaaaagtgccctagaagctattcattacgaattcactggaagctctcaaacgaggctggcagaagctgaaattgaagtggtctctgacctaattttcttctgcatgaaacatctgcatcaaggctctctttgatgtattccacttggctctgtctacgggattgtatcacatggactcggtgttgcctccttattgaaagacatttccagcctttgcaaggtaatgcgatgttactgttacccaagctaatcactcaatgtgctcctaaaatagaaacaatagcagttcagagacaatgttgtctgctggctgttcctgcagcttgggctcctggttttccaactgaaatctgtggcatttgcctcctgtaattccaaaacaaaggagagggagaagaagggcaaagctatgcaagataatgttgaaggaccagcagcattatgtgtgagaagcttcatcttatttggtccttcaagccattgggtaggattttggcaccatttaaaccacacagagcaataccataagaggtctgccttaagaaagaaaaaaaatctctttatttggatgttgcttttattccaaattctgattgacaccctccactgagagagagagagagagagagagagagagagagagaggtgtgtagtgaagtttagagtgttgagagacactgaggagatatatgaactacttaaaaaagaggcttccgctcgaaagctctcacaacataggtggaatgcgagagagaaatcccccgccacacgcgaa

SEQ ID NO: 96907 - DNA, 432 bp, Homo sapiens
tagcttgaatctgttttaaagtcttcctttgaacataaattatatttaaattcatatatatggatttaatattactatccccctctacttaaatatgtttttgtgtcttatgcaatgatgttggtaaataaccaaaaatctaaaatgacccccaaaatatattcacctaccatatttcctaaaaagttcttccaattgtatgtagtatctatattctcccaagtgcacgtgcgacttcaaaaaggtatgatagttgcccagatgattctaaactcaacaccagtgaggcacaactcacagagggcacccacagcagtttggaaaggcaaggttgtgttggataaaatcagatccacctagccatcatctttattgtattacccctttggagagctgtggggattgaagcaggtggttttcaccactgattta

SEQ ID NO: 96908 - DNA, 216 bp, Homo sapiens
gaaactcctggagggcagagccatgcctgccatttccatcattgcattaccaccacccagcacagtgcctggcacaaaagagttgctcaataaataaatcaggatgaatggataaatacacggataggcactttgaattacagatgagcttaaatactttgtgtttttcttagtcaaacatgtgcaattaagcatgtgataaattatatgatgacc

SEQ ID NO: 96909 - DNA, 417 bp, Homo sapiens
gcactggagctgaatttaccctgggaaggcaaaccctgggaagtcaagagcagcctggggctgaaacaataattactgcaagagcctccacggagacagcgcccgcaccaccagcatctcccattatggatgggagaacagaggccccgagaagttaagctgcctggccaaggtcacacagaggcagagctggattcaacgcaggcagattggctccacagtctgtcccaccgccccaccctccaaagtcccccggtaacagtccagttcttcaccaggcggtgaagaactgggcctgttgaggtaaacatgaggaagttctaggcctgtagagacaagtcggagaaaggagctggggctaaagaggctgttgtaaggcttgagattggcctacataggcgtctagaaggccggagc

SEQ ID NO: 96910 - DNA, 605 bp, Homo sapiens
aacaacggggtgaaataggccttacttgcccccattttatagctgaggaaactgagtttcagagaggtcaagtaattcactcaggatcgtagagctgataaatgagagccaggttttaagcctgcctgtgtctctctaatccaaaatatatgtgctctccattgtacttcctatgccttagagagactgattagtgaaagggaaactaggaaatgcttgagtatttccagtcctaataatattcagttcaaattccaggaagggcagtgattttcaaccttcttaacttttctgttttaaatctgcaaaagaaaacctgccacagaccagaaaggagaaagttccccctaaattgtgtcaatctttgcagataataaagcaactctttcacttctgcaggattgtcaagtgggatgtccaaacctgagaaacagctatttgggttctttactctgcccctgaatagagtcggagcttcaggcttcagggaagggacaattgccatcaaaagtcgtatgcccgggagcaggtgttgctcagaattgtgaagacgttatgaacccaggtgacttgactcaagagttacaaccccactaatgagaagg

SEQ ID NO: 96911 - DNA, 186 bp, Homo sapiens
tcgaagaatgagagaaaaagagagaaccttggcctggtgactatactcttcaacacaactcagggaggccaggtgtggtggctcacacctataaccccagcactttgggaggcagaggtgggaggctagcttgagctcaggagttggaaaccagcctgggcaacatagtgagaccttatcactacc

SEQ ID NO: 96912 - DNA, 3069 bp, Homo sapiens
tctctatttttcctgcaggctcggccggtggattaccctaaggactacctttctcatcaagttcccatatcgttccacaaacactggaacatcgatccagtgaaggtgtatttcacatggttggcacccagtgacgaagacaaagccaggcaggagacacagaaaggttttcgagaggagttataaatcagggtgacctgtgcgcctagcctgcgcagggaatgaactggagactgtggcctcatcccactgtgctgtgctcacaacacttgtgtctgccacatggcattgggtgcttcctgactttagggggagattttatgtatggtattttttgacagaggaagaaaaggggtcacaggagaaacatttttttttctgggaaaaatcacttgcttttgacttatgcagttgttttaacacttagtgatgactgtgtattctccaagctgtgatacagcagtttttttttattgtcacagggaaataaatggtaccagaagtccctttcctgttctgtctcttcattgtaatggaagtttcagttgggcatgagcctggagagatgtgactgtctacagttctatttgtatatataaaaagaagactgaaagtcttttgacatggatattgtgaatggtatgaacttttaaaccatattattgatgatgaaaattatttcctgggaactcagtaggaataataccgtattaaggaataatactgtacataaaacatcatgaaaccctagatatgaaatcccctgaagtctgtaatcatggtggttatgttttgtctattcttttgctgtttgtgcctcataaaaagagaatgaggtcttctgctagagcttcgtattgctttggaagttcatctgtgttttatttctccctgaagccctatctttatggcttacttgtaacatgaaagtagtagatgctgccagaaaatagtgtcctcaatattttaaaacaatgttgacatgttttgttcaagtcagcaagctctatgtgagtctcaggaagtgaattaaatttggaccttatgttttactcttgtttttttttttttttttgaatgttacttaatgactctctcctgactcaggagagaaaccccttgtggaaggacagcatggtgatcaggcaatttctctgggttcccaaagaatgacatttgaacacagtattttgaaacagctctagttttcaaattatatctttaatatatagtaatgtaacatattcagtattaatgtataaaaagcactctaattatataattcagtttttgtaaaggtatttgcataaaatttaatatgtcttaaactaattttggtaaattacttcttttttttctttttaataaaaactgttactcattaactttgcttataatgctttttatagcccagcacagaatttaaagccataccaccaaaagtacctgtgtgtgttaatatgtttttcttgtagcatagattgactatttgcaatagtattagtatttaccatttttccaaattagcaactaccagacctcacgtgttgcagtgataacacaatgcattggattcagttttgtgaaaatggattctgtggccatccaagggatgtatcagggatgatcagctgatgagaggctccagaaggatttctagatcgcttcaagcctatactgatggccttagctttgttcagtcattgtaactgggattgttgtcattgctaccgtggtagtcaccttcatgtcatctataatagtactcctggagagccctggctgcctacaccagtggaaaagagtctccagttctgctctggcctactaactgttaccactgagagaacaacatgttcatttgacatgattgaagctggcatccgtatatgaagatccttgtcaagctttcttctgtggtctgattagtgttgataccggggcacctcctctggtacttttaagtgttttgttaattatgtttactttttggaatggtgtaagcctaaccacaaataaaagatctttgcctaagtttttgatttctcaaatattgtgttcattagtctagactgggaatggggaggggaaatggggaaaatgaatgaatgaaatcagaaaaaagtcagcggctcagtaaatacagtttaaagagagaataattacttcagagctacccttttaagagaaaaccatcagaaattgataatgtttatataaagtttataaagccattgtgttttgttatataacaaatcagagatgttattttagaatcgattcccatctaaagaactcaattttgagtctgacatttccaggaccagatattgtcttactcacatttcctttgctttgaaatagggctttccttccaaatggctatttttaggctagggatgttaacatcagggatttgtgtgtggaataactggaatgtcatttttgcttttaagccatttctgatgatatagccaaagcaggttgtctgactatgtaggatttttacatcttgaaactaaatcagaaatccagacatgaaaataacctttctagaatgcctaggagcagaaaacaataatagcatgctaaatcacaaatgatgctatgtatgggtatgtaaatatcagtgctgtctgcatttctgggtttattgaagacctcttgttgtatatatcctcaaaaattaatgtaattgacatcttcaagaatgtttctattgtcttccattcataatcagagatgtaatttgtatggactaaataaaaactttattatgtaatgaaaaaaaaaaaaaaaaaaaaaaaatttggggggggtggggctggaaaaagttttctaaaaacaattcggtggggcgcgcgggcccagtatgttctactggagacacgttggcccaacaggttgctcccaaagggaacaccgggcccaggcacacgtggctgtgggttccccacccaaaaaaaaaacgccggggcggaacccggagggttctgaccaaacccaaagggagtcgagaggcccatcggggtctatcacacggggtgctccagagagcgaaattaattc

SEQ ID NO: 96913 - DNA, 2033 bp, Homo sapiens
tctctatttttcctgcaggctcggccggtggattaccctaaggactacctttctcatcaagttcccatatcgttccacaaacactggaacatcgatccagtgaaggtgtatttcacatggttggcacccagtgacgaagacaaagccaggcaggagacacagaaaggttttcgagaggagttataaatcagggtgacctgtgcgcctagcctgcgcagggaatgaactggagactgtggcctcatcccactgtgctgtgctcacaacacttgtgtctgccacatggcattgggtgcttcctgactttagggggagattttatgtatggtattttttgacagaggaagaaaaggggtcacaggagaaacatttttttttctgggaaaaatcacttgcttttgacttatgcagttgttttaacacttagtgatgactgtgtattctccaagctgtgatacagcagtttttttttattgtcacagggaaataaatggtaccagaagtccctttcctgttctgtctcttcattgtaatggaagtttcagttgggcatgagcctggagagatgtgactgtctacagttctatttgtatatataaaaagaagactgaaagtcttttgacatggatattgtgaatggtatgaacttttaaaccatattattgatgatgaaaattatttcctgggaactcagtaggaataataccgtattaaggaataatactgtacataaaacatcatgaaaccctagatatgaaatcccctgaagtctgtaatcatggtggttatgttttgtctattcttttgctgtttgtgcctcataaaaagagaatgaggtcttctgctagagcttcgtattgctttggaagttcatctgtgttttatttctccctgaagccctatctttatggcttacttgtaacatgaaagtagtagatgctgccagaaaatagtgtcctcaatattttaaaacaatgttgacatgttttgttcaagtcagcaagctctatgtgagtctcaggaagtgaattaaatttggaccttatgttttactcttgtttttttttttttttttgaatgttacttaatgactctctcctgactcaggagagaaaccccttgtggaaggacagcatggtgatcaggcaatttctctgggttcccaaagaatgacatttgaacacagtattttgaaacagctctagttttcaaattatatctttaatatatagtaatgtaacatattcagtattaatgtataaaaagcactctaattatataattcagtttttgtaaaggtatttgcataaaatttaatatgtcttaaactaattttggtaaattacttcttttttttctttttaataaaaactgttactcattaactttgcttataatgctttttatagcccagcacagaatttaaagccataccaccaaaagtacctgtgtgtgttaatatgtttttcttgtagcatagattgactatttgcaatagtattagtatttaccatttttccaaattagcaactaccagacctcacgtgttgcagtgataacacaatgcattggattcagttttgtgaaaatggattctgtggccatccaagggatgtatcagggatgatcagctgatgagaggctccagaaggatttctagatcgcttcaagcctatactgatggccttagctttgttcagtcattgtaactgggattgttgtcattgctaccgtggtagtcaccttcatgtcatctataatagtactcctggagagccctggctgcctacaccagtggaaaagagtctccagttctgctctggcctactaactgttaccactgagagaacaacatgttcatttgacatgattgaagctggcatccgtatatgaagatccttgtcaagctttcttctgtggtctgattagtgttgataccggggcacctcctctggtacttttaagtgttttgttaattatgtttactttttggaatggtgtaagcctaaccacaaataaaagatctttgccta

SEQ ID NO: 96914 - DNA, 1834 bp, Homo sapiens
tgtgacattatgtaattgtgtacttgagaataacgtgcaaaaatacaataatgtcacacatccctatatattttctttttatgtattttactttctttacaaagaaattaattcttttttttctttttaataaaaactgttactcattaactttgcttataatgctttttatagcccagcacagaatttaaagccataccaccaaaagtacctgtgtgtgttaatatgtttttcttgtagcatagattgactatttgcaatagtattagtatttaccatttttccaaattagcaactaccagacctcacgtgttgcagtgataacacaatgcattggattcagttttgtgaaaatggattctgtggccatccaagggatgtatcagggatgatcagctgatgagaggctccagaaggatttctagatcgcttcaagcctatactgatggccttagctttgttcagtcattgtaactgggattgttgtcattgctaccgtggtagtcaccttcatgtcatctataatagtactcctggagagccctggctgcctacaccagtggaaaagagtctccagttctgctctggcctactaactgttaccactgagagaacaacatgttcatttgacatgattgaagctggcatccgtatatgaagatccttgtcaagctttcttctgtggtctgattagtgttgataccggggcacctcctctggtacttttaagtgttttgttaattatgtttactttttggaatggtgtaagcctaaccacaaataaaagatctttgcctaagtttttgatttctcaaatattgtgttcattagtctagactgggaatggggaggggaaatggggaaaatgaatgaatgaaatcagaaaaaagtcagcggctcagtaaatacagtttaaagagagaataattacttcagagctacccttttaagagaaaaccatcagaaattgataatgtttatataaagtttataaagccattgtgttttgttatataacaaatcagagatgttattttagaatcgattcccatctaaagaactcaattttgagtctgacatttccaggaccagatattgtcttactcacatttcctttgctttgaaatagggctttccttccaaatggctatttttaggctagggatgttaacatcagggatttgtgtgtggaataactggaatgtcatttttgcttttaagccatttctgatgatatagccaaagcaggttgtctgactatgtaggatttttacatcttgaaactaaatcagaaatccagacatgaaaataacctttctagaatgcctaggagcagaaaacaataatagcatgctaaatcacaaatgatgctatgtatgggtatgtaaatatcagtgctgtctgcatttctgggtttattgaagacctcttgttgtatatatcctcaaaaattaatgtaattgacatcttcaagaatgtttctattgtcttccattcataatcagagatgtaatttgtatggactaaataaaaactttattatgtaatgaaaaaaaaaaaaaaaaaaaaaaaatttggggggggtggggctggaaaaagttttctaaaaacaattcggtggggcgcgcgggcccagtatgttctactggagacacgttggcccaacaggttgctcccaaagggaacaccgggcccaggcacacgtggctgtgggttccccacccaaaaaaaaaacgccggggcggaacccggagggttctgaccaaacccaaagggagtcgagaggcccatcggggtctatcacacggggtgctccagagagcgaaattaattc

SEQ ID NO: 96915 - DNA, 801 bp, Homo sapiens
ctcactgagcactcctttacagacttacaagtctttactctgtgcctatttttctgcatttagcagtctctttatttgttggtaccaccaaaggccagcatgatgcctggtacatacttagtgcttataaatgtccaatgaatgagtgaaactgacaggctagagaagggggtaggtaaggagagctggtccaggaaaagcccagaatgacagtggatttcagagaggctctcttcctgatacagagggcccctgcacctacagatgaagaagggtggcagtttcaggtgtctggactggttctctgcaccccattcagggcagaaaggcagggtttcaggactgggagccagctgtgttattacaggtggcctgggttctgtgttgagcgagatcctaatggtccctacatttaaggcagccatttccagcattttggccattgcatcaggagaaagagaggcaaaaacaagaggggatgtcattcaaagaacagtacactgaattgtgggggtagagtggggaggaggaaagaggcaaacatctggccactgaatgactcaccaaagttaggagtgagccatctgtgtgaatcccagaggaaaggctcacaagcactcatctgctacgtactcaccctgtaatgtcgcgggaaatgcataaaagtgaaaagaactcctacgccaaagttccaggtgtggaaaagttattctgagcaaggagctagtcaacagaaaggatgtagcaattcaaattacatagaacaataagatttaacaaattgagacatggggaagcaaa

SEQ ID NO: 96916 - DNA, 356 bp, Homo sapiens
aactgaaaaaattaatcgtcgtatgctcttcactcatcattgaagcagcatgcctacttttggtgccgtaaaaatggcagctgacaaaatagttcttacaggtaaacaatttggaagacattatacaaaataagtttatagttatcttagaaggaaggtgaaacaactctctagatgggataaaccaggtgctaatacggatgtgttaccttacatgggctttgcatttctctgcggtgcttgtttctacttttctgtcctacctcctgccctgccccttgctagtttttattattattattattattacaatgaagtgagattaaaggaacctttgggtgccaatgaaaatatta

SEQ ID NO: 96917 - DNA, 808 bp, Homo sapiens
aaaaaaaaggagtttgatttcaatgtcgcccgttgctatggaaacattgccagcattacaccttctgatatcttcatcttctccaatctctggctgtgaccctggagaaattatgaaagaagaaagggcaggaataaagatggactgagcaccagtgtgaactgtacgccagtgattatgagtaccaaggccataacctcccagcctcatagccagacaatgacatgggaacaaatggcttcattttgtgggtggagaacttgagcctcagaggtcatatgtattgtcaggcaaagccaaaaaagtgacttactgaccaccaagaatgaacagctagagctcaaactacaatggacgtttcttagaaactcctaattccaaatgtgttcactccagacaaggatcttggacatagcgacaaagtagcattggccacatccaatgagaacagccatcaggacagaggccagccttgtagctggagcttggtgaggtcaacataggtcagagggagaggccagcacacagctctctcaggaacaccactgggctatgggaggatcgagagacagatggtgcctccacaagaggcgtggatccaggactctggagggcctggggctccccaagtgagggtccttgggtgcaagactggggtaacactgatgcacctctcggctgtagccaccactgaaacatgctttgggagcagatgtttgaagccacaggaatgtgatctgtgccattgtaggcatgatgtgtcaaaaatgtggtttgaaaggcccatatttcttgaaagccctgtgag

SEQ ID NO: 96918 - DNA, 838 bp, Homo sapiens
aaaataattatataataagaatatatcattatattttataatataatatatgttagagcccgttgctatggaaacattgccagcattacaccttctgatatcttcatcttctccaatctctggctgtgaccctggagaaattatgaaagaagaaagggcaggaataaagatggactgagcaccagtgtgaactgtacgccagtgattatgagtaccaaggccataacctcccagcctcatagccagacaatgacatgggaacaaatggcttcattttgtgggtggagaacttgagcctcagaggtcatatgtattgtcaggcaaagccaaaaaagtgacttactgaccaccaagaatgaacagctagagctcaaactacaatggacgtttcttagaaactcctaattccaaatgtgttcactccagacaaggatcttggacatagcgacaaagtagcattggccacatccaatgagaacagccatcaggacagaggccagccttgtagctggagcttggtgaggtcaacataggtcagagggagaggccagcacacagctctctcaggaacaccactgggctatgggaggatcgagagacagatggtgcctccacaagaggcgtggatccaggactctggagggcctggggctccccaagtgagggtccttgggtgcaagactggggtaacactgatgcacctctcggctgtagccaccactgaaacatgctttgggagcagatgtttgaagccacaggaatgtgatctgtgccattgtaggcatgatgtgtcaaaaatgtggtttgaaaggcccatatttcttgaaagccctgtgag

SEQ ID NO: 96919 - DNA, 281 bp, Homo sapiens
ctggaaaagcttcagtgcagatgtatcttgggtggtcaagtcaattcacatcatttttggaagtagatacaatataaataagtgaggcaaaattaggataatttcatcaactctgaaatgcattggttgccagatacgctattattttatgtccctctaaggtaggttaaaaatgctgccagttacggcggggcacagtggctgacgcctgtaatcccagcactttgagaggccgaggcaggcagattgcctgtgctcaggagctcgagactagcctgggc

SEQ ID NO: 96920 - DNA, 315 bp, Homo sapiens
gcaatattattttcccaaactttctcttaaaactttttcaaaaccaggcatggtggctcatgcctataatcccagcactttgagaggctgaggcttgagcccaggcattcgaggctgcagtgagctgtgatcatgccactgtactctaacctgggcaacagagaaagaccctgtctctaagaaatgggaaataaaaaataaaaactttttcaaactgagaaaaaaaattgacagttgcatctaatgcccttcacatacagtcaatgttagaagaagatttaccctgaacatctcacttttctgcatggctcaggt

SEQ ID NO: 96921 - DNA, 339 bp, Homo sapiens
cagtcactgcaaatgaggttacatgtttagtattctgtaactactaaagcaagaaaatagattaatattttagttgtggtttttgcacagatgcacaaagtcagaactgatattcatagttttataattcagtgaaataaaatccaccccatttgtaaacatttcacttgaagttgagtacatgtcgtatattaaataattgaagtttggctgggcacaatggcgcatgcctgtaatcccagcactttgggaggccgaggcagacctcctcacctgaggtcaggagttcaagaccagcctggccaacatggtgtaaccccttctctactaaaaataaaa

SEQ ID NO: 96922 - DNA, 739 bp, Homo sapiens
caggaggatgtgcatacattatatgcaaatacacaatgctacgccatcttatataagggacttgagcacccaaggattctggtatctgaggggtcctagaaccaatccttcatggtttctgagggatgctttaaaactgccaagtctgacattttgaaaatacaactgagcaacttgttttattatgcaatagcccattaaaagcgtgtggtgattttgttctcttgaacaaaaatgatataggagtgaatcatatcaggctggatgggaaggcaagcattgttcatagccaagtattttctaaaggcaaacgggtttacagccataccagcctgaaagtgtccatcttgtctaacggcaaatggctgccagggacgcggcctggcctctcctgccacatcttctgggtaaaggtgatcagggtaggtgtcttatcactactccagagctttagaatttaaaaaattaagccataggaataaaacacctaaaagtcaggacaggtccccatttgaatttgttcagctgttgtccttgtaaaagctcctgacatcactttgctctctagaactgttcaggggccaggggacttgagactaaaagtcaggaagcccaacaaacagacaattttaaactgagaaatacagtttatttttttctgtaaacctgatttttcccccccttggagaaacactagatacattttaagagatgaataatctgtatataaatattgcta

SEQ ID NO: 96923 - DNA, 533 bp, Homo sapiens
agagtactgggccaggactggtgttgctaccacttgtaaagtcaaaaagcctgagccgatggtaacgagtggtactgtttccgtttcttttccatctattgcaactttctcaagcattttcagctctgaactttaattccagactgtattttctgtgagtcctgatcaagtgatacaaatgagctgcaatggtgacataaactcttgacagagattggaaaagtagctggaacaccatcttttcttttaactttttatggtgcttctgttggcatagttggggaaagcacctacaacatgagttttatcatgaagcttcacagacactttcaaagaacagtcattctgcttgccactttttgtatggtgagcattatcatttctgcttactacctgtacagtggctacaaacaggaaaatgaactctctgagacggcttcagaagttgactgtggcgacctccaacacctaccatatcaactaatggaagtgaaagcaatgaagctttttgatgcctcaaggacagaccccac

SEQ ID NO: 96924 - DNA, 410 bp, Homo sapiens
ggaaggagcccctggagagaggtttaagccaagtctgccccagggaagtgtctctggctggttgtgttttcagggactgagctggtgcctgggactccatctttgtctggggtaccgcattgtatgtagtcacagccttaagtaatggggagcactggagggctggggcttggaagagatacaagctgagaggagcaaagaagctggcagctgatagcaaaagaccagaggctcacaaacatgcagtttgcaaggaaagccaggaacaagggtcagctcccaaagaggccccttccacacccatagcagtcccttagggtctcttccacccccttagggtctctgctaccctcttagtgtctcttccacctgcttagggtctcttccactcctggtcagcttggaggcca

SEQ ID NO: 96925 - DNA, 215 bp, Homo sapiens
agagatttcaccactgcactccaacctgggcaacagagcgagactccatctcaaaacaaaacaaaacaaaaaacaactaaagtagggtaagtggcacagagtggtggggtgttcagattgtagatgaggtggccagggaaggtcctttggataagatcaccatatcactgagggtcttgttagggaaacaaactacgtgtttcagagaggggaaa

SEQ ID NO: 96926 - DNA, 504 bp, Homo sapiens
cggactggaccagctgttgggctttgtttgctctttttacgaattgaaaaactgaagccaggagcggctgggtgacgtcccaggtcactccttactttcctccccacgctgagctcagacgacttcccgtgacaccactgttggtggcggaatgggactgtggctgcttccgctcagccacgctccctctctgtggacggcggagggtgtgtgtcccagcccggctgccgccctcccttaggtctgtctcccggggctgctgtaacccaggctcacaaacctggtggcttaaagcagcagaaacttagtctatcagatctggaatccgcgtcgattggccatcatccagccatcggtgttggcggggccacctccctctagggcctaggggaagagcattccttgctgcctccagcgtctgggtgctgatggcattccctggccagtggccacctccctccagtcgctgcctccgtgtcccatggccgcctccctccagtctct

SEQ ID NO: 96927 - DNA, 437 bp, Homo sapiens
gttgatactttggaggattgacaggtttgacaactgagaggtgcctgggaagaggttggttcctgttgctgaggagtaccagcaagttttgaagggtggcaatgggaaggatatgatgtgacaaactggactgctaatgggctgttcgagtgaagatgtctgtcatacctttacagatgcaggtctggagctcaggagggaggtcagagctgaacttgacatcatcaatatagaactaatcattgaagccatagtatggcatcattgggaggaaatgaggaggaaaatatagaaatacaaagatgtcaaggaagtagccttggggaatgcccacctctgggaagtgggaaaactctaggagtagccagagctcaaagaatctgtgaatgagcatagtgtcctaggaggaaggaatagtcagttttgtgaactactac

SEQ ID NO: 96928 - DNA, 436 bp, Homo sapiens
cctctgatgactatcttaacaagttcctgccccgtgaaatacaggttggaaagggggctggaagagggaactggagcttggtactaagctgcttgaggtttctcagaaggggtatggccaggaggggtggggccagaaacccctaaaccagaactgaaatgtctcactaagcagctaggaaactttatgtaagttaaacctctttcccatccacccactcaccttcagtccccaaaaagtaaaggcacaaaacatagcgtttgcccacaggccaccagttctctggggttgaggggctgatcctattgcaaagtcctaagtcagtagctgagggtaggagacggctgggagtgcagtcagggttctcccttcccaggtttgatgggtccttcttctggggtcaggtaatgaaagtcttgcggcacaagtacctcat

SEQ ID NO: 96929 - DNA, 219 bp, Homo sapiens
ttgttttatttgaatattagcacatataagaataaacttttgggaaataactacttcctattctgcccaccctttacttaagcagtaaagtacctcttttctaaagaaccaggaaacatcaaaataaccacaacaaaaatctaaacagttttcaaataatacattcagttctcataataataagggctatataccatgggtccacacaaactgtgctgc

SEQ ID NO: 96930 - DNA, 1029 bp, Homo sapiens
tcctgggtctgcgcccctcccctctgcggtacccgtgtcctgcctagtaggggatgggggtggctttccagcacagccagccctcaagtttcccagaacagtctccccacctccccccaacactcgacattgttcctctctggctgttttttcctgttcgggtcccttcaaggcccaactgtgcccagccctctgcagctggggacactgagtgggttgggggtgtatgtttgcaaggatagaatttctcatgggggagtggccctgcttcctcccctagaatggcttggggcttagggctggggacttgccctccatggaggtcagtgggagttgcagctgcagcgagggggctagcgcagtgcccagctcgctgggtgacctcgggcacggctcgtcccctcctcggcttcagtttgcctatctgtatgttggagcttctactccacatttcttctcccctaactccagcccctgaaaccgtcttccccagtccctccccgggctgcgactaggttggacctagaagcacacgggaccaggctgggcgaagaacactgacgcccagagccgaataaacaagagttccgtgtttcagtctctgcttctctgtacctatttcgacctctcagtcgaggctgggtctctaatatacctttctctattagccatgctgcttctccctcacggaagtcccactgtctaccttgaatccaacccgctgtggcgcctttcttgccaactcaatccatgcaccttccgtgggtggttttggcgggccgtcctgacccccaaacatccctcctccctccctggcgtgaaagggctgagatttgctccggcaccctacgcgcctgacgttataatgcacctggggtgggctgcgacctcccagctgagccttgttcctcgaagagacaggagactaagagacaatgagctgagtgaggagcccaggaacccgggttccgaacagctgcgtagaatgcgagcggccaaatggtggagaatctggccgggtaaaaggag

SEQ ID NO: 96931 - DNA, 1694 bp, Homo sapiens
tcctgggtctgcgcccctcccctctgcggtacccgtgtcctgcctagtaggggatgggggtggctttccagcacagccagccctcaagtttcccagaacagtctccccacctccccccaacactcgacattgttcctctctggctgttttttcctgttcgggtcccttcaaggcccaactgtgcccagccctctgcagctggggacactgagtgggttgggggtgtatgtttgcaaggatagaatttctcatgggggagtggccctgcttcctcccctagaatggcttggggcttagggctggggacttgccctccatggaggtcagtgggagttgcagctgtaaggtggcagggcctacccatcttacagaggtgaagacgaggtccctctgcctctgctgcagacatggcgtctgcacccacccttccaccctcagggcctggccacggggtcctgggtcccccacaatactgtgcactcgacctggttgacccaggacaccctcctcgttgaacagccctggctacacctgcttcagtgcaactggagccctcaccggcgagtgcctgacacctcggccttttctcttccggaggggcgctcctcagtgtgtttggggtctccctcgctccacgccctccagggggccgcatgtgcacttgccctgcattgcctggcccccgaggttccagggtctcaactgtctactaaccggcttcccgacagggtgagggtgaggtcgcatctacaaccagagccagcgcttccccgccgccaccccttttcttggaatcccgctgcttagctacctgcgggtgtcattggccccgccccatttccccacgctttgaagggggcgagtctccacagacctcctagggggatagacagcagctggtgtgaccccacacacccagtgaggtctctggagccgcggtgcgggaagcggggacccgggtttgaatcctgcccctctggtgtggtgcggcctcttcccacagacttttggcctcagtgttccccgcctgggaagtggggactggccctggtacctggctccagagctgcacccagaggcgatcagcccggtgcgggaacggggcggggtggccgcaactacgggccacggatcctgacccgccctgcccacgatgactatccacatcctcatcctgctgttgctcctcgccttctccgcccaaggggacctggacactgcagccaggcgaggccagcaccaggtcccccagcaccgcgggcacgtctgctacctgggcgtatgccggacccaccgcctggcggagatcatatactggattcgctgtctccaccaaggagccctcggggaaggccagccacgagccccaggacccctacagctatgggcgccgccggtggcgcgaggcggaagcccggctcggttcccaggattccggcctgcagcgagggggctagcgcagtgcccagctcgctgggtgacctcgggcacggctcgtcccctcctcggcttcagtttgcctatctgtatgttggagcttctactccacatttcttctcccctaactccagcccctgaaaccgtcttccccagtccctccccgggctgcgactaggttggacctagaagcacacgggaccaggctgggcgaagaacactgacgcccagagccgaataaacaagagttccgtgtt

SEQ ID NO: 96932 - DNA, 845 bp, Homo sapiens
gtttctcaaggaagccatagtctgtcttaaaatgctttaggacagctttacttttgaccacatgaccagagtgctctggaagcttctgatgcttcaacctaaaagttccttgaccccccgcccccccccttttttttttaattttaaaacaatagtatcttcattttcctgacacaaagtagcgagtgacctaggaaaatcaagtctgagttaactttaattctagaacggtctctttgtggcagtgttttctgcatcacaacaaaatctagataataactgcttagtttgtgatatgtaggtaattttcaaaaattttgttaatttcctgaaaagtttggggggtatctattttggataatgcatttattttaaaggtagataggatctttctctggtaggttttgcttgttgcttttagtagccacggacctgggctttcatcctgctgcttttcctctcttctgtcttctcctggagctgttgagtcaccagggcacacagatccctcttctccatttcctggggcacctgtttggcctcacccctctcctgcctggactgttgtaatgctctccttatctattttcttaccttttctgttctctgccccatcaggccatttaacacactgcttccctggtggtctttctgaaacagcaatgtgtctcttccctctccagaattcttcaagtctgacctctgttccttacagcataaaatatataaactctttagtgagatagaaagtttctttattgtgtagcccagtggatttcagcctttttgtgtcattgatacatttccatttcagaatttttagctgcataatggaaatgattgaa

SEQ ID NO: 96933 - DNA, 399 bp, Homo sapiens
agcatgggatctggattcagtagcaggcaggaaatgtggctctgtcaggatagcagcaccacctcagctcctcaaggtttgcagaatgaccaaaaggcctacaaggccagggtgatctcagtcattttagggtattcccagtcacttataacaacaatccttcactgtgtataagatgtttaccaagtgtttccaattatattaacttgtttgatcctcttaatatctcttaagaagacagtactctgaattcaaaaccaaacaaaaagaactgtaaatctccattcattatatttcctttctaattgggatatgtaagctttatctgtaaaattaaaaaaaaaaatctgtgcaagtagccaacattctaaagcactcaagtaccagtcggtacaggcc

SEQ ID NO: 96934 - DNA, 387 bp, Homo sapiens
cgtttattattcagcgatcctgcaacagctctggacaccttcctcctccagcacggagtcagggattactttctgttaaccatatggccctttacaaagggctttctcaaatgtgatctcattcaatccttgtaagagtgggacaggaaggcatagtaggcatcctcctcctcctcctcatttcatagcaggagctgagcctaagagactgtcagtttcccacctgggatcagagaggccctgactgcacagtgtaaccatctggagggctttttttctttttcaagacagagtctcactctgttgcccaggctggagtacagtggcccgatcttggctcactgcaatctccacctccccggttcaagtgattcttgtgcttcagcc

SEQ ID NO: 96935 - DNA, 347 bp, Homo sapiens
tcccctcagagaggaaccccaacaaccaatgaaactactccacaccaaggagagatgagggcccagagccaggccaaggaatctggattgctacctgcctgagttatggttgtaatgagaatgtagtaaggccagattctatataaggtactgtcacacaattacatggatacaaaaagagtggggtgaaaagggagattcaaacatgggacgtaggccaggcatggtggctcacacctataatcctaatgctttgggaagctgaggcaggcggatcacctgaggtcaggagttcaagaccagcctggctaacatggtgaaaccccgtctctactaaaaatacaaaa

SEQ ID NO: 96936 - DNA, 544 bp, Homo sapiens
ttttaatagagacggggtttctccatgttggtcaggctggtctcgaactcgctacctcaggtgatccgcctgcctgggcctcccaaagtgctgggattacaggccaccgcgcccggcctccaggctcctgaatcttttgttttcctgtttcgatttttctgggttaatttataacacgatcttgtctcagcttttccacagagccctccccttcacccttccctcattgttcaggaaagcttaggccacgtgacagtgaggggagtgcccccacaatgattatgtcagcagctgcttggaggcctgttcatctactacccacgtttccagggagccctgcgaggaactactcatcacggtcctggatggagggggctgtgtaactgcagctctcctgagcccagactaacattttattgcctgcaaatcgtgcccctgttctctttctaggactactcatctcttttagagaatcagaattcccagccccctttctcctgttgacactcttttcccacctccccaacctatccttgtttaaaaa

SEQ ID NO: 96937 - DNA, 400 bp, Homo sapiens
taattttcccaataaagagcacataatttacaaataacaataaaatgttcagtattctttgttctaaattccatgtacccaatcgtttctttaagaatgtttttattgatttttgccaaattattgtatctatagctaacctatgggtgcaactgatgaatgaatatagtcccaaaataatatggttagtatttttggttaccttagtaggtaagaagaaggtgaaaccaaaaagacctgtgttggaacctcatttgctcctccataatattagtaacttccttactgaatcaaataacagttttcaaataatagaccaccactatttttccagttttgtgctgctcatgatgtaatgtctacaaacacagcacactttgaagtttaatatgtaatattt

SEQ ID NO: 96938 - DNA, 830 bp, Homo sapiens
gtctcatcatctggttaccaggatatttcctttaagtgttttctataccaggacccattcatatagcagttaattacaatggactttctaaggtgaagaaagaaaagagacagggaagtaacctgaaagatcatttctataatttttcaaagtttatctgcaacaagcagaaaagtcaagataactaccaaattgaactacaatatagatagatgatagatagatagatagatagatagttaaagatagatagatacatagatagagataataggtagaaatagataagtggaagaactttcattgtttttaactgcacaaaatggaagttgtcctaactcgatatgcatagatcaaggcggacttataccaatgagaaaggaacttctcagttgacagagtttaattctagtgaccctggcattcatccatacattcacttatttgtcacacatttattgtatcagaaactgaagaggaattcagggatgtaagacttagtccctgtcttcaagtagctcgcgatcgagaatgggagaaagatatgcaagagtataattatcatgcaatgtggtgagcatgatgatggccacagtgagacagtgggtcctgggagtgagactcacatggaacatgagagtgagaatcagagaaggtggattgctagggagatgaaggtgagttttttaaaaaacctctcacagcctaaaagcacagcatggcaaagtcacagagttctgaaacagcctgaggttgttctgcagatagttcagggaagacatagaccgggggtggggagtgaggaagcatggtagaagaagggtgaccag

SEQ ID NO: 96939 - DNA, 229 bp, Homo sapiens
tacttgaaaagggtcaattttgtggtatgttaattatacctcaataaaaataaaagctataataaatgtttaatgtcttccaaataccatgttctcatacaggctgagttcccacccaggcagccccagatacctacagtttctgtggccagtgacccaccacagctatgtggtagcctgcggaacaggagaggcaaggtcatcctcattacggctgagtcacaaatgc

SEQ ID NO: 96940 - DNA, 325 bp, Homo sapiens
ttcctcaacccccatagtccgtcctatacaaaggagttctctgtggagtcatttaccttgcttatttggttggtaaattaccacctgttcctgttgatgagtttgcagagaaattcacagatgttgctgaaattttcagcctagccatgttggttttgaacagtgactggttttgctttttgtgaagaaaacacttgctcgaacagcatcctttgaaggagacactgtaaggtcaaaattcttttgctggctgcctcaagctactgagtgaaatcacatttcactgtatacttttgtcctcctttctaactgatagagacatgcc

SEQ ID NO: 96941 - DNA, 281 bp, Homo sapiens
attgatgtatagtgggtaataatgcccagatcatgaacagtgatgccttggcaacattatttgatgcttctccaaggtaaagcacctgtaactgaaaaagtttataatgtggagtgcgtaatatcaagggctttaaaaacaaaaacttatgctgtggatacctgctgtttatttcatgcttattgctgccatatgtgcggatgttttgtgtaagagcagtctgctgttgtgagctgtatgcagaggaatcattagtgaataccccccccattgaagcttat

SEQ ID NO: 96942 - DNA, 3870 bp, Homo sapiens
  misc_feature (2)..(2): n is a, c, g, or t
  misc_feature (64)..(64): n is a, c, g, or t
  misc_feature (264)..(264): n is a, c, g, or t
  misc_feature (454)..(454): n is a, c, g, or t
  misc_feature (548)..(548): n is a, c, g, or t
  misc_feature (573)..(573): n is a, c, g, or t
  misc_feature (1119)..(1119): n is a, c, g, or t
  misc_feature (2056)..(2056): n is a, c, g, or t
  misc_feature (2093)..(2093): n is a, c, g, or t
  misc_feature (2109)..(2109): n is a, c, g, or t
  misc_feature (2766)..(2766): n is a, c, g, or t
cngtttcctccaatggtaacatcttgccaaactataggacaatgtcagagctaggatattgacnttgatacagtgaagatacagaacagttctaacaccacaacggtctctcatgttggccttttatagccataccagcttcccttctccttaacccccataaccactgatttcttctccatttctataattttatcatttcacaatataaccatatagcatgtaacctgtgggtttggctttgttcactcagcagagttctgnggaaattgggcaggttgttgcagtcactggttcatcaggtttaagactaggatacatgaggcaaagggaaatcccagagacacacttctgtgtgtttcgttgggtccccagtctgcctttttccacctttcagagtcttctgtttttttccccatataatgtacagggttctgagttatacttagtgggngaaatagggtaaagtatgtctaattcatcttccctgaagctgaagtcagtgagattagtttcctaaagttgcaaatagccaaaagctttgctcnggtgaagtctaatgactgcaggttnaaaatttttggtttggataaattggtatttcttattcaaaattgctaagaccatatcccagctctggggttgtaatttggattttgagaaaagacagaattttaggaaaatgctgagtagaattaagaggaacaaatttctcatatggtgattattctttcattctgattatagaataacaagctgaagctatgaaaggtcatcttttccatcagatcacgaagaccaaggcttaaatcatcttaggcagagatttcaatttacaagttgtcttgggagaaaggaaaatattcaggcatacctctgagatattgtgggtttggttccagaccaccgcaagaaggcgaacatcataataaagcaagtgacgcaaattttttggtttcccagtgcatattaaagttatgtttacactatactgtaatatattaagtatgcaacagcattatgtataaaaatgtacataccttaatttaaaaatactttattgcttaaaaaaatactaacaattatatgagccttcagtgagttgtaatctttttgctngtggagggttttgtcttgatgttgatggctgctgactgaacaagctggtggttcttgaaggttggagtggctgtggcaatttctttgtgtgtgtgtgtgtgtgtttgtgtgtgtgtgtgtgtgtgtgtgtcttgctctgtctcccaggctggagtgcagtggtgtgatcttggctcactgctgcacctctgcctcctgacatcaagtgattctcttgcttcagcctcccaagcagctgggattacaggcaccagccaccacacccagctatttttttacatttttggtagagacacggtttcaccatgttggccaggctcgtctcgaactcctgatctcaagtgacccgcccacctcagccttccaaagtgctgggattacaggtgtgagccaccgcacccagccagcaattttttaaaataagataacaatgaagtttgtcacattgattcaactcttcctttcacaaaagattcctctgcagcatgcaacgctgtttggttgcgctttacccacagtagaacttttttcagaattggaatcagtcctctcagtccctgccactgctttatcaattaagctcatgtaatattctaaatcctttgttgtcatttcaaaaacgttaacagcacctttaccaggagtagtttccatctcgagaaaccattttcttcactcatccatatgaagcaattcctcatcagttcaagttttatcatgagatttcagcaattcattcacatcttcaggttccacatttagttatagttcttttgctgtttctatcacatctgcagttacttcttccactgaagtcttaaacccctcaaagtcatccataaggactggaatcaacttcttccaaactctcgttcatgttgataaaaatgtcaatacctcctcttctgaaccaaaatgtatttaatggcatcgaaantggtgaattctttccaggtggttttttgattggcttngctcagctctatcagnagaatcactacctatggcaactatagccttacagagtatatgtttaaaataaaaagacttgaaagccaaaattaccccatgggatgtaaaatggatattgtgttatcaggcatgaaaacaacctttattttccttgtgaatctttatcagagctcttgagtgactaggtgtgttgtcagggagcagtaattttattcatatatttttaaatttattttaagttctgggatacatgtgtataatgtgcagaattattacataggtaaacatatgccatgatggtttgctgcacctatcaacccatcacctaggtattaagcctggcatgcatttagctatttttcctgatgctctcccccacttcccccaagcagtaatatttttaaaggaattttttttcccctgagcagtagatctcaacagtgggcttaaaatattcagtaaaccatggtagaaacagatgtggtgtcatctaggctttgttggcgccacttacagagcacaggcaaaatagatttagcataattcttaagggccttggtatttttggaatggtcaatgagcattggtttcaacttaaagttagcagctgactttagctcctaaaaacagagtcaacctatcctttgaagatttgaagccaggcattgacttctntctagctttgtaagtcctagatggcatcttcttccaatataaagctgttttgtctacgttgtttgtttgttgattgattaattgtggcccaggctggtgttgagctcccggcctcaagtgatcctctcgcctaggcctcccaaagtgctgggattacaggagtgagccactggcccagctgaaaacctgctgtttcatgtaaccaccttcatcaattatcttagatctttccaattgacttgctgcaccttctacttcagcatattctgtttcactttgcacttttatgttatggagacaatgtctttccttaaacctcatgacccagcctctgctagttacagatttttcttctgcagcttcttcacctcatttagccttcatagaactgaagagagttagggccttgctctggattaggctgtggcctaaggaagtgtttgatctattttgaccactaaaactttctttacatcagcagtaaggctgtttcactttcttatcatttgtgcgtgaagaatcacctttaatttccttcaagaacttctcttttgcatttacaacttggctaattggtacaagagagctcacttttggcctatctcatttttggcatgcctttctctcaaagcttaatcgtttctagcttttgctttaaagtgtgagatctgtaactctttcagttgaacacttagaggctatcaaaaggttattaattggcctaatttcaatattgtgtcttagggaatgggaggcctgaagagagggagagagacagggaaatggcctgttgatggagcggttagaacaagtacaacatttattaattaagtttgctgtcttatatgggcatggtttgtggtgtccaaaactattacaatagtaatgtcaaagatcactgatcagatcatcataacagatatgatgataatgaaaaagtttgaaatattgtaagaattaccagaatgtgacgcagagacatgaagtgagcacatactattggaaaaatgtgctaatagacttgctcgctgcagggtttccacaaatcactttgtaaaaaatgtactatctgcagagcgcaataaagcaaaatgcagtaaaatg

SEQ ID NO: 96943 - DNA, 321 bp, Homo sapiens
ctcattgcttaagtatggatggcacatagtgacttccttcgaaagaatgtgcacagggaggaagtacagtgacatcacagtggagaagcccaggaaatccctcctccgccaggtgatcaaggtgaacgtcaacagtgatgaatcatgttgtttgtacataaccagagtataatgggatggaaatgtctcttcacttctgtggtcttcctcatacacacagacaaaatccgaaagccctgtccaaccatcagaaaacactagacaaatttcaatagagaggcattcgacaaagcacccagccagtgctcctcagagctgtca

SEQ ID NO: 96944 - DNA, 453 bp, Homo sapiens
ggaaacgcattcttggttgcagagagaggaagtggcttgcattgttggacaaaaagaaaaatgattgtttcctagggtcactgtcctcagcctccctttagagagcctggatcttgcagccatcagttatggaagtggctctgggaataactttgccctgggtgatgattgttgatgaaaagagtcgaagtgtataaaatatttgaagagatttattctgagccaaatatgagtgaccatggccagagacacagccctcaggaggtcctgagaacatttgcccatggtggtcaggacgcagcttggtttaaacattttagagaggtatgagacatcaatcaaatacatttaagaaatacattggggctggctgggcgcggtggctcatgcctataatcccagcactttgggaggctgaggtgggtggatcatgaggtcaggagattgagacca

SEQ ID NO: 96945 - DNA, 385 bp, Homo sapiens
ttctgtggaaggctgcagtttgggattggttctcaggtgtctttctaactgctttctaaggatgaagacggccgggcacggtggctcacgcctataatcccagcactttgggaggccaagacgggcggatcacgaggtcaggagatcgagaccagtctgggcaacaagagtgaaattctgtctcaaaaaataaacaaacaaaacaaaaccatatgatccagcaattccattttggggcaagaattcaaaaagatatttacacatccatgttcattacagcattattcaaaatatccaagaggtgaaaaccacaaaaacgtccatctaaaggtgagtacatgaagatgtggtataaacatacaaaggaatattatgcagccttttt

SEQ ID NO: 96946 - DNA, 260 bp, Homo sapiens
ggtgagaggaggctaagacattattcaccagttgcagaccccagaaaagagggattctggccactgtgttccaaagtggcccagttgtgaaagggaagacatttgggcctcagcctgccttaaaagtgggaatatccttgaacaatcagaaagcattgtatttttccaaaagctcttggcagcagcggtgctatctccagggtagcggctgccctcctctgaataatgagaaaattataattattatcaagaattattat

SEQ ID NO: 96947 - DNA, 176 bp, Homo sapiens
aattttaattattataggtcatttagaaaccatgcactataaagtatttagaaagaacttggtagtaatttttggaaaaaacattttctccaagcactgtttaaaacagctcaacttgggccaggtgaggtggccatgcctgtaatcccagcactttgggaggccaaggtaggcag

SEQ ID NO: 96948 - DNA, 456 bp, Homo sapiens
gacttataatgtctgggcttgagttgggtgattcaggggaggatccaggatgctgtcaggaagaaggggatgattctgtgcttggctatcttaataattctcacctaaaaggctaaaagaaccgtgtgaggctaaagccactgttggcagaaaagcagccatcactgacatcagccaggataggcgatgagggatcatttttttgtttcaatcttcttgctttggtctgagcagacaaaattgcaggcagagtggtcttattttggtcttgatctggtgccatcatgcatgctcttgtctgagttggtgtttgtgagatcgtccctgttcagtgggacacaaggccagccgtgagggccagccctgctctcttcccactcctctatgtacttatcagtcacgtaacacaacgtgctctctctatggtgtagaagcatggggtcatttacaggggca

SEQ ID NO: 96949 - DNA, 130 bp, Homo sapiens
agcctcccaagtagctgggattacaggcgcccaccaccaagcccagctaattttaacagaattctccattcttctgtgcttgggcaggggatagacaaagccaagataagccaaatcaaaggtcactctt

SEQ ID NO: 96950 - DNA, 863 bp, Homo sapiens
ctcctgctcccagcccagccaatcaccattctatgtcctgtctttatgaatttgactgctctagagacctcatataaatggaatcatgcagtatttgtccttttgtaatgggcttattccacttagtataatgccctccaggttcatccatgttgtagcatgtgctagaatttcctccctttttatggctgaatactattctactgtatgtatgtacctcattttctttatccattcatccacatgtggatgtctgggttgtttccatctttaggctattgtgaataatactgctgtgaacatgggtgtacaaatgcctcttcaagactgttttcagtttccttgagtctatagccagaagtggagttgctggatcatatggtaattccatgtttattttttttgaggaactgccattctgatttccacagcagctgttccattttacattcgcatcaacaatgcacatgggttccagtttctccacatccttctcaacactggctgttttctttctctttttcttctttttaaataacagccatcctcatgggtgtgaggtctaatcgtggtcactttagttattttatttttaaaaatgttttttgagacagggtctcactctgttgctcagcctggagtgcagtggcatgatctcagctcactgcaacttctgcctcctgggttcaagcgattctcctgcctcaacctcctgggtagctgggattacaggtgcctgccaccatgcccagctaatttttgtatttttagtagagacgggttttcaccatgttggccagggtggtctcaaactcctgacctcaggcgatccacccacctcggcctcccaaatacaggtgtga

SEQ ID NO: 96951 - DNA, 499 bp, Homo sapiens
  misc_feature (432)..(432): n is a, c, g, or t
atgcctatcctttcccctccaggtttaaagtcttcgcagattatgaagactacattaaatgccaggagaaagtcagcgccttgtacaagaacccaagagagtggacgcggatggtgatccggaacatagccacctctggcaagttctccagtgaccgcaccattgcccagtatgcccgggagatctggggtgtggagccttcccgccagcgcctgccagccccggatgaggccatctgagcctccagaccagaccccaaaccagcccttgagtctgtcacactctcttgggccagccccagcacctcatgcagagggtggggtactggagttagatctctaagcccctcctggaaccctcattttccccactctcaatgtcccagtgtccagcgtgactaaggacacgggcccccttccgtcctcgggctcncggtcccctcctatttatggggtctgaccaactgcacccactccctaataaattcattctccttggg

SEQ ID NO: 96952 - DNA, 611 bp, Homo sapiens
ccaaagatatccacagcccgccgcggagagaaaaaaagctcagagaaaacctttccccctgatgctttcctgaaagctcctgcaatcagctacaggtcagaatgttcatctccatcacgggattccctctgagacacacagaaaagagtatgcaagatagtctggttataggcttctgatgatattgcttaaataactttaagaccatacacttcgctcagtgaagatctccagaagtctgcttcagaaattgatgggttcatgacactgctaacccaagatgcaacaagactggaattgattacatggtactgaatgaactgatgaaaattgattataattttatagctttttggagcattgctggttctttaatgttctagtttctggacttaagaaatctctttctcttaacctaactgtaacatacaatttagtagattatacttttgaaaacagaagtgaagcatttatcttttttcccctgcctgatttttccagaattttgaaatccttactgaacactcttattttcacgatgatatagttgttagcaaaagtccaataagaatctgttcaccttgaacagagacctcagaaataatgccgca

SEQ ID NO: 96953 - DNA, 169 bp, Homo sapiens
tcacgcagtgtcatcttattcaagtccatttgagaagcggtgagcaaattggctaggcctttattgttgatgtcaaattctctttccttgctcaccctataggtccaggccagtttcctttcatcctcccaaagctattaacacgatagtgtgaatttgatgctgttga

SEQ ID NO: 96954 - DNA, 480 bp, Homo sapiens
aggtgatctagaggatccgtttggccctttccacagttctccagtggcttccactgtggcattctgcactgaaccccttccgtacctcttaccaagtctcagtctggctggtcatcaggaacctgtgtgccctgccctccaatgcacgcacacgaacatggccagccttgaagcacttgctgttcccttcctgcttccttcctcctctccctgtccatccaggaccatctcctcctaggtctctgagttctttgagatctcgcaactcttcttatgacaccacacagatgtcccacaccacaatttaatagctggttcctatgtcaggctatgtgtgggcctgcatgacacctgcttctgcacgaccatcacttggagcaccagctgtacacacacctgctgagcccatcctacatatagacactgatgttaatgagtttaggttggcaaacggagtaagtggattacaatagtgggttt

SEQ ID NO: 96955 - DNA, 125 bp, Homo sapiens
agacacaggccagtctgtgcaggcccttcaggttattgaagtagtttgaagatgccaataaatagcacccctttctccaaatggatctgttttttgtttgtttgttttgagacagagtctcgttc

SEQ ID NO: 96956 - DNA, 508 bp, Homo sapiens
tttgtacctatggagtagtttttctctgcaagtcataaactcccaagcccaacaggaagacaggatgtagccctgaaaggtcaactcagtcatccccctgcctctgggctaaaaccaggtcatgaattgaatgtgatccattctcaggatgtttctctagttcctgctcctgcccaacctaaatctctctttccaggactgagagaagccagctgtcatgctccaagggagatcagacacacactgccttgtgtgtttgtaaactggatggccctcctacttgacctagccttctctagcccctctccccttcatctcccctccacctctgagcacacattcagagacgtcaaaccaacagattcaagccatggtaacccaagaggtgaactggtggccaaataaaaccaagcagcgcacgccacactcaaagaaggaagatttttgtatcatccattttctggcagtgttcctgtcctggctcgttttagattcctttggatccctg

SEQ ID NO: 96957 - DNA, 899 bp, Homo sapiens
gtaaattctgggtttcagaaaaagttaggggtttgatttgtatggcatgaaagacatgtgacaaggagtattatggtgtagtgttaatatgatacattaaggccaggtcatgagattctcaagtgttaatttaaaaactttgggctttctttagtaggcaatggagggtgagtgaaggttgctgagtaggaaaatactaatagatatggctagcatattgattaattttcttcttacaatgatcagattaggaaggtgctattgttgtccttattgctcatataaggtaaccgagtttcaaagagtttaaattatttgcaaaggcttatacagccagcatgcagtaaagccaagatttatacatatgtaggctgactccagagcccattgatagttcctccttgaatttgggtcacttatgtggagagtccttgagcaatagtataaacataaagaaagcacttggttaagaagagtctgccacagggaaggtattggtgatagaaagcagactagtttcagtgtatggggacctgggttcttgtcttaactctgttcctctcaagctatgtgttcttagtaatacaaaatctctcagcaacatcctcatccataaaatactaaataaaaatatgtgctggaaattttttataaactacaaagtctacaacttgaaaaaatcaatggagaaaactttgcaaatgaaagattattagaagctatttcaatagtctaggtgtaaaacaaagtagaataatgacaatagaaatggtagaagggacaatgatcagagatgggaactgtatgacaggattaagagttttgtccagtggcaacagtaatgttataatattctttccccagcttagtacatctaataatacatttgactagattac

SEQ ID NO: 96958 - DNA, 173 bp, Homo sapiens
ttagcagacagtgatgtggagaatgggtacctcctgccagtgtctggacattgctttgtgtggtcgatactgcagaggctacaactctggactggtgactgaactctaaccagtgtggaatccactacggcttggaagttgtttactagcaattccacagctttagaagtaca

SEQ ID NO: 96959 - DNA, 141 bp, Homo sapiens
agccattgtgtttctgcttccttctgtgatgccttactctatggttgtttctgccctgtttggcttgggattcctgggttccttgcatgcatgctgtagcataggattgggtgttggtactagttacatacatgaggctag

SEQ ID NO: 96960 - DNA, 1369 bp, Homo sapiens
ggccacaaatcaacaacaacaacaacaacaaaaaacaaagcgcacacagagactgaggtcctctttggcattgagaagatggctatgcaagtcccaactagcaagtgcaaacttcccagcttcacttctgccagtgtcccttcaccccttctcaaccccactgggaggcaggagggtgcttgacaataacagccttggcatcactctgccagggtgtaataggaactgttacaattctgagattctgtgtaagcactggcctttctgcctagaatgccttctcctctcttttttaactgcatgctcctatttatctttcaaagcccggaaaaaataacactgcacacgggaaatgctcccttcctactgcagtcatttagatgactctatgccattccattcatttctctttcctaccacagaagtgctttgagattttggagtcagactgcttgaacttgaatcctggccctctcatcagagacttgacttattttaggcaagttatataaccaattttacctcagttccttacccataaaatgggtctaatgagagtacctaccacacagaattttgatgaaaactgaatgagatgaaggcctttaaggcagtggtccccaaccctggggacacagacaggtaccattttgtggcctgttaggaactgggccacacagcaggaggtaagcagtgggtgagtgagatcagcgttatttacagctgctccccattgctcaccttactgcctgagctccacctcctgtcagatcagcagtggcattaaattctcatagcagcacaaaccctgtcatgaactgcacatgcgagggatctaggttgtgcgctccttatgagaatctaatgcctaatgacctgtcaccgtctcccatcacccctagatgggagtgtctagttgcaggaaacaagctcagggcttccactgattctacattatggtgagttgtataattatttcattatataatacaatgtaataataatagaaacacagtgcacaacaaatgtaatgtgcttgaatcatccccaaaccatcccagtccacggtcttccacattttgtcttttcacaaaattgtcttccacaaaactggtccctggtgccaaaaaggcttgggaccactgctttaaagcctttgcatagtgcttagaattgagggggaaaaaaaaaacaaaaacaatgtagctagttgctacaatcactatattggtgagtttcaaaaggaaaagaattctgtcccatttatgcttgagccttgagttgctaaccaagcctgacacaaaattactgttgaagggatgtgtgagtcctaattgaaatgaggcctcttaagggaattgtggaccaa

SEQ ID NO: 96961 - DNA, 740 bp, Homo sapiens
agatgaagggggaaaacagatcacaaattttgttgcacaccgagtccctgctaaggcactagaatttcatgtcaacatgaaatcctggtctatgcttttatcagaaaattgagtgtgttagaaacttggaggtctacagactgtcatttttatcctttgaaaaaaggccaaactctcatccagcgagtccaggtgagcttatactaatttccctggatgtcattttaattgtttatttgtatgatttgtttattcaaagagacataattttaaaatatttttataggtctgaacacagagtggccattgaataaatacagactaattagacggccatttggagcacgattttctaccctttttttctcccaaatttcttatcaaaattaaaacctaatgaacaaatagaactttaaatacagaatgtgacaaactggaatgcaaaccctcacatctgtctctctcagattttatcaatttgcgatcttactctctccacgagtcacacagcaatcatcagataaaacagatggaccaggctttctggaataagaaaacatgcttttgtattgcctctaccgaatttgtctcagctgaactctatatcttcgttgtagttacttggaggaagggcaaaatcaagattagaagcacaaacagcttgttttcttcatatcttaagagaaagggagtatgagagaaggtaataggagagacagtaagtgggcagtaacttcctt

SEQ ID NO: 96962 - DNA, 103 bp, Homo sapiens
tgctgggattacaggcctgagccaccgcacccagcctgacagacctttatttttatgaactttagaaaaccaatagcataaatatgaaggactctgactcaca

SEQ ID NO: 96963 - DNA, 779 bp, Homo sapiens
acctctgtggtcttccttccaataacccgtaactcctttcctaccagcagaaaaacatcagacaaattccaaaagtagggcatcctacaaaaggcctgagagtactcctggaaacttgacatcaaggtcatcaaaacaaagtctaaggaagtcccatggccaagaagagcctaaggatccatgaaaactaaatgtaatatgatatcctgatgagatcttgcatcagaaaagggacagtaggtaaaaacgaaggaaatcaaaaagatgggctttagttaatactgtatcaatgttggttccttggttccttaattataacaaatgtatcatgctaacagaccatgctaataataggggaaacgatgtggcttctgtcagaactctgtacagcaccttcttttctttctttctttttctttttttttttttttttgagacagtcttgctctgttgcccaggctggagtgcagtggcagtgatcttggctcggtgaaacctccgcctcctgggtgcaggcgattctcctgccttagtttcccaagtagctgggattacaggcgcctgccaccacacccagctaatttttttttatttttttattttaagtagagacggggtttcaccatgttggccaggctggtctcgaactccagacctcaagtgatctgcctgcctcggcctcccaaagtgctgggattacaggcatgagcccccacgcccagtcagcactttcatttcactattctgtaaatctgaaactgctctaaaaaataaattta

SEQ ID NO: 96964 - DNA, 289 bp, Homo sapiens
cgtatgttccgcgtgtgtgcgcaaggtgtgggtccgggtgcacgggtgtgggtctgtgtgcacgtgggtgtgggtttgcgtgcatgtgggtgcgtgtacgtgtgtgggggtgtgtgcacgcgtgtgggtgtctgcgtgtgtgtggatgtgtgcgtgcgtgtggatgtgtgcatgtggctgtgtgtgtgcacgtgcgcccgtgtgtatgtgcacgtgggtatatgcctgtgcgggtatgggtgtgcacacgtgtgatatatacacatgcatatgtgtgtgtgcatgtctg

SEQ ID NO: 96965 - DNA, 802 bp, Homo sapiens
ttctcagtgttccacctactccctttccatctccttgctgggctaagaaaaggattctgatgaagaaatcaaagttcaggaatggtaaatgttctgatcaaggttgttctgctggagtggtggttgatctcaagcttcccgcaagcctgttgactacagcattgatcagttcgcctaagtttcctgactgtaaatatcatggctgattctaatatcatgcacaaagcctgtcattcagagagatggtgctacaaattgttttacagttttagttgtgttcaaatcaaccaagtataaatcagaatgtcatcaaggctatgagctccacctttctaaatctgggtattccacttccgagaagggttttgtgcctgagaggttgatatctgcaactgtctcaaggctctaacttttcataaacactattgcaaactagtttaggttgtacaagagaagactttcttttaaaaatcaaaagtataggttttgattcatctttgcaagatgggagaaaaaagcagaaataaagtctagcctcccagatgacctcaatattggaaatgacccatgcaagcactttcactgagaagtgaataaaactaggataaattgctgccagatttagtgtacaacaggtctgattttgttgcttcacaactttttttctcatcaaacagtagagtggacttcgacatggagaagatcctgtcaaaacttcactcacactccctaattcagaggggtgagggcaggtagtggggcaaagagccatgatacacaaagtgcaggccactgcccccca

SEQ ID NO: 96966 - DNA, 565 bp, Homo sapiens
tagacttctgtatccccacccgctacattacacttcaagaaatttaacttatatcaatcaaaatttgcttcttaatggatgtacatctcaaactcaatagcccaccctttacaaacactgtacaacccaatagtgaaagcaaaaaaagctatgtagttatttctttaaaaccttcagcagttaagaagaaggagacatatcaaagcatattttttccatctggctccagaactttagttcatgggcaaagtatatggtatttgtattggcaaaataagttgtgatttcaaagcatcatctagtagcactgtaacatagaccatggtgctaaatgaggcatgctagtgaatatcgttcttgtaatagtatcaattgtttcaatatgtaaaactctgtttaaagctatatgttgaatctctactctacttttgggtgtctggccatccaaaaactgaatcccacaagttactaatagacttgaactgagaactatctctgaaaatagatccaaaggcacactttgttccagatgtctcagggaaaaggtgacttctgctctcaaaaa

SEQ ID NO: 96967 - DNA, 293 bp, Homo sapiens
ccaccgcctcacccagctcatttttgtatttttggtagagacagggtttcgccatgttggccaggctggtctcgaactcctgacctcaggtgatctgcccacctcggcctccgaaaatgctgggactacaggcgtgagtcactgcacccggcctaccccacctcttaataccatcacagtgaccatcagcttcagcataggaattctggggacacattgtgaccacagcagctaccttctggctacagtgagtaatgctgctgtgaacatgggcgtacatcccacaatcccac

SEQ ID NO: 96968 - DNA, 224 bp, Homo sapiens
aaagcatgggccagagctttcttttattgtgtttttttgtgggaaggaatgaacgttttttttgtgggaaggaatgagcgagacagggtagacgagctgaacaaacttaggattggatagttcgaataatttggcagaccagagaggtggtctctagctgcctagtacctggctctgaggagatttagagtaagggaagcattggctgtgtgtggtggttgggg

SEQ ID NO: 96969 - DNA, 390 bp, Homo sapiens
tatgtgtgtatgtaaaatgaactgcatagaagggcagaaaatgtttaagtattagaagctaagactttggtatggaattatttaatggctaggcaaacttggaagttatttgacttttctgacctttcccatcccacttataaaacagaggtcaaaacagcacttaaacttcattaaactgctgtattaaaggagattaaatatgtgttatagtttagtataatgtctggcacatagtaaatgatcaataaatgtcatccttattgtaactcttacttcctgtttgcataagcaatctaactgaaacaaaacccttctaatctaattataaaactgagaacatccccatatttccaaactgatcagtactgaaagaaatagtttgcttct

SEQ ID NO: 96970 - DNA, 353 bp, Homo sapiens
gtgcagggaagggaaggagtgtcactttcattagcatttgggtgtcacctagcaaaatagccaggacctcaccacatcaccctgtggagaagcccaaccgccagcaggcctcaccaagcacacacagcttccaatcacacctaaaaatgaatggataagggccaggcatggtggctcacacctgtaatctcagcactttgggaggtggtcaggagttcaagaccagtgtggccagcatggtgaaaacccgtctctactaaaaatacaaaaattagcctggcgtggtggcacacacctgtaatcccagctacttgggaggctaagacacaagaatcgcttgagcctgggagagg

SEQ ID NO: 96971 - DNA, 154 bp, Homo sapiens
ctggtaagttacaggttgcctgattgtatggccaccccaactgccccggaggcctctgtaagtaggagaggtttccttttgtctgagaaatggtaggacggagcttttaggaaggtatagggtggggagcttcctgtgtccagccctatgattt

SEQ ID NO: 96972 - DNA, 169 bp, Homo sapiens
attctttaagggagcatcccttgactcagctgtcccacctaagatagttcccaagtactacagtgctgcaagaaaacattttctcagaaaccacagatactcttcaaatacgtaaagcattcaaatatgaatttcaaaactttctccttgatttattgatatggtttgg

SEQ ID NO: 96973 - DNA, 434 bp, Homo sapiens
tgctttgctctatggtgaacgtgccctcctatcgctctgggctctgcatggcgatcattcttattggctgcagaatactttctctggggagtggatggagctaacatttatatagcactaaccatgtcaggaccatagtctgagtcctttaacatctattaactgacttaatccccacaaaagctttctaaggctggtccgcttttagtcccattttacagaagaggaaactgaggcagagctaaatcaagtggtctggcccagaggcccacaactggctagcggtggagctggactttgaagcaggatcctgagcgtatcctctttacagtgatagggctgtaaccaaggtcttcttggggcttcggacctttggggcacctgaggttatttccttggaaaggcaacccttggcatgggcttttttttttttt

SEQ ID NO: 96974 - DNA, 308 bp, Homo sapiens
gtggctgactccctgctcaccctcccaactgcgtcagccatagggaactggggtggggtcccagcacccctgggcaggcagttccataggggattacctccagctgtctttcacagagagacagccaagctacagatcaatcaaccccattcataatcaaagaaaatgaatcaaaccagatgtcagtagtcacccatgaaattaatcaaggcataagacactagcactctgctccttggtggggatgcaatgagatgtgtgcccccttgatgggagagtaagttaatgataccgcctctccagaaagg

SEQ ID NO: 96975 - DNA, 527 bp, Homo sapiens
tagagacagggtctcactctatcacccaggctgcagtgtggtggcatgatcacagctcgctgcagtctcgacttcatggactcaagcaatcctccagcctcagccaccagaatagctaggactacaggtgtatatgccattctaggctaatttttttttttttttttttggtagaggctcactatgttgcccaggctggtctcaaacccctaggctcaagccctctgcccgctccggcctcctaaaatgctgggatcacaggcatcagccactcagcccggccacaattattttaaaatataaaggggaaagccttcccaggcaaattccaaaatctagaagtataaaagtctggccaatttgatcataaaattttaaatgtttctataacaaataaatacaaacatgtcagactgggagaaaacatttacagcatacataacaaaaatattaatattgaaaaagaataaagaactctaaaattcactgataaattattcccctcgccctcaaaataggacttggaa

SEQ ID NO: 96976 - DNA, 694 bp, Homo sapiens
agccgccatcttgctttacatcctgagggcttggctggtaactgcttggcaaggctttgtttagcaatcttgcctgaagtgatgagccctgaggttccatatgctagccctgtctcttgaagcaccccacccagcggctgggttttcttctgcctgtgtgtatactgtgtgtgatgtctacaaaaagagctctaattaatttggcctaaagaaagacaagtgcctggatcaaatatttttttaagggaaggtaaaagctgtggtacctttcagttcacatgactttaatctttaagaaataaaaacagccctaaaagggacaggattatttgacatgtttaggtgcctgggattgccaaagcaggtcagatgcaaggtttgctaagtgttttgaggttataaactgcgttttgggttttgagaaccatttgacttgctggcttcacaactggtaaggcctggggacatatggaactaaccatacccttaattaagaaggcaaccttggatgcacttagcactcaattaaagcaacttacaaagttttaccttaaagttaaaaattgctaggagttaattgaaactactggaagtaaatttacatgcaaggtgtgtaagaacagtaaaatgtgttttttagtaaaaggttataggaaggccttaaaatgtaaacttttgcttagggttaaaggat

SEQ ID NO: 96977 - DNA, 659 bp, Homo sapiens
attccctgtataattgatgccgaggagggtagatcgcaatccctgcacgtacttactgacgtggtggtccacagcttccacccagtttgtccccttcttcccctggacaaataatccaagagacagaggcagtcattagtgccatgatcgactttgaagttagacagaattggactccccattttaatgtttaaattaattttacatttaaaattaatttttagtattcaactagaacttagtagatgattcaattaggtaatgcattggaaaatgctttatagattctaaagttctctgtaagtagcaagtaatatgataattgcatggcatgaatgatcctgatcctcagtattaggacttttattattgttacaggataaagaaaaatacactgagaagccatgatttgggaggtctgagacaccattaattaatggaagattcagtttttcgctatccttccttggtataccttaaaatcatattcaaagaataagtattttgcccttactaaaatgcaaaatccaaagtgatcacatttacaaaaaatgctgatcagaatatagacaaaatgaccgataatatccaaaacaatattatccccaactgggaaagtttcttcagcgcttttgttctacattttgctgcactaaaaa

SEQ ID NO: 96978 - DNA, 678 bp, Homo sapiens
acaccgtggttgaaattgtataaacgaggaatagtaaattacaaaatcttggttgatgatacagaagtgcttacagaacatagtcactccaaagaccctttcactccacttatcaaagtaattttgtcctcagtttaatggcaggtgaaacaatattgaacaaagcagcctctgctgtatctgaagccctttagttagtgttcatagcagtaaatgctctagtaaagggacagcttctattccaatcccaggttttcaatcactttggttctttttttgagacagagtctcgctgtgttgcccaggctggagtgcagtggtgtgatctcagctcactgcaacctccacctcctgggttcaagtgattctcatgcctcagccacctgagtagctgggactacaggaacatgccaccacacctggctaatttttatgtatttttttttttgtagagacagggtatcaccattttggccagactggtctcgaacttctgacctcaggtgattcccctgccttggcctcccaaagtgctgggactacaggcatgaaccaccgcacccggcccactttggttcctaaagttttctttcaggtaaagtttttaatgcatagtttctgcccaaaggttttgtttgtgtggactgattattggataagagaggaagggactaccaa

SEQ ID NO: 96979 - DNA, 475 bp, Homo sapiens
aagggattgacatgtgaagtcaatagaacacaagagaacccagaaacagattcacagaaagatgctcaactaatgttttacaaaagtcaaaagcaattcaataaaataagtggtgctagaaaaattatacaattgcaggcgaaaatataaaccttgagctaagcctcatatctcataaaatgaaaaaatcaaaatagatcatgggtgtaaagagaaaacaaaaaatactataaaaaactggtaaatcggatttcatcaaaaataaaaacttttggcccgacacggtggctcacgcctgtaatcccagcactttgggaggccaagtaaggcggatcacgaggtcaggagatggagaccatcctggcaaacactgtgaaaccccgtctctactaaaaatacaaaaaaattagccggatgtggtggtgggcgcctgtagtcccagctactcgggaggctgaggcaggagaatggcatg

SEQ ID NO: 96980 - DNA, 472 bp, Homo sapiens
attttgtgtagagacagagtctcactattttgcccaggctggtcttgaactcctgggctcaagcaatcctcctgcctcggcttcccaaagtgggattacaggagtgtgccacaagacccaggctgttattttgtttgagacagggtctctctctgttgcctacgttgtagtgcagtggcacaaacaaggctcactgcagcctcaacctcctggactcaagtgatcctcccaccccagcctcccaaagtagccaggattataggtacatgataccacactcggctattttttttttaatttttatttttgtagagacaggggtctcgccctgttgcccaggctagaaactgagtttcaaacgtttaaaaagaccttgtgaaagtccccactgccagtaacatgttcaaggtggtttagaggtccatggggctgaccagcctgagcctactcaccttcaaagtctatgcagcac

SEQ ID NO: 96981 - DNA, 783 bp, Homo sapiens
gaaaggcacaacaagaaaagaaaattactgaccaacatttctcatgagcatagatagatgcaaaaatcctcaaaaagtttgaaagtcagatataataatgcatacaaggcattatatttcatgattaagtgggatttattccagatatgcaaggcagtttcaccatttaaaaatcagttatgtcatccattgcatcaacaggaaaaaggagaaaaatcatgtgattatatcaacagatgaagaaaaatcacttgacaaaatccaatacctattcaagttaaaaactgttagcaaactaagaatagaggggaacttccttaacttcataatgaacgttttcaaaaatcctatagctagcatcatacttaatgatcagaaagatcaggaacaagctgagattgtccactctgaatagcactgagcatttcaaaaaagattaattttgacttgtgttctcctttgtcaagatttaggaatgtaggttaaaaatgacttcggttgtccaggatctcacagggctgacctagcaattacacatgttaatagatacaaaataaaaatggttataagaatgcatgggcaggaaagtatcttcaagtggtgataaattggaaagtagactgtactattagggaatgttaactaataagtgtttctttttatagatgatgagtaaatttttatacaacttaaagcaatttctatcagagctactcactttcatttgtttcagaatacgtttttgctttcagatttttctaaataaaacacagtagctaagaa

SEQ ID NO: 96982 - DNA, 381 bp, Homo sapiens
acaatattgacttgggaggtggaggccaagattgtaccactgtattccagcccgggtgacagagcaagactgtgtctcaaaaaaaaaaaatcctggtgggcacgtggctcacacctgcaatcccagcactttggaaggtcgaggtgggcgggccatttgaagtcgggaggccgggagatcgggagctcgagaccagcctgaccaatatgatgaaaccccgtctctactaaaaatacataaattagctgggcatgttgtcatgcgcctgtaatcccagcactttgggaggctgaggtgggtggatcacctgaggttgagagttggagaccagtctgaccaacatggtgaaatcctgtctctactaaaaatacaaaaaattag

SEQ ID NO: 96983 - DNA, 89 bp, Homo sapiens
cgagattgagccagagtgatctcgcccaatgcagtgagccactgcactccatccagcctggacaacagagggagattccgtctcaagag

SEQ ID NO: 96984 - DNA, 646 bp, Homo sapiens
gggaactagtactgggaaccagaagggtatcagcaatcaagatgactatctgcttctttctctgcagtggttattatcagttcagtttgtttctatctactccatttctttgcatacctattatgtactcatcatctggcttacagcttgctgtaagtcaccttccagcccaatagagagaacctgattgattgatctagctcatttggtcgagcctgacttccaaaattagaggttgctggtcagccagggaaatgggcccttgagactggtgactaatcatttatggctagagaagcttataggatcttttgagggtttcacatgaggaaaccgtgctaaggcctgtgccaaagcaatatagaatgtcttggtagcacatgtaggaggctgtacctaatgattgcggtatcttaagatggtttaccagaagacttggaaatttgagccttgaagaagagtggaattagcattcaaaatgggagttagcgaggacatcgtaaccaaatggaacagcatatatgaagacccatatgtttgtgatgtgttgctggaaccacaggtatcatttttgggtgcatttccatgacgaggcaagaacagaatagtacctttaaggaaatttgatatgtggagtgacacaatg

SEQ ID NO: 96985 - DNA, 1278 bp, Homo sapiens
gtagagatggggtctctctgtgttgcccaggctgttgttgaacttctggactcaagcaatcttcccaccttggccttccaaactgttgggattacagtgcttatttaacacatgcttgaggtcctcaattgaactccttgaagacctgatgccaaaagccctgagaagagactatgaactatgatatagaggtgttaaccccaaggacaattcttcaacgagatgctatacagcaaactctgtctcagaatctgtttcccagaaaatccaaccagcaatttttatgcctatgcaatgaacaattctgggggaaaaatacccatcaagtattttgtattggatggcttttattttattttatttaggcaccggtgcaaaatttctggcactgtcaggttctttcaaagtgggtatttgttagttttgttatcagataaaaatattaaagcagtttttatttgggaaaataaaaatccagtggtttggttttagtctggtcaaaatagctacctcaaagtctgtatcaaaatggcagcatctgacccatctagcgtgcatccttcttaacgggaagaactgaaagccatcatgcagtgctgttccccaattcaaaacacaagttcgaatcatcttaggctcaaactgagaactggcattagtccagttaaattaatctgcaagttgctccgaagtggggaagcggggcaggatggcttacatcttaaatggacaagtgttggacagcagagtccatctccctggagtttatctttgataacagatttcttctgaagaatagccaagtttgtgattttgtttttcaaaactctacttcagcaacatgtgaagaaaagaagaggctatggaaacacatctgattccagatatgatcatggaagacagccaccaggaaaccctctggggaaaacaggtcaaatcaatcatctgcatctccccagtcctcccccaaaggctggtggatgaggaaggtaaatatctactctaagaaatagacaactggacatgcacattcacagtagagagaaaccaccaaggagcggagggctgaccatgctggacaagtagatgaatgcatacatctaaacaaggattgctctgggtcttcacagattaatgagatcatgctgggaattccctttgcagggaactggctaactggcatgcagttctataaatgcacatctgtctcattatcttttttaatatactttactgaagtattcatatagttctaataagtaaatatttttagcttgc

SEQ ID NO: 96986 - DNA, 290 bp, Homo sapiens
ctataggcacaatgatgttcagcatcactggggattattgaaaggttgaagtttttaggtttaccttcatagcccactcaaatgataggtcagtgtttcctaaacgattcttcagattactcatgaccccacaggtgggaccagaaggcctttgaaaagacccttggcaagtagggtctcgagtcagtcgactttgggaaatgcctgtcttgttgatgcatagtacattattagtgtatcaaagatgttgaaaagccttggggaaacctagtgtttctcaggcttacttg

SEQ ID NO: 96987 - DNA, 552 bp, Homo sapiens
agcctcccaagtagctgggactacaggtgcccatgccaccatgcccggctaatttttggtatctttagtagacacaggctttcaccatgttggccaggctggtctcaaacttctgacctcttgatccacccacctccgcttcccaaagtactgggactacaggcatgagccactgcacctggcccatatgaatggtacaattctatgttagagtaatgttagctgctgtaacaaagggaccaagaatgcagtggctcagtcgacaagataaaagtgtatctcttgcacacgtgacagtcctggtgagatgtgcaggtcagcaggcagcacttctcagactttcagggactcaggctgatgctggttctgccgtcttcaacatatgactttcaaagttgttgttctccagctcacaggaaggtgataggcagaggtgcagggccagatattttctctgtggaggctgcacacattgcttctgctcatactcccctgggtgagacctttctcctgagttgcagtggggcagtaggtgcaggggctgaacgattc

SEQ ID NO: 96988 - DNA, 308 bp, Homo sapiens
gcgtatgagtcattgacggtgaatacaggtctggaagtctgaggtccaatataataaaaaatctagtcttcaccttctatcctagggatagacattaggaatatttgaggatgttgttcttggtcttcacgttcatgcattttccctctatttttataattggatcaatgaatcaataagcaaatatattttaactgcataaagataaaaataggcgttgtccaattatggaaatatatggtgaaataagaaatactattcacatttattaaaaacactgaggtcttctttctattaacaaataaatg

SEQ ID NO: 96989 - DNA, 1264 bp, Homo sapiens
aggatgagcatgttatctttatatttggtttaaaaattttttttaagttaaatctgtgtttgcgtatttcttaagaaagcagaagtaaaataagcatgtttggaatttgaattaaatatatcagaatttttgtcagttcaaagtatgatccatggtgatataatacaattgtatgatataaatgtaatacaaactgaaataatatctcttcatgagatactatcgaagattgttagcctcataggaaaggactgtatgtattgtctagcattttatggtctccaaagactccaaaggaaaaccatgttggctgttatttttatctcttttccctcaaagccaaattagttatattatgttaaataaaacaggcaggattttataaaacataccaaaaacacttgatcatttgcaatgaaaaacatctagaaagtttatactcatagaaaatttaacctaatagaaaaatatctttgaatcatttgcccagggactagagcatattttccttaagaatttttattttgaaaaaatagaggaactattcatggaataggccttagaggcaggctgcttgggttcaaataaaatagccctgccactcactacctgtgaccttggcaaattacttaacctttctgagtcttaatttcttttcctgtaaagaaagctgaaatgttctaccttagaagtttgttgtaaggtacagaacaagcgcatagtattcaatgaatgttagctatatgtacatgtatgtgtatgtgcaatacattgtattacgtgggtttcattaatgtcaaaacagattagggctgagtagtattatttttgcttctcaagttctgcacatttatttttaaagcaagttgtagaatgtaatgtgacatatttgagcctgaagttggctgaccaaggactgtggataagtgtagcatagttattttttctatcaaaaacaataacaaaaagattgagtacttttaatatacatgttgtcaaaagacaaaattacaacaaatttaatcatagatctaattggcttttattcaagatgcatgaatcggatcagcctccattctacaaaatagaatgagaggtctcactgggcagtggcaaagcagtgggttttgtaaggtgagaactgtaacaggaaaaaatgctgattggttaacatcagattacttttcttttaagggttaaaacagtgagcatttccgtattacactgattcgggtagactggaatctcctattttcaaaaaaaa

SEQ ID NO: 96990 - DNA, 174 bp, Homo sapiens
ggacatattggaaaagatgacgaagtcccaaaagaacagaatcccatgtaatgtgacttgaacacagaaagagaaagagagaaagggagaaagagccagaagaactgctgccactgccccttcttccccctctcccagctgaaagctgggcttggaggcaaaggacagattctg

SEQ ID NO: 96991 - DNA, 300 bp, Homo sapiens
aaaggctctgagaagtcctgcggtaaaggaatcagtgtttcccaaatttctttaatcaaagatccttttttccagtaccgcagtggaaaaacctgagagaccctggagctcttcagaacacagggtgggagacaagtctggcagtggtgactctgggtggattttttttctgggacctcgggctggatggccctagattctggagatctggagggagcgggaaagagaggctgctacctgctccatctttgttatacctgacgcagggaggccccatccataccctcgtgtgaggctctg

SEQ ID NO: 96992 - DNA, 328 bp, Homo sapiens
gatatgtgtctacagataaatgttacaatgtttattaagagtaacagtatttaaagcaaagtaagaaagtgagaatatccatatcttttagaagaaataaagcggttaaaatgatttaaaacagactaaagacatggaaaatattttaatggtacataataataataatattaaaaatatatccatttttgtgaactcaccatttctgtgattgttaatatatctttagacacatacaaacatggaattagataacatctaaaatttcaaaaattttaaataaatttaaacataattaaccttaaaagtatattaaataagacaatgt

SEQ ID NO: 96993 - DNA, 248 bp, Homo sapiens
tctctgatgcagagaatttcatgatcgtcggctcaggtaaaccctgaccaaagagtgaaggctttgagctctataataattcaactcacagatgtcgtctcctgagagtcctcgagctgccttgggactaatatatgtgaaccaaagaaattgccttgtgatgactggatgagttctcctcttgtgctctctgtgggcaggtgggagcccctcaaggaatatgcccatccaactcctccccagaaggc

SEQ ID NO: 96994 - DNA, 254 bp, Homo sapiens
ccatatctcttagtgtctccagagctgcagtacaagttggggggatggactgtaaaagccagaaatcccaagccacaagcacgctgcaggtagcaaccccacacccagcaaaacaccgcttcttcctgcccactttcccctctgcgccaactgtacacaccataccctatgcttgtccatttgggaaactggcttccaggacagcatctttcctggaaagacagcaggaagctgatggtcactcctcaactctc

SEQ ID NO: 96995 - DNA, 350 bp, Homo sapiens
catttgaattttaaatacttttatgaaatatggttacaaagtaatatatcatgtgacaaaagaaacaacatgaaaagaaatataccactctccataattatttttgcataaaaatatcaatacctaagagtgtggtgcacgaggactgtaccaactgcctcagatcctgttactcaagaatcatctgtacactctctaattatatttttacattctcctgggtattataaatattcattttttttctttcctctgcctgcatttattgaaagatacacaggcacaagaagtctagcattcaaacattcaaaagatacaaactataaaattcagaattgttgcatattaca

SEQ ID NO: 96996 - DNA, 507 bp, Homo sapiens
catgaagtcccaagagaaattaagacaaacgttcaacaatgaaaatgaaaatagaaattacaaaattttgtgggaagaaaaaaaaacagtgcttagaaaaatttgtagcattgactctatatcttagaaaaaaaggacaactctgaaatcaataatctaaccttcctcagtgggagactagagaaatatgggcgatttaaacatgaagcaactggagaaaataaaattttaaaagtcaaagcagaaatcagtgaaattcatatcaggaatacaatagagaaaaacaatgaaacaaaagctgtttctttgaacagaccaataaaattgatataattatagccagctgaccaagaaaaaaaaggagcgaagacacaagttacccacatgagaaatgaaggagtagagtccactacaaatctcacgaacagtaacaggatagtaaaagaatcctataaacaactatacccagtgaatctatcactttgatgaaatgggctgctatgttga

SEQ ID NO: 96997 - DNA, 156 bp, Homo sapiens
cccaactccagaggcctgcccaactccagaggcctgtccaactccagaggcctgttgaaattaaaggaagagaataaaacatctctccctaacccataaactgtgttctattcacagttgaaggtaaccactaaaatatgttattactatacccca

SEQ ID NO: 96998 - DNA, 368 bp, Homo sapiens
ggaattcagacaaacatgtcatgtgataattatatagccttgggtaatacattattattttttagttttaaagtactttaaaaattggcagagtatttttagtatactaagatttgaacagtttaaccagtagtgtcgggatttgattacgctgataaagatatgcaagaaataaagtaataaaagacaaaatgtaggtttggaaaattcaaattgtagttttatccattaatcatatactttactttgtgcttgtcattgtgataattacataaagataaataaaataacacacctagccccttaaagtagtagttctttactttttaaaggtcaggggtcccttgagaatctgaaaaattgagaat

SEQ ID NO: 96999 - DNA, 979 bp, Homo sapiens
cttgtaaaaatatatttattgcaaaagttatatcagtcttgtatgtaagcaccagccttctccagggaaagacaggggtggtagaatgaataaaattaactcagtattttgactgcttgctgcaatggaagagggaattatgtttcccaagctgggtatgaagagaaggaatatagccttggaggcaatggaaactaagccagagcagcttagaaaagtcacccctcctcctgattcaagaccaaagacagggaaaaaaaagtcactctcagtgtgaacatgaaagcaagtctcacccagcctagatgttggatgtcctgtgcggtcccgttcctccctggtagagcttgttctgtctcactgggattgccatttggatttgatgaatttctgaatcacccgagggcctggcgacccgaaggagggcggggagtgggggcgctggggtggacccgccatcctgcggaatccgggccagataacagcccccgagctggggaaatcggcttgcggatgtgatgcgggaccgcgaggacacctgcgctcccttgcgtgtcgcactcgtgcagctcccggtggcgacggggtgatgtgggggcgagggtgagaggaagtccaggcgccagagcgtcagaaacgcttccttagcttccctggcactttggaggttgtctcgagggaacacggacagtgcacgacggactttcaagttgctcccggcacaacgggaggtcgggagctcggagcccctacgggcggtccaagtgtccgcgagaagcccgcagcgcccaggaccgcgttgagcgctcggggcgcgccaagccgcacctaagcaaaagagaaacgctgacgggccggaggcgggttggctgggacgcggaatacgcgcggccccggagcgcctttcgttttaaggagccttacttctggaaagggacagggaactgtcaatcagcgagggagggagcgcaccggcgct

SEQ ID NO: 97000 - DNA, 6994 bp, Homo sapiens
gcagcggccaaggcggcacaccggagcctccgaggcgaggggcaagtgggcgaagggaggggggacgacggctgctgccgcagcagctgaaggccaaggaattgaaagggctgtagggggaggcagtgcgagccagccccgactgctcctcctcttcctcctcctcctccaaactcgcgagccccagagctcagctcagccgccgggagcacccagagggacgggaggcagccgcgcagccccgagctgggcagtgtccccagccgccatggatagcgacgacgagatggtggaggaggcggtggaagggcacctggacgatgacggattaccgcacgggttctgcacagtcacctactcctccacagacagatttgaggggaactttgttcacggagaaaagaacggacgggggaagttcttcttctttgatggcagcaccctggaggggtattatgtggatgatgccttgcagggccagggagtttacacttacgaagatgggggagttctccagggcacgtatgtagacggagagctgaacggtccagcccaggaatatgacacagatgggagactgatcttcaaggggcagtataaagataacattcgtcatggagtgtgctggatatattacccagatggaggaagccttgtaggagaagtaaatgaagatggggagatgactggagagaagatagcctatgtgtaccctgatgagaggaccgcactttatgggaaatttattgatggagagatgatagaaggcaaactggctacccttatgtccactgaagaagggaggcctcactttgaactgatgcctggaaattcagtgtaccactttgataagtcgacttcatcttgcatttctaccaatgctcttcttccagatccttatgaatcagaaagggtttatgttgctgaatctcttatttccagtgctggagaaggacttttttcaaaggtagctgtgggacctaatactgttatgtctttttataatggagttcgaattacacaccaagaggttgacagcagggactgggcccttaatgggaacaccctctcccttgatgaagaaacggtcattgatgtgcctgagccctataaccacgtatccaagtactgtgcctccttgggacacaaggcaaatcactccttcactccaaactgcatctacgatatgtttgtccacccccgttttgggcccatcaaatgcatccgcaccctgagagcagtggaggccgatgaagagctcaccgttgcctatggctatgaccacagcccccccgggaagagtgggcctgaagcccctgagtggtaccaggtggagctgaaggccttccaggccacccagcaaaagtgaaaggcctggctttggggttcagagacctggaatagaaacttggatctatgcactacgtttatctgacaatgggacaaccagggactgctcatgctgtgacgtcacatcctctcaccatgcgttagcaacgactttctcgcatactaactaggtttgactgtattactcataccagatttaaaattagctagccttgcaacaacgtcctactgagaggtattgtcgagcatttgacataagacagcgtgatgttctttggtggttcaagtctaaatctgtaccacattcggagatgccaaatgattagactgaaacagggaaacggggtttttcagtcatttttagtcagtggtttttccatagtgcttttttcctatggccagtgcaaattgtgttagcacacttgcatatgtgccgtattaagggttgacaattactacatctttattctctaaatgtagtataatttgccttttaacctttgatctgtatcttgcaatagaatggctttggtttttttcttagtaaataggagcccacttctaaagtcatttcacccctcagccctattctctttcttagataccctttacaagagaaaacttccaaatggatttttgcatcaatagcagtgtgtaggtctctctggttctttctatatcatcattttattattatgtcctaatataaagtactggctcatagggccagggtattattatagaatattattctcgcatgtaaacaaagatatctttgctttaagatgtgagaagaaatgaatttactttgtttgcattaagttatggaagagttgtaatatatactttaagaaagaagagaagaaaactagtatctctaagcggtaactatggcaattttgcaatattttcagtagtgctagtaattttttcctccttgagtacacattaaatgtacataacatagcgcggtcaggcttgtggcacagtgcattgaattcaaaagtcaaacagcaaatttgaattctaacagaattcaaaaaaaaatttttttagtcagtactactaaggcagacacactgattactaggtacaaatcaaaccttgatgctaaaactcttcatcattgtaatttcaaagcacttacctgcttcaaaacattgtaaactaagactgaacacctgtatagtttaaaagcaacactatcaatagcatttcagccattttgccagccatgtgtaatcacaactgcagaaataaggagaaaacccctgtttttttagtttagctaattagatctgtaacatcactgggattgctctgaatgaatcctgagagttttgttttttataagcaccctcaccacatgccatagctttgtctcttttagacacctcgatgcagcggctggaaggactggagagcagctgttgtgctgatctgtagctgtcagctgtgattcctgtcacctgagtcagtttggtctggaaagcgaaggccttccaagctgtagcagatagtgagctccagctgatgagagaaggcttcagtggaagaagagtgaggacataggcagaaggaagtttgctatttcttgtcagttgcacattgctttatgaagactacaacaaaagtgcttaatcccaggctgctcatgactttcatttcaggtggcccttgggcacattgacagagttgcccttcccttctttgcaacaccaggcttcctagagcacccggttgcatgctttgcagctaggtggcagtggtttcagggagatccagttggatccctgcttgaaagcttaagccaatggttcacccatgagaggaagttgtcagtgcttccaggaagattgcccaccaaaggaactgaatagtttttagatttaaaggcaccaggatagggtcactcttactctgtagaaagagaccgttctatacactgtgacggatgggccagggcctctggacttgcattctgataggtgctttaatttaaatgtgcccaaagggagtgactgtcttcaggagaaagatggcttgcattaacctcgatcaagtgggttgtgcagccaggtcagggaatgcggtcagggagaggatagtgctggtcatgcccccgatgcagctatgctctgaatgatttcattcctgagagtgatagcattctggtcctggctgcagtggggtacaatttacgtcctaagtgggggctactctaattatcccattcaaatggaatttttttcaaaattggatagaaggaattgaagagttgtaagtagtgattagtctgctaatcagttcttcagatgagatattgaatggtaacactctgagcttaaaactcagcagtgtgtctgtgacctccacgcaaatcagaggaagcaatgcatccacgctgagcctcaccatgtcttcctcccaactctcttcatactctctgtgtcttccagctcttctttctctggccggctctctttcctcttctctctgcatatgtgagaacgcctgggcatcctgggtaacagcagccccagctgccctctcctgttccctgttccaagtcccctgcactgacctttcttgagtctctctggctctgtgcatgtctttgggactctgctcatctggcttttcctctgtgtgtgcctctctgtttgcttatgtctctggctctgtcttccccacccctcccctcacacacacacatactcccaaatgtaaggctctgtggcaggttggaatcggagtaaggcttgagattcactgagttctgtaggtagggaaagaagtcaagggagtggaggttctataaggaattaacagctgaggacggaagggtttgtttcccgtttgaacctaaacgcaagtggaaaagaatactcagaatgtatttttctactttacatctgctggggaaggaaatgtgtcaggaagccgctgcatctggtcatttcatcgcatcagaatcacagcagacgtggaagattccatgtggtggggaataaagaaataactttatgctctcctgaaaaacagcgggagcctatgtgtgtgtgcgacactgtaatctcaaggagattcactcagagctgtctcagtccaactcctgcatgaccagatcttcccttagcatcttttctgtgatgaaatattatcttgtgttagagttaggaataggaactaacctgtaggagcatgtccccaaatggacatttgaatggactaacaaaaacaactggaaagactgaatttccgacacaaaggaatgatgggatcaaaaagaaagcagtgaggagttcttgagtcttgtagtacctattcttattttaacttgcttcatccttgatctacctgagacactaagaaggaaattagttttccaagagctctttgaacctgtctaggactgtagttaaacctatttgccctatgggggttcttcacactcgaaaaactatttccttatcaccaacgacccacccagaaaggccaatgaggccaaatgtaacaatttttaacatttaaatataactattaaaattgcattaattgtgaacagtgaattaaagggttgtcttctccaggagacagtatgtggcacttttcgtaaatttcatttaatatataaaaatttaaatcactcactgcaacatgcatttaaaatcttccaagaaggtagaggtatcattttctgttttgctttgttttaaaacagttgcctcaagcttctgtcttaagagtagtgacttagaatccagatatcttttgttttagaaaaacaagcaaaactatgttgcaagactgacagttgtaatgtttatttgccacagatcaaaggttcacaaagtatatcaaatttacatctacttggggtaccttgatagattattattgtttttcttttatctttcccttcaggaatttggaaactcgttgtcactttttttaattttaaaaatactaaattgtaatagttttcttttgccaaatgtgtgcgtacatattcaaagcaatgaaactatttcaagccatacaaccacaggggtgggaacccttttcacaaattttaatgtgtttgtatgtaaatagatgtttgtatgaaatattttcatgatagaatgaatatatttaaatgaagttgaattattccagtgctacttaaacacattacaaaaattttggtgagaattatctgagtctattgagatgtaatgcagatcaattttgatttttaaaaatcaaaagcctacaataactctgactctcagcaacttcctcggcgttgttgcacctgacgtggagagagctcgtaggcttccccagtgcctcagccgcttcctggtggaagttaggtgctaatggaggtgtgttcaccttttagtgatatcactgcaggcctttgaggggcctgagagtgaatcagaggcattagagacaccggtgcagttatctggagcacaatttctttgcagggcagcagaatcagaagccagacttggccatgtgaacctcgaaactcggtttcccggccgccatcaaccgccacccttactgcctagtcacacacgtcagggaggctgccctcagtggagttggggttgagaccccagggtgggacttcacagttttgccagcaatctctaccttctgacttctgcctcgcagagaggaaggagaggggagcatctggcaaggggcccatttctcagcacagtacatttcctgtctcagctctggaagactatgcacccaagcaccaaacttccaaccagagagagagacgtcctccgataacaaaaatccttgcttcctctgtctgtgactttacacacagttgttcaaagttgttaaatgtcaagagtcaatcacatccctaggacatacctcccaactctcctgactcttatgttattgaaaaaacaaacaaacaaaaactcctttatgatgatattcaacttgagtggggttttttttccactttggtcctggatataatgaaatgatacatattaggataaattttcactgtgtatagtagcaatacgaacacacatgccaatgtatcaacatatctacttggttacattttggtttatgataattaaccttgattcatgtattgggaagctacagggactacgtaatacctgcttatcacataggaaaattatgtccatgattctgagctcccttcttcaaaagtttcctcctgggtgttctatgttctctctttatcctgaaatacatttattaggttgtgaggtatgttgaagaagtagaagccaggggtatgctttcagcatttattgcaaccaaaagttaaccccatcacggttaacgagcatctttggtctcttgtggaatttgaactaaaactatgagccttattcaatatctataattctatgatttttttaaattatgggaaattaatgaaagatgtttacatgaataatgtttgcccttactgtgttatgaatgagttttttgtagtgtgtctgggtgcatgatgcaagagagtaggaaaaatgtttctgaaacaaaacttgacaaatatttgtaatgaaagtaaatttaaagattgctataattgcgctatagaaacaatgcaagtattaaacaaaatatacaatca

SEQ ID NO: 97001 - DNA, 811 bp, Homo sapiens
tacattgtgtacatttacatctgtttaatcggctatttacagtcgccctttaccgccacctgtaagaggcagcgccataacgacactaagtggccgggccggaagccgggtgcccagtggttttctccacttgaggacgcctgaatctgtgaagtggttggcacttggagaaacagagagacagctggggacatcacacgtacagggcgggaggcgcgggaaagaggcgcgccagacggagggtccttccttcctcgttagctccactcggcggctccttttccattaccacagcagcaaggaggaacctgccgagccttcggtgcggcttgtttcctgcctgacagagagcccgctgccatttggatttgatgaatttctgaatcacccgagggcctggcgacccgaaggagggcggggagtgggggcgctggggtggacccgccatcctgcggaatccgggccagataacagcccccgagctggggaaatcggcttgcggatgtgatgcgggaccgcgaggacacctgcgctcccttgcgtgtcgcactcgtgcagggcgcaggccgagaatggggctccgccaggccgggggcgctggaaacgcacggccgctccatcccgcccggccacagcctgcatccaccctcggagttgcgaaacctgccccgcgctctggcctttccgcctttgggcgcggagggtgggtgcactccgcagggcagccccttgaggccggcggactccgcggagcaatcccctagcccagttttggccaccccgatcccctcccggccgccagcccttccct

SEQ ID NO: 97002 - DNA, 6836 bp, Homo sapiens
gaggctgaggtgggtagattgcctgaggtcagaagttcgagaccagcctggccaatatagtgaaacctcatctctactaaaaatacaaaaaaataagctgggcttggtggcaggtgcctgtaatcccagctactagggaggctgaggcaggacaattgcttgcacccgggaggcggaggttgcagtgagccaagatcgcaccattgcactccagtctggacaaaaagagtaaaactctgtctcaaaaaggacgggggaagttcttcttctttgatggcagcaccctggaggggtattatgtggatgatgccttgcagggccagggagtttacacttacgaagatgggggagttctccagggcacgtatgtagacggagagctgaacggtccagcccaggaatatgacacagatgggagactgatcttcaaggggcagtataaagataacattcgtcatggagtgtgctggatatattacccagatggaggaagccttgtaggagaagtaaatgaagatggggagatgactggagagaagatagcctatgtgtaccctgatgagaggaccgcactttatgggaaatttattgatggagagatgatagaaggcaaactggctacccttatgtccactgaagaagggaggcctcactttgaactgatgcctggaaattcagtgtaccactttgataagtcgacttcatcttgcatttctaccaatgctcttcttccagatccttatgaatcagaaagggtttatgttgctgaatctcttatttccagtgctggagaaggacttttttcaaaggtagctgtgggacctaatactgttatgtctttttataatggagttcgaattacacaccaagaggttgacagcagggactgggcccttaatgggaacaccctctcccttgatgaagaaacggtcattgatgtgcctgagccctataaccacgtatccaagtactgtgcctccttgggacacaaggcaaatcactccttcactccaaactgcatctacgatatgtttgtccacccccgttttgggcccatcaaatgcatccgcaccctgagagcagtggaggccgatgaagagctcaccgttgcctatggctatgaccacagcccccccgggaagagtgggcctgaagcccctgagtggtaccaggtggagctgaaggccttccaggccacccagcaaaagtgaaaggcctggctttggggttcagagacctggaatagaaacttggatctatgcactacgtttatctgacaatgggacaaccagggactgctcatgctgtgacgtcacatcctctcaccatgcgttagcaacgactttctcgcatactaactaggtttgactgtattactcataccagatttaaaattagctagccttgcaacaacgtcctactgagaggtattgtcgagcatttgacataagacagcgtgatgttctttggtggttcaagtctaaatctgtaccacattcggagatgccaaatgattagactgaaacagggaaacggggtttttcagtcatttttagtcagtggtttttccatagtgcttttttcctatggccagtgcaaattgtgttagcacacttgcatatgtgccgtattaagggttgacaattactacatctttattctctaaatgtagtataatttgccttttaacctttgatctgtatcttgcaatagaatggctttggtttttttcttagtaaataggagcccacttctaaagtcatttcacccctcagccctattctctttcttagataccctttacaagagaaaacttccaaatggatttttgcatcaatagcagtgtgtaggtctctctggttctttctatatcatcattttattattatgtcctaatataaagtactggctcatagggccagggtattattatagaatattattctcgcatgtaaacaaagatatctttgctttaagatgtgagaagaaatgaatttactttgtttgcattaagttatggaagagttgtaatatatactttaagaaagaagagaagaaaactagtatctctaagcggtaactatggcaattttgcaatattttcagtagtgctagtaattttttcctccttgagtacacattaaatgtacataacatagcgcggtcaggcttgtggcacagtgcattgaattcaaaagtcaaacagcaaatttgaattctaacagaattcaaaaaaaaatttttttagtcagtactactaaggcagacacactgattactaggtacaaatcaaaccttgatgctaaaactcttcatcattgtaatttcaaagcacttacctgcttcaaaacattgtaaactaagactgaacacctgtatagtttaaaagcaacactatcaatagcatttcagccattttgccagccatgtgtaatcacaactgcagaaataaggagaaaacccctgtttttttagtttagctaattagatctgtaacatcactgggattgctctgaatgaatcctgagagttttgttttttataagcaccctcaccacatgccatagctttgtctcttttagacacctcgatgcagcggctggaaggactggagagcagctgttgtgctgatctgtagctgtcagctgtgattcctgtcacctgagtcagtttggtctggaaagcgaaggccttccaagctgtagcagatagtgagctccagctgatgagagaaggcttcagtggaagaagagtgaggacataggcagaaggaagtttgctatttcttgtcagttgcacattgctttatgaagactacaacaaaagtgcttaatcccaggctgctcatgactttcatttcaggtggcccttgggcacattgacagagttgcccttcccttctttgcaacaccaggcttcctagagcacccggttgcatgctttgcagctaggtggcagtggtttcagggagatccagttggatccctgcttgaaagcttaagccaatggttcacccatgagaggaagttgtcagtgcttccaggaagattgcccaccaaaggaactgaatagtttttagatttaaaggcaccaggatagggtcactcttactctgtagaaagagaccgttctatacactgtgacggatgggccagggcctctggacttgcattctgataggtgctttaatttaaatgtgcccaaagggagtgactgtcttcaggagaaagatggcttgcattaacctcgatcaagtgggttgtgcagccaggtcagggaatgcggtcagggagaggatagtgctggtcatgcccccgatgcagctatgctctgaatgatttcattcctgagagtgatagcattctggtcctggctgcagtggggtacaatttacgtcctaagtgggggctactctaattatcccattcaaatggaatttttttcaaaattggatagaaggaattgaagagttgtaagtagtgattagtctgctaatcagttcttcagatgagatattgaatggtaacactctgagcttaaaactcagcagtgtgtctgtgacctccacgcaaatcagaggaagcaatgcatccacgctgagcctcaccatgtcttcctcccaactctcttcatactctctgtgtcttccagctcttctttctctggccggctctctttcctcttctctctgcatatgtgagaacgcctgggcatcctgggtaacagcagccccagctgccctctcctgttccctgttccaagtcccctgcactgacctttcttgagtctctctggctctgtgcatgtctttgggactctgctcatctggcttttcctctgtgtgtgcctctctgtttgcttatgtctctggctctgtcttccccacccctcccctcacacacacacatactcccaaatgtaaggctctgtggcaggttggaatcggagtaaggcttgagattcactgagttctgtaggtagggaaagaagtcaagggagtggaggttctataaggaattaacagctgaggacggaagggtttgtttcccgtttgaacctaaacgcaagtggaaaagaatactcagaatgtatttttctactttacatctgctggggaaggaaatgtgtcaggaagccgctgcatctggtcatttcatcgcatcagaatcacagcagacgtggaagattccatgtggtggggaataaagaaataactttatgctctcctgaaaaacagcgggagcctatgtgtgtgtgcgacactgtaatctcaaggagattcactcagagctgtctcagtccaactcctgcatgaccagatcttcccttagcatcttttctgtgatgaaatattatcttgtgttagagttaggaataggaactaacctgtaggagcatgtccccaaatggacatttgaatggactaacaaaaacaactggaaagactgaatttccgacacaaaggaatgatgggatcaaaaagaaagcagtgaggagttcttgagtcttgtagtacctattcttattttaacttgcttcatccttgatctacctgagacactaagaaggaaattagttttccaagagctctttgaacctgtctaggactgtagttaaacctatttgccctatgggggttcttcacactcgaaaaactatttccttatcaccaacgacccacccagaaaggccaatgaggccaaatgtaacaatttttaacatttaaatataactattaaaattgcattaattgtgaacagtgaattaaagggttgtcttctccaggagacagtatgtggcacttttcgtaaatttcatttaatatataaaaatttaaatcactcactgcaacatgcatttaaaatcttccaagaaggtagaggtatcattttctgttttgctttgttttaaaacagttgcctcaagcttctgtcttaagagtagtgacttagaatccagatatcttttgttttagaaaaacaagcaaaactatgttgcaagactgacagttgtaatgtttatttgccacagatcaaaggttcacaaagtatatcaaatttacatctacttggggtaccttgatagattattattgtttttcttttatctttcccttcaggaatttggaaactcgttgtcactttttttaattttaaaaatactaaattgtaatagttttcttttgccaaatgtgtgcgtacatattcaaagcaatgaaactatttcaagccatacaaccacaggggtgggaacccttttcacaaattttaatgtgtttgtatgtaaatagatgtttgtatgaaatattttcatgatagaatgaatatatttaaatgaagttgaattattccagtgctacttaaacacattacaaaaattttggtgagaattatctgagtctattgagatgtaatgcagatcaattttgatttttaaaaatcaaaagcctacaataactctgactctcagcaacttcctcggcgttgttgcacctgacgtggagagagctcgtaggcttccccagtgcctcagccgcttcctggtggaagttaggtgctaatggaggtgtgttcaccttttagtgatatcactgcaggcctttgaggggcctgagagtgaatcagaggcattagagacaccggtgcagttatctggagcacaatttctttgcagggcagcagaatcagaagccagacttggccatgtgaacctcgaaactcggtttcccggccgccatcaaccgccacccttactgcctagtcacacacgtcagggaggctgccctcagtggagttggggttgagaccccagggtgggacttcacagttttgccagcaatctctaccttctgacttctgcctcgcagagaggaaggagaggggagcatctggcaaggggcccatttctcagcacagtacatttcctgtctcagctctggaagactatgcacccaagcaccaaacttccaaccagagagagagacgtcctccgataacaaaaatccttgcttcctctgtctgtgactttacacacagttgttcaaagttgttaaatgtcaagagtcaatcacatccctaggacatacctcccaactctcctgactcttatgttattgaaaaaacaaacaaacaaaaactcctttatgatgatattcaacttgagtggggttttttttccactttggtcctggatataatgaaatgatacatattaggataaattttcactgtgtatagtagcaatacgaacacacatgccaatgtatcaacatatctacttggttacattttggtttatgataattaaccttgattcatgtattgggaagctacagggactacgtaatacctgcttatcacataggaaaattatgtccatgattctgagctcccttcttcaaaagtttcctcctgggtgttctatgttctctctttatcctgaaatacatttattaggttgtgaggtatgttgaagaagtagaagccaggggtatgctttcagcatttattgcaaccaaaagttaaccccatcacggttaacgagcatctttggtctcttgtggaatttgaactaaaactatgagccttattcaatatctataattctatgatttttttaaattatgggaaattaatgaaagatgtttacatgaataatgtttgcccttactgtgttatgaatgagttttttgtagtgtgtctgggtgcatgatgcaagagagtaggaaaaatgtttctgaaacaaaacttgacaaatatttgtaatgaaagtaaatttaaagattgctataattgcgctatagaaacaatgcaagtattaaacaaaatatacaatca

SEQ ID NO: 97003 - DNA, 3823 bp, Homo sapiens
tcgactcgtacccacaccacctgcttccaggaagattgcccaccaaaggaactgaatagtttttagatttaaaggcaccaggatagggtcactcttactctgtagaaagagaccgttctatacactgtgacggatgggccagggcctctggacttgcattctgataggtgctttaatttaaatgtgcccaaagggagtgactgtcttcaggagaaagatggcttgcattaacctcgatcaagtgggttgtgcagccaggtcagggaatgcggtcagggagaggatagtgctggtcatgcccccgatgcagctatgctctgaatgatttcattcctgagagtgatagcattctggtcctggctgcagtggggtacaatttacgtcctaagtgggggctactctaattatcccattcaaatggaatttttttcaaaattggatagaaggaattgaagagttgtaagtagtgattagtctgctaatcagttcttcagatgagatattgaatggtaacactctgagcttaaaactcagcagtgtgtctgtgacctccacgcaaatcagaggaagcaatgcatccacgctgagcctcaccatgtcttcctcccaactctcttcatactctctgtgtcttccagctcttctttctctggccggctctctttcctcttctctctgcatatgtgagaacgcctgggcatcctgggtaacagcagccccagctgccctctcctgttccctgttccaagtcccctgcactgacctttcttgagtctctctggctctgtgcatgtctttgggactctgctcatctggcttttcctctgtgtgtgcctctctgtttgcttatgtctctggctctgtcttccccacccctcccctcacacacacacatactcccaaatgtaaggctctgtggcaggttggaatcggagtaaggcttgagattcactgagttctgtaggtagggaaagaagtcaagggagtggaggttctataaggaattaacagctgaggacggaagggtttgtttcccgtttgaacctaaacgcaagtggaaaagaatactcagaatgtatttttctactttacatctgctggggaaggaaatgtgtcaggaagccgctgcatctggtcatttcatcgcatcagaatcacagcagacgtggaagattccatgtggtggggaataaagaaataactttatgctctcctgaaaaacagcgggagcctatgtgtgtgtgcgacactgtaatctcaaggagattcactcagagctgtctcagtccaactcctgcatgaccagatcttcccttagcatcttttctgtgatgaaatattatcttgtgttagagttaggaataggaactaacctgtaggagcatgtccccaaatggacatttgaatggactaacaaaaacaactggaaagactgaatttccgacacaaaggaatgatgggatcaaaaagaaagcagtgaggagttcttgagtcttgtagtacctattcttattttaacttgcttcatccttgatctacctgagacactaagaaggaaattagttttccaagagctctttgaacctgtctaggactgtagttaaacctatttgccctatgggggttcttcacactcgaaaaactatttccttatcaccaacgacccacccagaaaggccaatgaggccaaatgtaacaatttttaacatttaaatataactattaaaattgcattaattgtgaacagtgaattaaagggttgtcttctccaggagacagtatgtggcacttttcgtaaatttcatttaatatataaaaatttaaatcactcactgcaacatgcatttaaaatcttccaagaaggtagaggtatcattttctgttttgctttgttttaaaacagttgcctcaagcttctgtcttaagagtagtgacttagaatccagatatcttttgttttagaaaaacaagcaaaactatgttgcaagactgacagttgtaatgtttatttgccacagatcaaaggttcacaaagtatatcaaatttacatctacttggggtaccttgatagattattattgtttttcttttatctttcccttcaggaatttggaaactcgttgtcactttttttaattttaaaaatactaaattgtaatagttttcttttgccaaatgtgtgcgtacatattcaaagcaatgaaactatttcaagccatacaaccacaggggtgggaacccttttcacaaattttaatgtgtttgtatgtaaatagatgtttgtatgaaatattttcatgatagaatgaatatatttaaatgaagttgaattattccagtgctacttaaacacattacaaaaattttggtgagaattatctgagtctattgagatgtaatgcagatcaattttgatttttaaaaatcaaaagcctacaataactctgactctcagcaacttcctcggcgttgttgcacctgacgtggagagagctcgtaggcttccccagtgcctcagccgcttcctggtggaagttaggtgctaatggaggtgtgttcaccttttagtgatatcactgcaggcctttgaggggcctgagagtgaatcagaggcattagagacaccggtgcagttatctggagcacaatttctttgcagggcagcagaatcagaagccagacttggccatgtgaacctcgaaactcggtttcccggccgccatcaaccgccacccttactgcctagtcacacacgtcagggaggctgccctcagtggagttggggttgagaccccagggtgggacttcacagttttgccagcaatctctaccttctgacttctgcctcgcagagaggaaggagaggggagcatctggcaaggggcccatttctcagcacagtacatttcctgtctcagctctggaagactatgcacccaagcaccaaacttccaaccagagagagagacgtcctccgataacaaaaatccttgcttcctctgtctgtgactttacacacagttgttcaaagttgttaaatgtcaagagtcaatcacatccctaggacatacctcccaactctcctgactcttatgttattgaaaaaacaaacaaacaaaaactcctttatgatgatattcaacttgagtggggttttttttccactttggtcctggatataatgaaatgatacatattaggataaattttcactgtgtatagtagcaatacgaacacacatgccaatgtatcaacatatctacttggttacattttggtttatgataattaaccttgattcatgtattgggaagctacagggactacgtaatacctgcttatcacataggaaaattatgtccatgattctgagctcccttcttcaaaagtttcctcctgggtgttctatgttctctctttatcctgaaatacatttattaggttgtgaggtatgttgaagaagtagaagccaggggtatgctttcagcatttattgcaaccaaaagttaaccccatcacggttaacgagcatctttggtctcttgtggaatttgaactaaaactatgagccttattcaatatctataattctatgatttttttaaattatgggaaattaatgaaagatgtttacatgaataatgtttgcccttactgtgttatgaatgagttttttgtagtgtgtctgggtgcatgatgcaagagagtaggaaaaatgtttctgaaacaaaacttgacaaatatttgtaatgaaagtaaatttaaagattgctataattgcgctatagaaacaatgcaagtattaaacaaaatatacaatca

SEQ ID NO: 97004 - DNA, 1202 bp, Homo sapiens
  misc_feature (20)..(20): n is a, c, g, or t
ggtgactctagcaggatctntagggttgacttcggggcaggcagcagaatcagaagccagacttggccatgtgaacctcgaaactcggtttcccggccgccatcaaccgccacccttactgcctagtcacacacgtcagggaggctgccctcagtggagttggggttgagaccccagggtgggacttcacagttttgccagcaatctctaccttctgacttctgcctcgcagagaggaaggagaggggagcatctggcaaggggcccatttctcagcacagtacatttcctgtctcagctctggaagactatgcacccaagcaccaaacttccaaccagagagagagacgtcctccgataacaaaaatccttgcttcctctgtctgtgactttacacacagttgttcaaagttgttaaatgtcaagagtcaatcacatccctaggacatacctcccaactctcctgactcttatgttattgaaaaaacaaacaaacaaaaactcctttatgatgatattcaacttgagtggggttttttttccactttggtcctggatataatgaaatgatacatattaggataaattttcactgtgtatagtagcaatacgaacacacatgccaatgtatcaacatatctacttggttacattttggtttatgataattaaccttgattcatgtattgggaagctacagggactacgtaatacctgcttatcacataggaaaattatgtccatgattctgagctcccttcttcaaaagtttcctcctgggtgttctatgttctctctttatcctgaaatacatttattaggttgtgaggtatgttgaagaagtagaagccaggggtatgctttcagcatttattgcaaccaaaagttaaccccatcacggttaacgagcatctttggtctcttgtggaatttgaactaaaactatgagccttattcaatatctataattctatgatttttttaaattatgggaaattaatgaaagatgtttacatgaataatgtttgcccttactgtgttatgaatgagttttttgtagtgtgtctgggtgcatgatgcaagagagtaggaaaaatgtttctgaaacaaaacttgacaaatatttgtaatgaaagtaaatttaaagattgctataattgcgctatagaaacaatgcaagtattaaacaaaatatacaatca

SEQ ID NO: 97005 - DNA, 968 bp, Homo sapiens
tacattgtgtacatttacatctgtttaatcggctatttacagtcgccctttaccgccacctgtaagaggcagcgccataacgacactaagtggccgggccggaagccgggtgcccagtggttttctccacttgaggacgcctgaatctgtgaagtggttggcacttggagaaacagagagacagctggggacatcacacgtacagggcgggaggcgcgggaaagaggcgcgccagacggagggtccttccttcctcgttagctccactcggcggctccttttccattaccacagcagcaaggaggaacctgccgagccttcggtgcggcttgtttcctgcctgacagagagcccgctgccatttggatttgatgaatttctgaatcacccgagggcctggcgacccgaaggagggcggggagtgggggcgctggggtggacccgccatcctgcggaatccgggccagataacagcccccgagctggggaaatcggcttgcggatgtgatgcgggaccgcgaggacacctgcgctcccttgcgtgtcgcactcgtgcagctcccggtggcgacggggtgatgtgggggcgagggtgagaggaagtccaggcgccagagcgtcagaaacgcttccttagcttccctggcactttggaggttgtctcgagggaacacggacagtgcacgacggactttcaagttgctcccggcacaacgggaggtcgggagctcggagcccctacgggcggtccaagtgtccgcgagaagcccgcagcgcccaggaccgcgttgagcgctcggggcgcgccaagccgcacctaagcaaaagagaaacgctgacgggccggaggcgggttggctgggacgcggaatacgcgcggccccggagcgcctttcgttttaaggagccttacttctggaaagggacagggaactgtcaatcagcgagggagggagcgcaccggcgct

SEQ ID NO: 97006 - DNA, 410 bp, Homo sapiens
aactggctacccttatgtccactgaagaagggaggcctcactttgaactgatgcctggaagtaagttgaatctgcttcagatgggttgctccaattccaaagcaggttgttagggctgatttgagacaagcttcttttcttttcctctctgtatagttctctttaatcgtgtttattagtcaggttttattgcataacagacactgcacctccccagtggtttacaacagcaaccacagctctgccgagcagctgtactccagctggctgaggctgggcttagggggccaggccagacttgaggcttctggtcaggtttgagtcagctctctttgtcttaattctggggcctaatctgaagggacaatggcaatgtggggcaacattttcccacagtggatcacagaagt

SEQ ID NO: 97007 - DNA, 247 bp, Homo sapiens
caaaggtagctgtgggacctaatactgttatgtctttttataatggagttcgaattacacaccaagaggtgagtggggctgacagtggaaaatcaactttgttggttaaagggctttgcttcaaacaaaatccctttaccttagtactcactagaaagttaaagaagcagattggcttttttgtaaaaatgattggacattttcatcctctttattttaagccttaatacgattttttttaaaagtt

SEQ ID NO: 97008 - DNA, 1022 bp, Homo sapiens
gcagcggccaaggcggcacaccggagcctccgaggcgaggggcaagtgggcgaagggaggggggacgacggctgctgccgcagcagctgaaggccaaggaattgaaagggctgtagggggaggcagtgcgagccagccccgactgctcctcctcttcctcctcctcctccaaactcgcgagccccagagctcagctcagccgccgggagcacccagagggacgggaggcagccgcgcagccccgagctgggcagtgtccccagccgccatggatagcgacgacgagatggtggaggaggcggtggaaggttattaccccaagaaaaagccagtagaataactactgccttcattttcacccacctctgcaaaatcagctcaccagaatgattgggaagacaccaataagggcacctggacgatgacggattaccgcacgggttctgcacagtcacctactcctccacagacagatttgaggggaactttgttcacggagaaaagaacggacgggggaagttcttcttctttgatggcagcaccctggaggggtattatgtggatgatgccttgcagggccagggagtttacacttacgaagatgggggagttctccagggcacgtatgtagacggagagctgaacggtccagcccaggaatatgacacagatgggagactgatcttcaaggggcagtataaagataacattcgtcatggagtgtgctggatatattacccagtaagccgtgtgactgttcactctgctggaaagtaacatactgtgactcttcacaatgaagagtaaaatgtattctgtgttagaacttgggagctgtgaaacctgagagtcaccacagctgacaccaagagtttatgaggcatgccctctcactgttactcactattggcttagattgttggcccttgaatccgttattaattatttttcagcgttgttttggaaagggagtaattaatcatgattaaacaaattgagacaaattggttttattgtatcac

SEQ ID NO: 97009 - DNA, 512 bp, Homo sapiens
tacttctggaaagggacagggaactgtcaatcagcgagggagggagcgcaccggcgctgggtgatgtcagcggatcagctgctcgataacaaagagagggtattacaggagaaagttgcagcagcggcagcggccaaggcggcacaccggagcctccgaggcgaggggcaagtgggcgaagggaggggggacgacggctgctgccgcagcagctgaaggccaaggaattgaaagggctgtagggggaggcagtgcgagccagccccgactgctcctcctcttcctcctcctcctccaaactcgcgagccccagagctcagctcagccgccgggagcacccagagggacgggaggcagccgcgcagccccgagctgggcagtgtccccagccgccatggatagcgacgacgagatggtggaggaggcggtggaaggtacaagcatttctccggggccgggggaggaggcgcagagggcctggagcgcggaaggagtggcgggctgcgaacagc

SEQ ID NO: 97010 - DNA, 2431 bp, Homo sapiens
gcggccgccccgtcccgccgccgccgcagcccgcctgccgcgcgcccacagcccggcccgagtcgcggggcccgagcgacagcgacggcgccggccggggccgcggcgcgcggaagccactttgcacggtcagcgccgggcacaagtttgttccgcggctcccgggggcctgggcgctgagggagaatcgcgctgagggggccaggaggagggggagagggaggcgccgaagggcacaagagtggggaaaagtgcggaaagaagcaacagccgctccacccgggaccagaaaagtggccagtgcgtcccggccgcccgccctgcgccggggatgcggcggcgtcggcgccggctaacggtccagggaggcggcaggggcggcgggagccgctaggcggagagagaccagggacgcctggtttccccccaagcgaaccgggatgggaagtgacttcaatgagattgaacttcagctggattgaaagagaggctagaagttccgcttgccagcagcctccttagtagagcggaatgagtaatacccacacggtgcttgtctcacttccccatccgcacccggccctcacctgctgtcacctcggcctcccacacccggtccgcgctccccgccctcttcctcgcgtagaaccgtgggatcctaggtggcaggactcagagctaaggtatccacaggccatgaattccttcctaaatgagcggtcatcgccgtgcaggaccttaaggcaagaagcatcggctgacagatgtgatctctgaacctgatagattgctgattttatcttattttatccttgacttggtacaagttttgggatttctgaaaagaccatacagataaccacaaatatcaagaaagtcgtcttcagtattaagtagaatttagatttaggtttccttcctgcttcccacctccttcgaataaggaaacgtctttgggaccaactttatggaataaataagctgagctgtatttcaagtaatatagttataaattaacaatgtagcagttattgatagagaaattgagaaaactgaaacgtgaccggagtattggaaataacgtagtacatcacctagcacaatgacacatagtaggtgctcaataaatttatgcttataatttttgtcacttctatggcaggatttttttattaggttaaaattatcttttaaacaccttccggaattttagaatattcattaataatgtcttcaaacctttcaactgaaataaatttacagctgaagtctgatgatttaaagttagaaagtttaatcttgaatataaatgaacattttctctcccacattttcttgggcattttgagaagtaaatgcgttatttattggtccatgaaatgtgactgtaaatattctttgctatacattatgtctatatatctgcattcatcctcaatgccaaaactagaatcattagtcttaatgatcattttaagtacaggcagtcctcgctttccttgataccatgttaaccgaaacttgtgtatgtcaacacggtgtccttgctttgcttggttaagtgtgagttcttcctccctttttttaagagttgtacaatgtttttcagtcgcctaccgaatcaggtcatagactatggaattgaccccaccccaccaacatttttacagctaccctgatttctgaccagaaaggaaaaaaaaactttccagctctatcacacattttacctactcttaaacttaggaggtattacaaatagcattttctcatgttctctttctggcctgtacctccctgctaagcttccttcagtgttcatcctcacctcatagagagatgaagtgaagagacaaacagaagtcattttcttccttactttagtggtttctggtttagttagtttgggccaaactgtggacaagtaccttttcaggtaacttttttttcttatttctatgtcctcaacacctagtggagtacgtagccaatagtagatgcttaataaacatttcttaaattaatattgttgaccttttctgaccctgttcttgacagtaaggtacataatctgccttcatccctttagtccttaggaacagataaagtcatggatatgaaagtgatcactgtcattaatatccacattaaaattgctcttgattttagtttctccataatcattttccctaaacaatgaactctgttcacctttttttttaaaatatgcacagtgaatattactggtagcccaaatcttctaacataaaatttccattttgtaaaagcttctgataagcatatatgttatgaattgaatgtttgattattatactttaatattcttgaaaatattgatacctggactggaaagaaaacagacaaaagtaaatctcagaataaattactgctttaaacatgaaaaaaaaaa

SEQ ID NO: 97011 - DNA, 2200 bp, Homo sapiens
ctacggccggaaccttgttgctagggaccgggcggtttgcggcaaccgtgggcactgctgaatttgaattgaggggcgagggaaaagttttcctcaggtgtggtggggagagggaggcggatgccgggaaaccgtagggacgcggtcagaaaggcgacgggctgtcggagttggaaagggacgcctggtttccccccaagcgaaccgggatgggaagtgacttcaatgagattgaacttcagctggattgaaagagaggctagaagttccgcttgccagcagcctccttagtagagcggaatgagtaatacccacacggtgcttgtctcacttccccatccgcacccggccctcacctgctgtcacctcggcctcccacacccggtccgcgctccccgccctcttcctcgcgtagaaccgtgggatcctaggtggcaggactcagagctaaggtatccacaggccatgaattccttcctaaatgagcggtcatcgccgtgcaggaccttaaggcaagaagcatcggctgacagatgtgatctctgaacctgatagattgctgattttatcttattttatccttgacttggtacaagttttgggatttctgaaaagaccatacagataaccacaaatatcaagaaagtcgtcttcagtattaagtagaatttagatttaggtttccttcctgcttcccacctccttcgaataaggaaacgtctttgggaccaactttatggaataaataagctgagctgtatttcaagtaatatagttataaattaacaatgtagcagttattgatagagaaattgagaaaactgaaacgtgaccggagtattggaaataacgtagtacatcacctagcacaatgacacatagtaggtgctcaataaatttatgcttataatttttgtcacttctatggcaggatttttttattaggttaaaattatcttttaaacaccttccggaattttagaatattcattaataatgtcttcaaacctttcaactgaaataaatttacagctgaagtctgatgatttaaagttagaaagtttaatcttgaatataaatgaacattttctctcccacattttcttgggcattttgagaagtaaatgcgttatttattggtccatgaaatgtgactgtaaatattctttgctatacattatgtctatatatctgcattcatcctcaatgccaaaactagaatcattagtcttaatgatcattttaagtacaggcagtcctcgctttccttgataccatgttaaccgaaacttgtgtatgtcaacacggtgtccttgctttgcttggttaagtgtgagttcttcctccctttttttaagagttgtacaatgtttttcagtcgcctaccgaatcaggtcatagactatggaattgaccccaccccaccaacatttttacagctaccctgatttctgaccagaaaggaaaaaaaaactttccagctctatcacacattttacctactcttaaacttaggaggtattacaaatagcattttctcatgttctctttctggcctgtacctccctgctaagcttccttcagtgttcatcctcacctcatagagagatgaagtgaagagacaaacagaagtcattttcttccttactttagtggtttctggtttagttagtttgggccaaactgtggacaagtaccttttcaggtaacttttttttcttatttctatgtcctcaacacctagtggagtacgtagccaatagtagatgcttaataaacatttcttaaattaatattgttgaccttttctgaccctgttcttgacagtaaggtacataatctgccttcatccctttagtccttaggaacagataaagtcatggatatgaaagtgatcactgtcattaatatccacattaaaattgctcttgattttagtttctccataatcattttccctaaacaatgaactctgttcacctttttttttaaaatatgcacagtgaatattactggtagcccaaatcttctaacataaaatttccattttgtaaaagcttctgataagcatatatgttatgaattgaatgtttgattattatactttaatattcttgaaaatattgatacctggactggaaagaaaacagacaaaagtaaatctcagaataaattactgctttaaacatgaaaaaaaaaa

SEQ ID NO: 97012 - DNA, 2555 bp, Homo sapiens
ctacggccggaaccttgttgctagggaccgggcggtttgcggcaaccgtgggcactgctgaatttgaattgaggggcgagggaaaagttttcctcaggtgtggtggggagagggaggcggatgccgggaaaccgtagggacgcggtcagaaaggcgacgggctgtcggagttggaaaggtaaagttggaggctcggcggcgtcctgcctccgcgctggccacacccgccgcggctgcccggggcagggagggatctggctgattctccctgtaccctgtgccctcggagctgcccctccgagcgcccagaggtccccgcctgcctgcttcctggaggcagggctaccatcagtcccacgcctcgcgtgtccgccccccgcaccccggggccaaggaaagggatcgcggtctggactccccggggagttcccttgatgaggggaagggcaggtttggggacggcgaggacacgcggcgaccggagagaggctacctgacccgcgcagcccggactcccttcccttcccttccagggacgcctggtttccccccaagcgaaccgggatgggaagtgacttcaatgagattgaacttcagctggattgaaagagaggctagaagttccgcttgccagcagcctccttagtagagcggaatgagtaatacccacacggtgcttgtctcacttccccatccgcacccggccctcacctgctgtcacctcggcctcccacacccggtccgcgctccccgccctcttcctcgcgtagaaccgtgggatcctaggtggcaggactcagagctaaggtatccacaggccatgaattccttcctaaatgagcggtcatcgccgtgcaggaccttaaggcaagaagcatcggctgacagatgtgatctctgaacctgatagattgctgattttatcttattttatccttgacttggtacaagttttgggatttctgaaaagaccatacagataaccacaaatatcaagaaagtcgtcttcagtattaagtagaatttagatttaggtttccttcctgcttcccacctccttcgaataaggaaacgtctttgggaccaactttatggaataaataagctgagctgtatttcaagtaatatagttataaattaacaatgtagcagttattgatagagaaattgagaaaactgaaacgtgaccggagtattggaaataacgtagtacatcacctagcacaatgacacatagtaggtgctcaataaatttatgcttataatttttgtcacttctatggcaggatttttttattaggttaaaattatcttttaaacaccttccggaattttagaatattcattaataatgtcttcaaacctttcaactgaaataaatttacagctgaagtctgatgatttaaagttagaaagtttaatcttgaatataaatgaacattttctctcccacattttcttgggcattttgagaagtaaatgcgttatttattggtccatgaaatgtgactgtaaatattctttgctatacattatgtctatatatctgcattcatcctcaatgccaaaactagaatcattagtcttaatgatcattttaagtacaggcagtcctcgctttccttgataccatgttaaccgaaacttgtgtatgtcaacacggtgtccttgctttgcttggttaagtgtgagttcttcctccctttttttaagagttgtacaatgtttttcagtcgcctaccgaatcaggtcatagactatggaattgaccccaccccaccaacatttttacagctaccctgatttctgaccagaaaggaaaaaaaaactttccagctctatcacacattttacctactcttaaacttaggaggtattacaaatagcattttctcatgttctctttctggcctgtacctccctgctaagcttccttcagtgttcatcctcacctcatagagagatgaagtgaagagacaaacagaagtcattttcttccttactttagtggtttctggtttagttagtttgggccaaactgtggacaagtaccttttcaggtaacttttttttcttatttctatgtcctcaacacctagtggagtacgtagccaatagtagatgcttaataaacatttcttaaattaatattgttgaccttttctgaccctgttcttgacagtaaggtacataatctgccttcatccctttagtccttaggaacagataaagtcatggatatgaaagtgatcactgtcattaatatccacattaaaattgctcttgattttagtttctccataatcattttccctaaacaatgaactctgttcacctttttttttaaaatatgcacagtgaatattactggtagcccaaatcttctaacataaaatttccattttgtaaaagcttctgataagcatatatgttatgaattgaatgtttgattattatactttaatattcttgaaaatattgatacctggactggaaagaaaacagacaaaagtaaatctcagaataaattactgctttaaacatgaaaaaaaaaa

SEQ ID NO: 97013 - DNA, 346 bp, Homo sapiens
gcaatgcattgtgttctgcaccttaccttagagatcttttccacattcaaatggcctgagtattcttctttgaagcttatgtataatgttgcattatataagttactataatttatttaaccagtgttctgttgatgggcatttaggttattccccatcttttgcttttacaaacattctgcaatgaataatcttgcatatgtcttttggagcatgttcaaatgtaggtgaatgacatattactagatgtacaatctctggatcaaaggattacatttgtagtttagatgcaatcaccaagttgccctccatggtgcctgtaacaatgtacacattgtgttatcaa

SEQ ID NO: 97014 - DNA, 248 bp, Homo sapiens
tctttgttcagtcgcatgagtggatttgaaacattggcatcctttgaaactgtatctaaagcatctctttaagacatgtgtcctaatatttttacttctagaactctgcaaagctctataaaatcactctgtcaagtgctggatgaaaggaaaaataaacatccatcaccagccagtaactgcttacctggaacaaacactcctgtcatatgcccctgagactcctgaaatacctttgagatgtgtca

SEQ ID NO: 97015 - DNA, 530 bp, Homo sapiens
agatataattcaagaaaattttcctaaaataaataagagtccaatccaatttgtgaaacacaatgatatatactagggagaaaagatcaatactgaggtggagcctgataaagataataaacttgaaagataaagaaggaatcctttaaaacaaaaagcaaaaagatcaagtatggcatcagatttctttatatgaaattaaacttgagaggacaatcgagcagcacttacaagatcctcccaaaaagaaagaccaagccaagattttacttccaaccaaactgttattcaagtataaacagataaacagttttgaacatgcgagagctcagggactattgtttccacaagttgttgagcaaaattctagatgatgaacttcagtcatttagataattggggaaagggaggcaaaacaattggcagtgaacactgaacatctttatctagagaatgaatgctttaaaagacaaagaaggcagcccagcgcgatggctcacgcctgtaatcacagcactttgggaggccca

SEQ ID NO: 97016 - DNA, 275 bp, Homo sapiens
atgggagtttaagatttcacaggtggaactgtgctgagcaaggtcataaagaatgaaaagagttctccacacagatgctaaaatcagtcaagaaaagggactgtggtgagccagggccaaagtcctcagtgactgggggaaaatgagctggaggttagtagatggcaacacctgcatgtgaaatgatgtaacctggaagcagtggtgagaagtgagactacagacactggatccttgactgtgaaaatggagatgagggaaaatatgtactatcc

SEQ ID NO: 97017 - DNA, 311 bp, Homo sapiens
gagtagctgggactacaggcgcctgccaacacgcccggctaattttttgtatttttagtagagacggggtttcaccgtgttagccgggatggtcttggtctcctgacctcgtgatcctcccgcctcggcctcccaaagtgctgggattataggcgtgagccaccgtgcccggccaattgctgttgttgttaataaacaatctttattttagagtaggtgtaggttccaaagttgagcagaaaggacggggagttcccatatactatttgccccaccccaacatataaccttccctattatcaatatcccat

SEQ ID NO: 97018 - DNA, 924 bp, Homo sapiens
ggcactatctcggctcactgcaatctcttcctccctggttgtatttttagtagagacagtgtttcgccatgttggccaggctggtctcgaactccggacctcaggcgatccacctgcctcggcgtcccaaagtgctgggattacaggcatgagccaccgtgcccggcctattattattaagtcttagcttttgactacatgtctttttaatttttaagaatttgtgattaaataaacatggataaagcatttatgctgcctagggaggtgtgattgttgtcatgaaggaaaagcatttgtgagattgggttgtgaatgaatggcttatttcatggagtagcatttttacttgaaagaacgactagcagactatggtttttcacacttagtatttggcagatatttcttgaaaatgaagtgagcttgtcacttttaggaaaacaactgacagtatttattaccagtgataaaatttgggtgaaaattagaatttttaaaaagttgacagctggagtttgacagcttcctagtacttaaaagactttccttatgatatcagtggttaaggactgcaatattttaaaatgttgtttaatgaaatatgttatttggaagatgggcataactcagtaaatctaggctttgcaaatgaccaatgcatgatgttgcaaaatcaagcaaaggcaaaagatcctttgaaaattccagatatagcaatggattttaacagtaaaaaagtggattgatgtggtttcagattccaaaatgttaactgtcctttaagaaactactatttggcctagcgtggtggctcactcctgtaatcccagcactttgggaggccaaggtggaaggattgtgtgagcccaggagttggagttgagcctggtcagcatggtgagaccctgtctctatttattaaaa

SEQ ID NO: 97019 - DNA, 568 bp, Homo sapiens
atggggtggctttgagatggtgtgtcccttggtttaaagaagtcacaaccgctgtcatcgccgactaggtgtctccaagacactctttttccaagttctggcaattgcttttttccctcacctcattaggcttagagctagtgacagctctcctgttactagctctggggtacagcactatctcagatggtttcctattctctgtacactctttgtaaattgattatttcctgaacctgtatcaaattattccaggttgactttatcatctgtttccttttagaaccctgaatgatatttgtaataatacaatataaagcctggatgaatgcatcataattgactcaatttttttcctattagtgttatttataattatttattagtttaatgctatagcaaaccttttgccaatggctcattctctcctcttctgtttcttccttttcctaacatttaaaaaaatttttgcggctgggtacggtggctcacacctgtaaccccagcactgtgggacaccaagacggatcacgtgaggtcaggagttcgagaccagtctggccaacat

SEQ ID NO: 97020 - DNA, 315 bp, Homo sapiens
attaaatcgccatccctataccccttaagtaattacgccccctttctcccttccctcattgtctaatctactttctgtctctggatttgcctcttctggatatatcatatagaataagtcatataacatgtgactttatatgtctgcttctttaacttagcctgatgttactgagcttcatatattagtacttcatttctttctgtggctgaatagtatttcattgtatgtatatactgcagtttattcatttgtcgatggacacttgagtttctgccttttgattattacagcaaatgctactacagacattca

SEQ ID NO: 97021 - DNA, 414 bp, Homo sapiens
atttccactagaggatcctttcttgatcgctccgtgatatggaagagacttggagacgtgggaagtgtcccacacagctgatcagccaggcgcggaggtccacccacctgcagaagggtcaccaggctcagaaacatcctgtccacacctgcaaatctatccatgcctcctgttcatgcccagcccatacattcgatttttacaaattcattgttttcaaaataattaaaagtttcttgctcactctgacaaaataagctgccatgttgtgagatgttctgcggagaggcctacgtggcaaggaccaagggaagcctccagctgacagctcatgagcaactgaatcctaccaataagcatgtgagtgagccagtgttccgcaaaggggctggatatgcagagcgacccccaaat

SEQ ID NO: 97022 - DNA, 303 bp, Homo sapiens
gtgaaaggcacagttaaaacaatgaaaagacaacctagagagtggaagaaatatttgcaaaacacctatctggtaaaaaattggaatccggccgggcgcggtggctcaagcctgtaatcccagtactttgggaggctgaggcaggcggatcaggaggtcaggagatcgagaccatcctgcctaacacagtgaaactctgtctctactaaaaatacaaaaaattagccgggcgtggtggtgggcgcctgtagtcccagccactcgggaggctgaggcaggagaattggtgcaacttgggaggtg

SEQ ID NO: 97023 - DNA, 385 bp, Homo sapiens
ttttttttttgagacagagtcttgctgtgtcatccaggctggagtgcagtggcaccatccacctcctgggttcaagcaacctccacctcctgggttcaaacaattctcctgccacagcctcccaagtagctgggattacaggcacccgccaccacgccaggctcattttttgtatttttagtagagatgggatttcaccatgttggccaggctggtctttaactctcgacctcaggtgatccgcctgcctcagcctcccaaagttctgggattacaggcgtgagccacagcgcccggccggcaattttttaaataataaaaaattccattattttacatagcattgagatacacttacaatatttaattctgcctctcggtggtg

SEQ ID NO: 97024 - DNA, 377 bp, Homo sapiens
tggccagactggtctcaaactcttgacctcaggtgatccacccacctcagcctcccaaagtgctgggattacaggcgtgagccatcgtgcctggcccattcctttttttgatgtggctactagaaaattttaaaattgcatttggggctgacattagatttctattagacagcgctgctccaacgcctctcatcccggccagtagtgagacactgcttgcaaaggaaagcaagtggatccagctgtgagtccagcagtcactgggggtgggggtgaggtcctctcagactcagcatctgcccagccacgactttgactccttgacaaaaacctcatgagccctccctgaagatggagccactgcctccaccctgggc

SEQ ID NO: 97025 - DNA, 830 bp, Homo sapiens
  misc_feature (18)..(18): n is a, c, g, or t
  misc_feature (23)..(23): n is a, c, g, or t
acttagctagtagaggcngggtnttaatcggccgaggaacgaaccgcagtgtccaccggcgaggagccagccctgtcccggtcagagaaagacgacgaggatacctgggagcgggcggcggccgggctgggccgcgccggtgcgggctggcgactctgctcctccgcttgctgctgtctctgggaactgggtgccagcgctgaggggcttccagcggacagggacccccttccccggctcccctgcccaccctgccggggagggcggaagatgccggtgaagaagaagagaaaatcccctggggtggcagcagcagtagcggaagacggaggcctcaaaaagtgtaaaatctccagctattgcagatcccaaccccctgctagactaataagtggagaggaacatttttcaagcaagaagtgcctggcttggttttatgaatatgcaggtcctgatgaagttgtagggccagaaggaatggaaaaattttgtgaagacattggtgttgaacctgaaaatattattatgttagttttagcgtggaaattggaggctgaaagcatgggattttttaccaaggaagaatggttaaagggaatgacttcattacaacggagtcttgctttgtcgccaggccactgcactccagcctgggcgacagagcgagactccgtctcaaaaaaaaaaaatgttcctcaagtccatagctggtccccagggtccgtggcagaagccaaattgtaaccctttcttgaaggataggttcccacggggcgggtaacacaggctccagaacgggggtctcaccctgtggcgtccacactggccac

SEQ ID NO: 97026 - DNA, 775 bp, Homo sapiens
  misc_feature (18)..(18): n is a, c, g, or t
  misc_feature (23)..(23): n is a, c, g, or t
acttagctagtagaggcngggtnttaatcggccgaggcgattcgcctccgggttaggctgagcctcttgcttgctgtgactggtggagctgccgcgctgtccgcgttatctcctcccggtgagaacgaaccgcagtgtccaccggcgaggagccagccctgtcccggtcagagaaagacgacgaggatacctgggagcgggcggcggccgggctgggccgcgccggtgcgggctggcgactctgctcctccgcttgctgctgtctctgggaactgggtgccagcgctgaggggcttccagcggacagggacccccttccccggctcccctgcccaccctgccggggagggcggaagatgccggtgaagaagaagagaaaatcccctggggtggcagcagcagtagcggaagacggaggcctcaaaaagtgtaaaatctccaggtaccatctccccccacccttcaagcttccctcctccctcctttgctggacaactggaggaaaaggagtcgggcccggcctgccgggctggggctggagacagctattgcagatcccaaccccctgctagactaataagtggagaggaacatttttcaagcaagaagtgcctggcttggttttatgaatatgcaggtcctgatgaagttgtagggccagaaggaatggaaaaattttgtgaagacattggtgttgaacctgaaaatattatatgtagttaagcgtggaaatggggtggagcatggatttttccaggagatggttagggatgcc

SEQ ID NO: 97027 - DNA, 473 bp, Homo sapiens
ataaggtgtctagaagcagaacacccaaagaaaggaagggtcattcctctgtcattgcagagctcgtggggagtttgttttataattggagagatgagttcactgaattctgacaaaaatggtttctttttttctagggcctgttcttcttgatgaatttgttgagtggcaaaaagtccgtcagacatcatagcaagaactatgtgaagaaaatgcaaacctttcaattcccacgtgtatacaagctaatgtgatgagggggaaaaaaatccaacgggtgcattttcattcatatgaaagacttctcatagtacttttttttcctttttttaaaggaggtttttcttgttacatgtgatgggcattgagccacacctcttcttagactgaatattgaagtttttgttttgagttatgtttataacatttatttcagaacaataaagattcagatttgtgacaaaggccttaaa

SEQ ID NO: 97028 - DNA, 1539 bp, Homo sapiens
  misc_feature (18)..(18): n is a, c, g, or t
  misc_feature (23)..(23): n is a, c, g, or t
acttagctagtagaggcngggtnttaatcggccgaggcgattcgcctccgggttaggctgagcctcttgcttgctgtgactggtggagctgccgcgctgtccgcgttatctcctcccggtgagaacgaaccgcagtgtccaccggcgaggagccagccctgtcccggtcagagaaagacgacgaggatacctgggagcgggcggcggccgggctgggccgcgccggtgcgggctggcgactctgctcctccgcttgctgctgtctctgggaactgggtgccagcgctgaggggcttccagcggacagggacccccttccccggctcccctgcccaccctgccggggagggcggaagatgccggtgaagaagaagagaaaatcccctggggtggcagcagcagtagcggaagacggaggcctcaaaaagtgtaaaatctccagctattgcagatcccaaccccctgctagactaataagtggagaggaacatttttcaagcaagaagtgcctggcttggttttatgaatatgcaggtcctgatgaagttgtagggccagaaggaatggaaaaattttgtgaagacattggtgttgaacctgaaaatattattatgttagttttagcgtggaaattggaggctgaaagcatgggattttttaccaaggaagaatggttaaagggaatgacttcattacagtgtgactgcacagaaaagttacaaaacaaatttgactttttgcgctcacagttgaatgatatttcgtcatttaagaatatctacagatatgcctttgattttgcaagggataaagatcagagaagccttgatattgatactgctaaatctatgttagctcttctgcttgggaggacatggccactgttttcagtattttaccagtacctggagcaatcaaagtatcgtgttatgaacaaagatcaatggtacaatgtattagaattcagcagaacagtccatgctgatcttagtaactatgatgaagatggtgcttggcctgttcttcttgatgaatttgttgagtggcaaaaagtccgtcagacatcatagcaagaactatgtgaagaaaatgcaaacctttcaattcccacgtgtatacaagctaatgtgatgagggggaaaaaaatccaacgggtgcattttcattcatatgaaagacttctcatagtacttttttttcctttttttaaaggaggtttttcttgttacatgtgatgggcattgagccacacctcttcttagactgaatattgaagtttttgttttgagttatgtttataacatttatttcagaacaataaagattcagatttgtgacaaaggccttaaactcgtgccgaattcggcacgagttttttttttttttttcaaaaaagcccattttttttttttttgtaaaggctttgccctaaaacttctagcgtgtgccaatgggtaaccctgccacaatttgcacaagggtgtccggtgtagcccgcaaaacaaattcgggccatcaacaaaccaggccagggaaggg

SEQ ID NO: 97029 - DNA, 1319 bp, Homo sapiens
  misc_feature (18)..(18): n is a, c, g, or t
  misc_feature (23)..(23): n is a, c, g, or t
acttagctagtagaggcngggtnttaatcggccgaggcgattcgcctccgggttaggctgagcctcttgcttgctgtgactggtggagctgccgcgctgtccgcgttatctcctcccggtgagaacgaaccgcagtgtccaccggcgaggagccagccctgtcccggtcagagaaagacgacgaggatacctgggagcgggctggcgactctgctcctccgcttgctgctgtctctgggaactgggtgccagcgctgaggggcttccagcggacagggacccccttccccggctcccctgcccaccctgccggggagggcggaagatgccggtgaagaagaagagaaaatcccctggggtggcagcagcagtagcggaagacggaggcctcaaaaagtgtaaaatctccagctattgcagatcccaaccccctgctagactaataagtggagaggaacatttttcaagcaagaagtgcctggcttggttttatgaatatgcaggtcctgatgaagttgtagggccagaaggaatggaaaaattttgtgaagacattggtgttgaacctgaaaatattattatgttagttttagcgtggaaattggaggctgaaagcatgggattttttaccaaggaagaatggttaaagggaatgacttcattacagtgtgactgcacagaaaagttacaaaacaaatttgactttttgcgctcacagttgaatgatatttcgtcatttaagaatatctacagatatgcctttgattttgcaagggataaagatcagagaagccttgatattgatactgctaaatctatgttagctcttctgcttgggaggacatggccactgttttcagtattttaccagtacctggagcaatcaaagtatcgtgttatgaacaaagatcaatggtacaatgtattagaattcagcagaacagtccatgctgatcttagtaactatgatgaagatggtgcttggcctgttcttcttgatgaatttgttgagtggcaaaaagtccgtcagacatcatagcaagaactatgtgaagaaaatgcaaacctttcaattcccacgtgtatacaagctaatgtgatgagggggaaaaaaatccaacgggtgcattttcattcatatgaaagacttctcatagtacttttttttcctttttttaaaggaggtttttcttgttacatgtgatgggcattgagccacacctcttcttagactgaatattgaagtttttgttttgagttatgtttataacatttatttcagaacaataaagattcagatttgtgacaaaggccttaaa

SEQ ID NO: 97030 - DNA, 1453 bp, Homo sapiens
  misc_feature (18)..(18): n is a, c, g, or t
  misc_feature (23)..(23): n is a, c, g, or t
acttagctagtagaggcngggtnttaatcggccgaggcgattcgcctccgggttaggctgagcctcttgcttgctgtgactggtggagctgccgcgctgtccgcgttatctcctcccggtgagaacgaaccgcagtgtccaccggcgaggagccagccctgtcccggtcagagaaagacgacgaggatacctgggagcgggcggcggccgggctgggccgcgccggtgcgggctggcgactctgctcctccgcttgctgctgtctctgggaactgggtgccagcgctgaggggcttccagcggacagggacccccttccccggctcccctgcccaccctgccggggagggcggaagatgccggtgaagaagaagagaaaatcccctggggtggcagcagcagtagcggaagacggaggcctcaaaaagtgtaaaatctccaggtaccatctccccccacccttcaagcttccctcctccctcctttgctggacaactggaggaaaaggagtcgggcccggcctgccgggctggggctggagacagctattgcagatcccaaccccctgctagactaataagtggagaggaacatttttcaagcaagaagtgcctggcttggttttatgaatatgcaggtcctgatgaagttgtagggccagaaggaatggaaaaattttgtgaagacattggtgttgaacctgaaaatattattatgttagttttagcgtggaaattggaggctgaaagcatgggattttttaccaaggaagaatggttaaagggaatgacttcattacagtgtgactgcacagaaaagttacaaaacaaatttgactttttgcgctcacagttgaatgatatttcgtcatttaagaatatctacagatatgcctttgattttgcaagggataaagatcagagaagccttgatattgatactgctaaatctatgttagctcttctgcttgggaggacatggccactgttttcagtattttaccagtacctggagcaatcaaagtatcgtgttatgaacaaagatcaatggtacaatgtattagaattcagcagaacagtccatgctgatcttagtaactatgatgaagatggtgcttggcctgttcttcttgatgaatttgttgagtggcaaaaagtccgtcagacatcatagcaagaactatgtgaagaaaatgcaaacctttcaattcccacgtgtatacaagctaatgtgatgagggggaaaaaaatccaacgggtgcattttcattcatatgaaagacttctcatagtacttttttttcctttttttaaaggaggtttttcttgttacatgtgatgggcattgagccacacctcttcttagactgaatattgaagtttttgttttgagttatgtttataacatttatttcagaacaataaagattcagatttgtgacaaaggccttaaa

SEQ ID NO: 97031 - DNA, 1258 bp, Homo sapiens
  misc_feature (18)..(18): n is a, c, g, or t
  misc_feature (23)..(23): n is a, c, g, or t
acttagctagtagaggcngggtnttaatcggccgaggcgattcgcctccgggttaggctgagcctcttgcttgctgtgactggtggagctgccgcgctgtccgcgttatctcctcccggtgagaacgaaccgcagtgtccaccggcgaggagccagccctgtcccggtcagagaaagacgacgaggatacctgggagcgggcggcggccgggctgggccgcgccggtgcgggctggcgactctgctcctccgcttgctgctgtctctgggaactgggtgccagcgctgaggggcttccagcggacagggacccccttccccggctcccctgcccaccctgccggggagggcggaagatgccggtgaagaagaagagaaaatcccctggggtggcagcagcagtagcggaagacggaggcctcaaaaagtgtaaaatctccagctattgcagatcccaaccccctgctagactaataagtggagaggaacatttttcaagcaagaagtgcctggcttggttttatgaatatgcaggtcctgatgaagttgtagggccagaaggaatggaaaaattttgtgaagacattggtgttgaacctgaaaatgtgtgactgcacagaaaagttacaaaacaaatttgactttttgcgctcacagttgaatgatatttcgtcatttaagaatatctacagatatgcctttgattttgcaagggataaagatcagagaagccttgatattgatactgctaaatctatgttagctcttctgcttgggaggacatggccactgttttcagtattttaccagtacctggagcaatcaaagtatcgtgttatgaacaaagatcaatggtacaatgtattagaattcagcagaacagtccatgctgatcttagtaactatgatgaagatggtgcttggcctgttcttcttgatgaatttgttgagtggcaaaaagtccgtcagacatcatagcaagaactatgtgaagaaaatgcaaacctttcaattcccacgtgtatacaagctaatgtgatgagggggaaaaaaatccaacgggtgcattttcattcatatgaaagacttctcatagtacttttttttcctttttttaaaggaggtttttcttgttacatgtgatgggcattgagccacacctcttcttagactgaatattgaagtttttgttttgagttatgtttataacatttatttcagaacaataaagattcagatttgtgacaaaggccttaaa

SEQ ID NO: 97032 - DNA, 1124 bp, Homo sapiens
tttgcactgtgttatatcctaaacttttaaaactactcatgactaatgtctttcaccaaactgttacctacgaactttctaaagaaatgtgtgacaaaggcgtgattagtttcatttgctctgccatttttagctgtatatgtgataaaacatgttttaatacatctctttttaacttcgattttatttggaatttttgaatgagctgtttgtttgtttttaagcaaagtaattggagtgaactttctttgattcccaggttttcttttttccccttttttctttttttattgcattggtagatgcagggcaagaaatttattactctaaatttgtgactcagaattttaaaactaaattaacttcataaatgcgctcacttttttcttaatgcattacgtctaacccccagtgatacttttatttgattttcttgattatgtaatttgtttgatatttcttttatttaaggtgtgactgcacagaaaagttacaaaacaaatttgactttttgcgctcacagttgaatgatatttcgtcatttaagaatatctacagatatgcctttgattttgcaagggataaagatcagagaagccttgatattgatactgctaaatctatgttagctcttctgcttgggaggacatggccactgttttcagtattttaccagtacctggagcaatcaaagtatcgtgttatgaacaaagatcaatggtacaatgtattagaattcagcagaacagtccatgctgatcttagtaactatgatgaagatggtgcttggcctgttcttcttgatgaatttgttgagtggcaaaaagtccgtcagacatcatagcaagaactatgtgaagaaaatgcaaacctttcaattcccacgtgtatacaagctaatgtgatgagggggaaaaaaatccaacgggtgcattttcattcatatgaaagacttctcatagtacttttttttcctttttttaaaggaggtttttcttgttacatgtgatgggcattgagccacacctcttcttagactgaatattgaagtttttgttttgagttatgtttataacatttatttcagaacaataaagattcagatttgtgacaaaggccttaaa

SEQ ID NO: 97033 - DNA, 602 bp, Homo sapiens
gctctagaggacccgtcattttctacacatctacagatatgcctttgattttgcaagggataaagatcagagaagccttgatattgatactgctaaatctatgttagctcttctgcttgggaggacatggccactgttttcagtattttaccagtacctggagcaatcaaagtatcgtgttatgaacaaagatcaatggtacaatgtattagaattcagcagaacagtccatgctgatcttagtaactatgatgaagatggtgcttggcctgttcttcttgatgaatttgttgagtggcaaaaagtccgtcagacatcatagcaagaactatgtgaagaaaatgcaaacctttcaattcccacgtgtatacaagctaatgtgatgagggggaaaaaaatccaacgggtgcattttcattcatatgaaagacttctcatagtacttttttttcctttttttaaaggaggtttttcttgttacatgtgatgggcattgagccacacctcttcttagactgaatattgaagtttttgttttgagttatgtttataacatttatttcagaacaataaagattcagatttgtgacaaaggccttaaa

SEQ ID NO: 97034 - DNA, 916 bp, Homo sapiens
  misc_feature (18)..(18): n is a, c, g, or t
  misc_feature (23)..(23): n is a, c, g, or t
acttagctagtagaggcngggtnttaatcggccgaggcgattcgcctccgggttaggctgagcctcttgcttgctgtgactggtggagctgccgcgctgtccgcgttatctcctcccggtgagaacgaaccgcagtgtccaccggcgaggagccagccctgtcccggtcagagaaagacgacgaggatacctgggagcgggcggcggccgggctgggccgcgccggtgcgggctggcgactctgctcctccgcttgctgctgtctctgggaactgggtgccagcgctgaggggcttccagcggacagggacccccttccccggctcccctgcccaccctgccggggagggcggaagatgccggtgaagaagaagagaaaatcccctggggtggcagcagcagtagcggaagacggaggcctcaaaaagtgtaaaatctccagctattgcagatcccaaccccctgctagactaataagtggagaggaacatttttcaagcaagaagtgcctggcttggttttatgaatatgcaggtcctgatgaagttgtagggccagaaggaatggaaaaattttgtgaagacattggtgttgaacctgaaaatattattatgttagttttagcgtggaaattggaggctgaaagcatgggattttttaccaaggaagaatggttaaagggaatgacttcattacaacggagtcttgctttgtcgccaggccactgcactccagcctgggcgacagagcgagactccgtctcaaaaaaaaaaaatgttcctcaagtccatagctggtccccagggtccgtggcagaagccaaattgtaaccctttcttgaaggataggttcccacggggcgggtaacacaggctccagaacgggggtctcaccctgtggcgtccacactggccac

SEQ ID NO: 97035 - DNA, 815 bp, Homo sapiens
  misc_feature (18)..(18): n is a, c, g, or t
  misc_feature (23)..(23): n is a, c, g, or t
acttagctagtagaggcngggtnttaatcggccgaggcgattcgcctccgggttaggctgagcctcttgcttgctgtgactggtggagctgccgcgctgtccgcgttatctcctcccggtgagaacgaaccgcagtgtccaccggcgaggagccagccctgtcccggtcagagaaagacgacgaggatacctgggagcgggcggcggccgggctgggccgcgccggtgcgggctggcgactctgctcctccgcttgctgctgtctctgggaactgggtgccagcgctgaggggcttccagcggacagggacccccttccccggctcccctgcccaccctgccggggagggcggaagatgccggtgaagaagaagagaaaatcccctggggtggcagcagcagtagcggaagacggaggcctcaaaaagtgtaaaatctccagctattgcagatcccaaccccctgctagactaataagtggagaggaacatttttcaagcaagaagtgcctggcttggttttatgaatatgcaggtcctgatgaagttgtagggccagaaggaatggaaaaattttgtgaagacattggtgttgaacctgaaaatattattatgttagttttagcgtggaaattggaggctgaaagcatgggattttttaccaaggaagaatggttaaagggaatgacttcattacaattccgcgtgcctgcccacaaagtcacaatttgacttttggcctcaagtggatgttttctgcattaggatatttcagattgccttggttttgaaggataccaggcttgttttgtctgt

SEQ ID NO: 97036 - DNA, 1350 bp, Homo sapiens
  misc_feature (18)..(18): n is a, c, g, or t
  misc_feature (23)..(23): n is a, c, g, or t
acttagctagtagaggcngggtnttaatcggccgaggcgattcgcctccgggttaggctgagcctcttgcttgctgtgactggtggagctgccgcgctgtccgcgttatctcctcccggtgagaacgaaccgcagtgtccaccggcgaggagccagccctgtcccggtcagagaaagacgacgaggatacctgggagcgggcggcggccgggctgggccgcgccggtgcgggctggcgactctgctcctccgcttgctgctgtctctgggaactgggtgccagcgctgaggggcttccagcggacagggacccccttccccggctcccctgcccaccctgccggggagggcggaagatgccggtgaagaagaagagaaaatcccctggggtggcagcagcagtagcggaagacggaggcctcaaaaagtgtaaaatctccagctattgcagatcccaaccccctgctagactaataagtggagaggaacatttttcaagcaagaagtgcctggcttggttttatgaatatgcaggtcctgatgaagttgtagggccagaaggaatggaaaaattttgtgaagacattggtgttgaacctgaaaatattattatgttagttttagcgtggaaattggaggctgaaagcatgggattttttaccaaggaagaatggttaaagggaatgacttcattacagtgtgactgcacagaaaagttacaaaacaaatttgactttttgcgctcacagttgaatgatatttcgtcatttaagaatatctacagatatgcctttgattttgcaagggataaagatcagagaagccttgatattgatactgctaaatctatgttagctcttctgcttgggaggacatggccactgttttcagtattttaccagtacctggagcaatcaaagtatcgtgttatgaacaaagatcaatggtacaatgtattagaattcagcagaacagtccatgctgatcttagtaactatgatgaagatggtgcttggcctgttcttcttgatgaatttgttgagtggcaaaaagtccgtcagacatcatagcaagaactatgtgaagaaaatgcaaacctttcaattcccacgtgtatacaagctaatgtgatgagggggaaaaaaatccaacgggtgcattttcattcatatgaaagacttctcatagtacttttttttcctttttttaaaggaggtttttcttgttacatgtgatgggcattgagccacacctcttcttagactgaatattgaagtttttgttttgagttatgtttataacatttatttcagaacaataaagattcagatttgtgacaaaggccttaaa

SEQ ID NO: 97037 - DNA, 1398 bp, Homo sapiens
  misc_feature (18)..(18): n is a, c, g, or t
  misc_feature (23)..(23): n is a, c, g, or t
  misc_feature (1389)..(1389): n is a, c, g, or t
acttagctagtagaggcngggtnttaatcggccgaggcgattcgcctccgggttaggctgagcctcttgcttgctgtgactggtggagctgccgcgctgtccgcgttatctcctcccggtgagaacgaaccgcagtgtccaccggcgaggagccagccctgtcccggtcagagaaagacgacgaggatacctgggagcgggcggcggccgggctgggccgcgccggtgcgggctggcgactctgctcctccgcttgctgctgtctctgggaactgggtgccagcgctgaggggcttccagcggacagggacccccttccccggctcccctgcccaccctgccggggagggcggaagatgccggtgaagaagaagagaaaatcccctggggtggcagcagcagtagcggaagacggaggcctcaaaaagtgtaaaatctccagctattgcagatcccaaccccctgctagactaataagtggagaggaacatttttcaagcaagaagtgcctggcttggttttatgaatatgcaggtcctgatgaagttgtagggccagaaggaatggaaaaattttgtgaagacattggtgttgaacctgaaaatattattatgttagttttagcgtggaaattggaggctgaaagcatgggattttttaccaaggaagaatggttaaagggaatgacttcattacagtgtgactgcacagaaaagttacaaaacaaatttgactttttgcgctcacagttgaatgatatttcgtcatttaagaatatctacagatatgcctttgattttgcaagggataaagatcagagaagccttgatattgatactgctaaatctatgttagctcttctgcttgggaggacatggccactgttttcagtattttaccagtacctggagcaatcaaagtatcgtgttatgaacaaagatcaatggtacaatgtattagaattcagcagaacagtccatgctgatcttagtaactatgatgaagatggtgcttggcctgttcttcttgatgaatttgttgagtggcaaaaagtccgtcagacatcatagcaagaactatgtgaagaaaatgcaaacctttcaattcccacgtgtatacaagctaatgtgtggcggggcgacaacccacggggcgttcattctataagactctcctagactcttttccctccttacgagcgggtcctgttcacttcgggggtggtgcgcccctttttgatgattgtgagtctgtcggggggggttacactatttcgaccacagtccgtttgtggaacaaaaacggctttgtggagcgacaggaaggcggttgccccttaagatgctagtgcccaacaagcactcagagcgatgtccagccgaatatcancgcacacgc

SEQ ID NO: 97038 - DNA, 1621 bp, Homo sapiens
  misc_feature (18)..(18): n is a, c, g, or t
  misc_feature (23)..(23): n is a, c, g, or t
acttagctagtagaggcngggtnttaatcggccgaggcgattcgcctccgggttaggctgagcctcttgcttgctgtgactggtggagctgccgcgctgtccgcgttatctcctcccggtgagaacgaaccgcagtgtccaccggcgaggagccagccctgtcccggtcagagaaagacgacgaggatacctgggagcgggcggcggccgggctgggccgcgccggtgcgggctggcgactctgctcctccgcttgctgctgtctctgggaactgggtgccagcgctgaggggcttccagcggacagggacccccttccccggctcccctgcccaccctgccggggagggcggaagatgccggtgaagaagaagagaaaatcccctggggtggcagcagcagtagcggaagacggaggcctcaaaaagtgtaaaatctccaggtaccatctccccccacccttcaagcttccctcctccctcctttgctggacaactggaggaaaaggagtcgggcccggcctgccgggctggggctggagacaggtgaggcccctttgatcgagctaggctgtaggtgccgaacaccgcgagtctccgcgcccgacccgacctcgtgttcgagtgtgtgcacgctggcgtttatggagagactagaagagccgcccacgttaagagtctacgtgccctgcagggtggggaacagatgcatatctattgcagatcccaaccccctgctagactaataagtggagaggaacatttttcaagcaagaagtgcctggcttggttttatgaatatgcaggtcctgatgaagttgtagggccagaaggaatggaaaaattttgtgaagacattggtgttgaacctgaaaatattattatgttagttttagcgtggaaattggaggctgaaagcatgggattttttaccaaggaagaatggttaaagggaatgacttcattacagtgtgactgcacagaaaagttacaaaacaaatttgactttttgcgctcacagttgaatgatatttcgtcatttaagaatatctacagatatgcctttgattttgcaagggataaagatcagagaagccttgatattgatactgctaaatctatgttagctcttctgcttgggaggacatggccactgttttcagtattttaccagtacctggagcaatcaaagtatcgtgttatgaacaaagatcaatggtacaatgtattagaattcagcagaacagtccatgctgatcttagtaactatgatgaagatggtgcttggcctgttcttcttgatgaatttgttgagtggcaaaaagtccgtcagacatcatagcaagaactatgtgaagaaaatgcaaacctttcaattcccacgtgtatacaagctaatgtgatgagggggaaaaaaatccaacgggtgcattttcattcatatgaaagacttctcatagtacttttttttcctttttttaaaggaggtttttcttgttacatgtgatgggcattgagccacacctcttcttagactgaatattgaagtttttgttttgagttatgtttataacatttatttcagaacaataaagattcagatttgtgacaaaggccttaaa

SEQ ID NO: 97039 - DNA, 827 bp, Homo sapiens
  misc_feature (18)..(18): n is a, c, g, or t
  misc_feature (23)..(23): n is a, c, g, or t
acttagctagtagaggcngggtnttaatcggccgaggcgattcgcctccgggttaggctgagcctcttgcttgctgtgactggtggagctgccgcgctgtccgcgttatctcctcccggtgagaacgaaccgcagtgtccaccggcgaggagccagccctgtcccggtcagagaaagacgacgaggatacctgggagcgggcggcggccgggctgggccgcgccggtgcgggctggcgactctgctcctccgcttgctgctgtctctgggaactgggtgccagcgctgaggggcttccagcggacagggacccccttccccggctcccctgcccaccctgccggggagggcggaagatgccggtgaagaagaagagaaaatcccctggggtggcagcagcagtagcggaagacggaggcctcaaaaagtgtaaaatctccagctattgcagatcccaaccccctgctagactaataagtggagaggaacatttttcaagcaagaagtgcctggcttggttttatgaatatgcaggtcctgatgaagttgtagggccagaaggaatggaaaaattttgtgaagacattggtgttgaacctgaaaatattattatgttagttttagcgtggaaattggaggctgaaagcatgggattttttaccaaggaagaatggttaaagggaatgacttcattacaacggagtcttgctttgtcgccaggctacagtacagtggcgcgatcttggctcactgcaacctccgcctcctgggttcaagcgattctcctgcctcagcctcccgagctgggactacgggcgtgtgcctcc

SEQ ID NO: 97040 - DNA, 513 bp, Homo sapiens
tgacacagagaaaatatcctacaatgaacaagccagagggacctggtagaggactataaaattgtggaagcaaaattgctgagaatgtcaaatgatattacagggatcctccctggcatttagctgaaggaagcaactcttgttttctaatttgctgggtcattggccatttagttttaggttaatataattctctgatccttttagggccatccaggttatgcactagtacattcctacattcaattgaaataaattgagggacggcaagtgtgttggaaagaacaccgacttcattgagaaggtaaagtatttgagtcctggccctgacgcttaatttggccagactttcatcttctcccagcctcaagttttacctacctcacaaggttgttgtgaggatctaaaaatacacacacacacacacacacacacacacacacactttgttggttaactataaatgtaatatctctatgttataattctgttgctaatgtcttttttccaaga

SEQ ID NO: 97041 - DNA, 666 bp, Homo sapiens
agctgacagtcaggatgtcagctgcagctccagtcctctgaaggcttccccaggactggggaatctgctcccaagctctctcatatagctgttggcaaggagacctcttccttgttggctgtgggtcagaggcttctgttcctcaccatgtggcctgtccatagaacaacatggcagtgggaaaaatcgaagggagagagaggtggaagccacaatgtcttttacaacctaatcttgcctccgaagtaacatatcatcacatttgtactcttttggtcactggtcacacagaccaacccttgtacaatgtgggagggcaccttggaaattcatgcccaaaagggcatgaataccagcaggtggggatcaccgagggcaccttggagatggctctgtctatctcaccagcctgactgaactcggccttgtgcctcttgctactccctagccctggcttattatagttttgcataataatatgaaataccaataagaattgtttgcatcttaaatgatcaataagggctgattagcttactaactcttgctacataggatgagaggcataagaaaagaatgtctgagctctccaggcttcagaaaaccattctacaacaaggaagggtgtgggcagataagtggatggatggaagaattaaaagttgg

SEQ ID NO: 97042 - DNA, 738 bp, Homo sapiens
agggcggggcgcgcccggcgcgacgcggagcaggccagcccccgactactgcccgcggaatgggcaagattagtttgttaataatctttcctcctctcctcctcctcctccctcacctaaaaatagaacgtaagtggggaggccaagtctcacaaaacatcccccgcgagaaaacaagtgtctgcttgggcaccctgaaacatacacttgaaagagtcgcctgaatatagactctttagtgtccaaggaattggggtaaggacggaaagaggtgcttgattggtgttgccaaaatgtaaaaactgcaaaagactaagcttcctggagtgctactttcatacttaaagttatttatcgtgtttatgttatgaatgaaaatgaattgtgaaaggatatttaatctggaaatttcacattgaagttggactttggtgagggagaatagaggaaacaattgggacaatgtggagatagttgcttggattttggtgagacagcatgatacaagaaacaaatgatgtcagggttcaaaactttttaaagccagctttggcattccgttttgttatgtttaaattctcattagcaaaaatactcaaattctatccaaaaccagacacaatgtgacagacctatcaagcagcattgttcccctaaatgttacatctgaactatacatataagtaaggcttccaatattttattgtacttggctatgctctgaagaacaagttagaa

SEQ ID NO: 97043 - DNA, 115 bp, Homo sapiens
gtcacgcccacagactctcttctgcctagttcccaaaagctgcccaaacccgtcagcctcccaggaccctaaactgagggaatagaagcagccccttgacctctactccttttta

SEQ ID NO: 97044 - DNA, 487 bp, Homo sapiens
tatgtcattcacttaaaatcacaatttccaagaacctatagacaatgttaagtgaatacttactgtatatattatgtacacatagaatgttacatattatatatatggttttaggtgtatatatatgtataagaatgcattaaaaataataatcatatatttatgaataaagatgttttaaacatagaacattggttggaataataacacattaataacaatttaaaatttcaataataaggggctataatttggaatattatacaaatttaaattcatgctttgagacttctttaaaatatggaaatactcaagctgtgtttgcagtttaaagagttataaaatagtacatatatcattggttcccttttaatttgaatgcatttggataaaataaagatataattttgaatatatttggacagaataaaatcccaaattcaagataggaattgttgggtttggtagatattcagcaactttattt

SEQ ID NO: 97045 - DNA, 395 bp, Homo sapiens
  misc_feature (382)..(382): n is a, c, g, or t
gcagtcctcaccagtccattcagtcattctacagcaagatggtccctctgtggtgagtgggatataaggcagtgcatctttcatgatcacaaagaaagcctatgttgtggatagcattgcgtctcttgatgtaggcattgttatggcaaataatagcactgtggccacatctgtaaggccattccagcctaaatttagtgtctcccataatcccaacccatgcactaggctgggtgttctctcagaatatagaggcaatgaatcagcttaagaccctgggacacacaaaggaaaaggaagaagaatatttagaagttgttatggaatcctgtgtcccctaaagtgtggtaaccatgttacccattccagctgggttaaagtngggggagggatct

SEQ ID NO: 97046 - DNA, 1953 bp, Homo sapiens
gcaggctgtcggtccaagtccttgatggtagcgggggctgggggggagggggcggggggggccgcgccgtgctagccgttgggcctgcctcggaggaggcgtcgccgccgccgctgccgctgccggcgccgttgccgctgccgggaaacacaaggaaagggaaccagcgcagcgtggcgatgggcgggggtagagccccgccggagaggctgggcggctgccggtgacagactgtgccctgtccacggtgcctcctgcatgtcctgctgccctgagctgtcccgagctaggtgacagcgtaccacgctgccaccatgaatgaggtgtctgtcatcaaagaaggctggctccacaagcgtggtgaatacatcaagacctggaggccacggtacttcctgctgaagagcgacggctccttcattgggtacaaggagaggcccgaggcccctgatcagactctaccccccttaaacaacttctccgtagcagaatgccagctgatgaagaccgagaggccgcgacccaacacctttgtcatacgctgcctgcagtggaccacagtcatcgagaggaccttccacgtggattctccagacgagagggaggagtggatgcgggccatccagatggtcgccaacagcctcaagcagcgggccccaggcgaggaccccatggactacaagtgtggctcccccagtgactcctccacgactgaggagatggaagtggcggtcagcaaggcacgggctaaagtgaccatgaatgacttcgactatctcaaactccttggcaagggaacctttggcaaagtcatcctggtgcgggagaaggccactggccgctactacgccatgaagatcctgcggaaggaagtcatcattgccaaggatgaagtcgctcacacagtcaccgagagccgggtcctccagaacaccaggcacccgttcctcactgcgctgaagtatgccttccagacccacgaccgcctgtgctttgtgatggagtatgccaacgggggtgagctgttcttccacctgtcccgggagcgtgtcttcacagaggagcgggcccggttttatggtgcagagattgtctcggctcttgagtacttgcactcgcgggacgtggtataccgcgacatcaagctggaaaacctcatgctggacaaagatggccacatcaagatcactgactttggcctctgcaaagagggcatcagtgacggggccaccatgaaaaccttctgtgggaccccggagtacctggcgcctgaggtgctggaggacaatgactatggccgggccgtggactggtgggggctgggtgtggtcatgtacgagatgatgtgcggccgcctgcccttctacaaccaggaccacgagcgcctcttcgagctcatcctcatggaagagatccgcttcccgcgcacgctcagccccgaggccaagtccctgcttgctgggctgcttaagaaggaccccaagcagaggcttggtggggggcccagcgatgccaaggaggtcatggagcacaggttcttcctcagcatcaactggcaggacgtggtccagaagaagctcctgccacccttcaaacctcaggtcacgtccgaggtcgacacaaggtacttcgatgatgaatttaccgcccagtccatcacaatcacaccccctgaccgctatgacagcctgggcttactggagctggaccagcggacccacttcccccagttctccttttccgagaagagaaagacctgctgatgtctttgtttgtgtctttgattctcttcagtgatttttcatctttaaagagccattctttttcttctaatttcattttgctaagtttctcttctttgaagaaataaaatccatgatggaagagatggtggcatctgtatatttaattgtcttctatacagcctagaccagaattataaactagaattcc

SEQ ID NO: 97047 - DNA, 856 bp, Homo sapiens
taaatgttaacattttatttaaaccagtacaggcaccatgcttaacaaaagcctgtccaaaataaacatgcaataggacctagcagagactgaaaccacagcttaaggggttgtgtcagtggttggttttgttaaacgatgccagagaactgttaaaattcacaagactaacccgttaatgtttcaaccctccggaatgagattaccttggaccatctaaaccagggggaacggcccctgaattttcagcgcagtccatcacaatcacaccccctgaccgctatgacagcctgggcttactggagctggaccagcggacccacttcccccagttctcctccacgttctgcagccttaaggttgaacatgagtgcacgtccatgtcagtgctgtgggactcctgtgcgtgcctcggactgcgtgtgtcggcgggacgcaggcacacgtgggtgtgtgtgcatgtgtgtttgtgtgagggcagcgtgtcctccagtgtgcatggtgtgtgggcttgggccccatccctggcccgagcatttcatcctgtgggggaggggtgctgacctagtgggaggagccccactgtgatccatgagctgccctgcccacgcctcccctccctgtagcaacacctctgggtgtttggagtttagcttttgtgggtttgctctccctatcccatctcctgtactacacagttcatggcagggtggggaggggtggggttggttcgggtgggtgagggtctttttcctctgtgtgcgatgttgttatctgacagttctccgtccctactggcctttctcctcgtcttcatatttgtacggtacaagcaataaagacactcatttcagac

SEQ ID NO: 97048 - DNA, 379 bp, Homo sapiens
  misc_feature (221)..(221): n is a, c, g, or t
cgtggacctatggacagtcaacaatatgtacttaaaagttgcactattgcaaaacgggtgtattatccaggtactcggtacactatttttttgtactgctggtcctgtaccagaaacattttcttttattgttacttgctttttaaactttgtttagccacttaaaatctgcttatggcacaatttgcctcaaaatccattccaagttgtatatttgtttnccaataaaaaaattacaatttaaaaaaaaaaaaaaaaaaaaaaactggagactagctctgtgtgcgatgttgttatctgacagttctccgtccctactggcctttctcctcgtcttcatatttgtacggtacaagcaataaagacactcatttcagac

SEQ ID NO: 97049 - DNA, 556 bp, Homo sapiens
  misc_feature (21)..(21): n is a, c, g, or t
aagtatgactagtacgagccnggtgttaatcggacgaggccacgttctgcagccttaaggttgaacatgagtgcacgtccatgtcagtgctgtgggactcctgtgcgtgcctcggactgcgtgtgtcggcgggacgcaggcacacgtgggtgtgtgtgcatgtgtgtttgtgtgagggcagcgtgtcctccagtgtgcatggtgtgtgggcttgggccccatccctggcccgagcatttcatcctgtgggggaggggtgctgacctagtgggaggagccccactgtgatccatgagctgccctgcccacgcctcccctccctgtagcaacacctctgggtgtttggagtttagcttttgtgggtttgctctccctatcccatctcctgtactacacagttcatggcagggtggggaggggtggggttggttcgggtgggtgagggtctttttcctctgtgtgcgatgttgttatctgacagttctccgtccctactggcctttctcctcgtcttcatatttgtacggtacaagcaataaagacactcatttcagac

SEQ ID NO: 97050 - DNA, 752 bp, Homo sapiens
  misc_feature (713)..(713): n is a, c, g, or t
acttctctgggcgccaccgtagctcccgacctgctgtccgcaaataaccccaggctgggaaaggcaaaggcgccttggtctctgtggaccctggccaggccccaggctccaggtgaatacatcaagacctggaggccacggtacttcctgctgaagagcgacggctccttcattgggtacaaggagaggcccgaggcccctgatcagactctaccccccttaaacaacttctccgtagcagaatgccagctgatgaagaccgagaggccgcgacccaacacctttgtcatacgctgcctgcagtggaccacagtcatcgagaggaccttccacgtggattctccagacgagagggaggagtggatgcgggccatccagatggtcgccaacagcctcaagcagcgggccccaggcgaggaccccatggactacaagtgtggctcccccagtgactcctccacgactgaggagatggaagtggcggtcagcaaggcacgggctaaagtgaccatgaatgacttcgactatctcaaactccttggcaagggaacctttggcaaagtcatcctggtgcgggagaaggccactggccgctactacgccatgaagatcctgcggaaggaagtcatcattgccaaggatgaagtcgctcacacagtcaccgagagccgggtcctccagaacaccaggcacccgttcctcactcgctgaantatgccttcagacccactggatgaggggtaccgagctcg

SEQ ID NO: 97051 - DNA, 5317 bp, Homo sapiens
gcaggctgtcggtccaagtccttgatggtagcgggggctgggggggagggggcggggggggccgcgccgtgctagccgttgggcctgcctcggaggaggcgtcgccgccgccgctgccgctgccggcgccgttgccgctgccgggaaacacaaggaaagggaaccagcgcagcgtggcgatgggcgggggtagagccccgccggagaggctgggcggctgccggtgacagactgtgccctgtccacggtgcctcctgcatgtcctgctgccctgagctgtcccgagctaggtgacagcgtaccacgctgccaccatgaatgaggtgtctgtcatcaaagaaggctggctccacaagcgtggtgaatacatcaagacctggaggccacggtacttcctgctgaagagcgacggctccttcattgggtacaaggagaggcccgaggcccctgatcagactctaccccccttaaacaacttctccgtagcagaatgccagctgatgaagaccgagaggccgcgacccaacacctttgtcatacgctgcctgcagtggaccacagtcatcgagaggaccttccacgtggattctccagacgagagggaggagtggatgcgggccatccagatggtcgccaacagcctcaagcagcgggccccaggcgaggaccccatggactacaagtgtggctcccccagtgactcctccacgactgaggagatggaagtggcggtcagcaaggcacgggctaaagtgaccatgaatgacttcgactatctcaaactccttggcaagggaacctttggcaaagtcatcctggtgcgggagaaggccactggccgctactacgccatgaagatcctgcggaaggaagtcatcattgccaaggatgaagtcgctcacacagtcaccgagagccgggtcctccagaacaccaggcacccgttcctcactgcgctgaagtatgccttccagacccacgaccgcctgtgctttgtgatggagtatgccaacgggggtgagctgttcttccacctgtcccgggagcgtgtcttcacagaggagcgggcccggttttatggtgcagagattgtctcggctcttgagtacttgcactcgcgggacgtggtataccgcgacatcaagctggaaaacctcatgctggacaaagatggccacatcaagatcactgactttggcctctgcaaagagggcatcagtgacggggccaccatgaaaaccttctgtgggaccccggagtacctggcgcctgaggtgctggaggacaatgactatggccgggccgtggactggtgggggctgggtgtggtcatgtacgagatgatgtgcggccgcctgcccttctacaaccaggaccacgagcgcctcttcgagctcatcctcatggaagagatccgcttcccgcgcacgctcagccccgaggccaagtccctgcttgctgggctgcttaagaaggaccccaagcagaggcttggtggggggcccagcgatgccaaggaggtcatggagcacaggttcttcctcagcatcaactggcaggacgtggtccagaagaagctcctgccacccttcaaacctcaggtcacgtccgaggtcgacacaaggtacttcgatgatgaatttaccgcccagtccatcacaatcacaccccctgaccgctatgacagcctgggcttactggagctggaccagcggacccacttcccccagttctcctactcggccagcatccgcgagtgagcagtctgcccacgcagaggacgcacgctcgctgccatcaccgctgggtggttttttccccctaactttttacttagcctttttggtttgtgtccccacccccacctcctcaccccctttccagttcttcttcaggcccctcccagacgcaccccagcggcccctgcagcccctgcctccagcctccagcctcacctttgtgcccagactcgcatttggaagactccacctcccgcccaggcctgggctgttgggcggttggagattcaggttttaatccacacaagccccagtgaggggtgaagcatggcgcctggggcctgcctgagtttctggcctgggtgtcgtgctggtgtctgcctccgcgctgctgcatctggacgaaggctgccttctggtgggacgcgacacccggcagacagtggtgctgccttccaggccccgtggcctaggctcggagtggccaggcacggggcggtccaatcccccacccgctgtccccctatgggggcagaaaagcaataatgtccaggggcaggcaggggcccttgggagctgcagggctgggggttagggctgctccctggtgaatggagtcagatcctaggatctgtaccatggggaaccaggagtggccgggctgggtgccgcctcctggtccggcctcctccccaccaaactgtcctcaccctatggatgaggcaggaggaacatttggggccaaacctgcctgcctcccagccccgtgccttactagggcttccttccagctggccttacctcccgctggaccctgggcctggcctggccccactgggggctatgggctgggctcaccctctcctctgcgggggtggagggccaccagccttggctgttacaatcttacaccggacagtattgggccccatggacttggtcagggaggggtgggggtgggcatctctggtacctattggggtggggggcctctgaaaagggaggctcctaggcccccctcacccctccctctccccagggccccacgttctgcagccttaaggttgaacatgagtgcacgtccatgtcagtgctgtgggactcctgtgcgtgcctcggactgcgtgtgtcggcgggacgcaggcacacgtgggtgtgtgtgcatgtgtgtttgtgtgagggcagcgtgtcctccagtgtgcatggtgtgtgggcttgggccccatccctggcccgagcatttcatcctgtgggggaggggtgctgacctagtgggaggagccccactgtgatccatgagctgccctgcccacgcctcccctccctgtagcaacacctctgggtgtttggagtttagcttttgtgggtttgctctccctatcccatctcctgtactacacagttcatggcagggtggggaggggtggggttggttcgggtgggtgagggtctttttcctctgtgtgcgatgttgttatctgacagttctccgtccctactggcctttctcctcgtcttcatatttgtacggtacaagcaataaagacactcatttcagaccagggcccagcctgcactcacgccagcccaaccactctgggctttgccttggtgatggagtcagacccctgggccccagctcctcctgtactagccgttcccttcagcaaggagggcactgagctcagggtgagggcagctggggtgtgtgcaggagctcaggctggagagggtgggtggagctggtgctgtggggctgaggggtatgggaaggctccccgcatgtgggggtggggtggacagagaccactccaggccctcagtgctgcttaggctaagagaggtggggtggagggacagggctggaagatctgggtagcccagaatgaggagggtgcctgtgctgtcactgaatgagagggagtggttcattccacccggctgccgagcctcagaggggggcattcctatcctgccccacctccctgtttatgctgccacctggaagccttgaggcccccaaattccagtacagacccagtggtgtgttcatggtggcgtggttgctgtcacctgggagctcctgagcgtttggttagaaccctgttcagcttggggtcagccctcccctagtcactgccctttagcctggatgtgtctgggcccctgcacttcccgtgcttgagtcacgtggctgcatggccgggcgctggccggatggaacacctcccccagcaagggaccagggaccagagccctggcctgccctgctgagccctgctgtgcagagggcctggcacagatgaatttgagattttgccgcaaggtgttagcacttcacacccattgagtctttgagattttaagtgaatgtaagcagaaaaagtcagatccaatttacagaaatcagagttagctacagctaggactcgtttggttggggttttttagtttgtctttctaaagtcatgtggaccttaatttaattacaaaagtctaccctggtggtcataaaataggcaggcctatgaagaaaggccttttactcttccatctcgtcccagccccgagttgacccacgttgctgctcctcacaccatggtgatgcaggtctcgtagtgtgggcacaggcctggctacctcatctttttagtgcctctctcctcttccacaggatggggtcccacagctgcagcagctggccccgtagttgagcatgtgtggttatcctgtagagcttttcccaagaagggtgtttgaacttagagtcttaataaaatcttaccaaataaattttgagtagaataatcgtcttttgcaatgtacattttaaaaatttcacacattcttttttgtatataaagaacagtgactgggcacagtggctcatgcctgtaatcccagcaatttgggaggccgaggcgggcgggtctcttgaggccaggggttcgagaccagcctgggcatcatagggagaccttcatctctacaaaaaatacaaaaattagctgggcatggtggtgcatgcctgcaatcccagctaacttggaaggctgaggtgaggtgggaagatcacttgagcccaggagtttgaggctgcagtgagctatgattgcggcactgcactgcagcctgggacaatgagactgtgtctctaaaaataaaaaaaaaaaaaacatgatacatgctattaaaaaagacagcaaagcaggagtataagaaaggaaattcacccgaggtcgcagggccttgagtactcattttggtgctgattacctctctgcaaatggacacggcatcataaattggtagtttcctgctctttttgtgtaatcttttccagttaatgtgaagcctctgggggctgccctcgtgcactgatggttgtgtggagtcgggggcggcagtgcgattcccttttagctgctgcatggggggaactcaggctttccagctgcttcctggggttccatggggtagacccctcaaccgcttcagctgccccgttaacaggaattgacttggtttcgtttggtgctaccagcagtcctgtaataaactagctatccatctgtaaa

SEQ ID NO: 97052 - DNA, 3299 bp, Homo sapiens
gcaggctgtcggtccaagtccttgatggtagcgggggctgggggggagggggcggggggggccgcgccgtgctagccgttgggcctgcctcggaggaggcgtcgccgccgccgctgccgctgccggcgccgttgccgctgccgggaaacacaaggaaagggaaccagcgcagcgtggcgatgggcgggggtagagccccgccggagaggctgggcggctgccggtgacagactgtgccctgtccacggtgcctcctgcatgtcctgctgccctgagctgtcccgagctaggtgacagcgtaccacgctgccaccatgaatgaggtgtctgtcatcaaagaaggctggctccacaagcgtggtgaatacatcaagacctggaggccacggtacttcctgctgaagagcgacggctccttcattgggtacaaggagaggcccgaggcccctgatcagactctaccccccttaaacaacttctccgtagcagaatgccagctgatgaagaccgagaggccgcgacccaacacctttgtcatacgctgcctgcagtggaccacagtcatcgagaggaccttccacgtggattctccagacgagagggaggagtggatgcgggccatccagatggtcgccaacagcctcaagcagcgggccccaggcgaggaccccatggactacaagtgtggctcccccagtgactcctccacgactgaggagatggaagtggcggtcagcaaggcacgggctaaagtgaccatgaatgacttcgactatctcaaactccttggcaagggaacctttggcaaagtcatcctggtgcgggagaaggccactggccgctactacgccatgaagatcctgcggaaggaagtcatcattgccaaggatgaagtcgctcacacagtcaccgagagccgggtcctccagaacaccaggcacccgttcctcactgcgctgaagtatgccttccagacccacgaccgcctgtgctttgtgatggagtatgccaacgggggtgagctgttcttccacctgtcccgggagcgtgtcttcacagaggagcgggcccggttttatggtgcagagattgtctcggctcttgagtacttgcactcgcgggacgtggtataccgcgacatcaagctggaaaacctcatgctggacaaagatggccacatcaagatcactgactttggcctctgcaaagagggcatcagtgacggggccaccatgaaaaccttctgtgggaccccggagtacctggcgcctgaggtgctggaggacaatgactatggccgggccgtggactggtgggggctgggtgtggtcatgtacgagatgatgtgcggccgcctgcccttctacaaccaggaccacgagcgcctcttcgagctcatcctcatggaagagatccgcttcccgcgcacgctcagccccgaggccaagtccctgcttgctgggctgcttaagaaggaccccaagcagaggcttggtggggggcccagcgatgccaaggaggtcatggagcacaggttcttcctcagcatcaactggcaggacgtggtccagaagaagctcctgccacccttcaaacctcaggtcacgtccgaggtcgacacaaggtacttcgatgatgaatttaccgcccagtccatcacaatcacaccccctgaccgctatgacagcctgggcttactggagctggaccagcggacccacttcccccagttctcctactcggccagcatccgcgagtgagcagtctgcccacgcagaggacgcacgctcgctgccatcaccgctgggtggttttttccccctaactttttacttagcctttttggtttgtgtccccacccccacctcctcaccccctttccagttcttcttcaggcccctcccagacgcaccccagcggcccctgcagcccctgcctccagcctccagcctcacctttgtgcccagactcgcatttggaagactccacctcccgcccaggcctgggctgttgggcggttggagattcaggttttaatccacacaagccccagtgaggggtgaagcatggcgcctggggcctgcctgagtttctggcctgggtgtcgtgctggtgtctgcctccgcgctgctgcatctggacgaaggctgccttctggtgggacgcgacacccggcagacagtggtgctgccttccaggccccgtggcctaggctcggagtggccaggcacggggcggtccaatcccccacccgctgtccccctatgggggcagaaaagcaataatgtccaggggcaggcaggggcccttgggagctgcagggctgggggttagggctgctccctggtgaatggagtcagatcctaggatctgtaccatggggaaccaggagtggccgggctgggtgccgcctcctggtccggcctcctccccaccaaactgtcctcaccctatggatgaggcaggaggaacatttggggccaaacctgcctgcctcccagccccgtgccttactagggcttccttccagctggccttacctcccgctggaccctgggcctggcctggccccactgggggctatgggctgggctcaccctctcctctgcgggggtggagggccaccagccttggctgttacaatcttacaccggacagtattgggccccatggacttggtcagggaggggtgggggtgggcatctctggtacctattggggtggggggcctctgaaaagggaggctcctaggcccccctcacccctccctctccccagggccccacgttctgcagccttaaggttgaacatgagtgcacgtccatgtcagtgctgtgggactcctgtgcgtgcctcggactgcgtgtgtcggcgggacgcaggcacacgtgggtgtgtgtgcatgtgtgtttgtgtgagggcagcgtgtcctccagtgtgcatggtgtgtgggcttgggccccatccctggcccgagcatttcatcctgtgggggaggggtgctgacctagtgggaggagccccactgtgatccatgagctgccctgcccacgcctcccctccctgtagcaacacctctgggtgtttggagtttagcttttgtgggtttgctctccctatcccatctcctgtactacacagttcatggcagggtggggaggggtggggttggttcgggtgggtgagggtctttttcctctgtgtgcgatgttgttatctgacagttctccgtccctactggcctttctcctcgtcttcatatttgtacggtacaagcaataaagacactcatttcagac

SEQ ID NO: 97053 - DNA, 3469 bp, Homo sapiens
  misc_feature (3356)..(3356): n is a, c, g, or t
  misc_feature (3362)..(3362): n is a, c, g, or t
  misc_feature (3367)..(3367): n is a, c, g, or t
  misc_feature (3385)..(3385): n is a, c, g, or t
  misc_feature (3402)..(3403): n is a, c, g, or t
  misc_feature (3406)..(3407): n is a, c, g, or t
  misc_feature (3423)..(3423): n is a, c, g, or t
  misc_feature (3433)..(3433): n is a, c, g, or t
  misc_feature (3435)..(3435): n is a, c, g, or t
  misc_feature (3437)..(3437): n is a, c, g, or t
  misc_feature (3440)..(3440): n is a, c, g, or t
gcaggctgtcggtccaagtccttgatggtagcgggggctgggggggagggggcggggggggccgcgccgtgctagccgttgggcctgcctcggaggaggcgtcgccgccgccgctgccgctgccggcgccgttgccgctgccgggaaacacaaggaaagggaaccagcgcagcgtggcgatgggcgggggtagagccccgccggagaggctgggcggctgccggtgacagactgtgccctgtccacggtgcctcctgcatgtcctgctgccctgagctgtcccgagctaggtgacagcgtaccacgctgccaccatgaatgaggtgtctgtcatcaaagaaggctggctccacaagcgtggtgaatacatcaagacctggaggccacggtacttcctgctgaagagcgacggctccttcattgggtacaaggagaggcccgaggcccctgatcagactctaccccccttaaacaacttctccgtagcagaatgccagctgatgaagaccgagaggccgcgacccaacacctttgtcatacgctgcctgcagtggaccacagtcatcgagaggaccttccacgtggattctccagacgagagggaggagtggatgcgggccatccagatggtcgccaacagcctcaagcagcgggccccaggcgaggaccccatggactacaagtgtggctcccccagtgactcctccacgactgaggagatggaagtggcggtcagcaaggcacgggctaaagtgaccatgaatgacttcgactatctcaaactccttggcaagggaacctttggcaaagtcatcctggtgcgggagaaggccactggccgctactacgccatgaagatcctgcggaaggaagtcatcattgccaaggatgaagtcgctcacacagtcaccgagagccgggtcctccagaacaccaggcacccgttcctcactgcgctgaagtatgccttccagacccacgaccgcctgtgctttgtgatggagtatgccaacgggggtgagctgttcttccacctgtcccgggagcgtgtcttcacagaggagcgggcccggttttatggtgcagagattgtctcggctcttgagtacttgcactcgcgggacgtggtataccgcgacatcaagctggaaaacctcatgctggacaaagatggccacatcaagatcactgactttggcctctgcaaagagggcatcagtgacggggccaccatgaaaaccttctgtgggaccccggagtacctggcgcctgaggtgctggaggacaatgactatggccgggccgtggactggtgggggctgggtgtggtcatgtacgagatgatgtgcggccgcctgcccttctacaaccaggaccacgagcgcctcttcgagctcatcctcatggaagagatccgcttcccgcgcacgctcagccccgaggccaagtccctgcttgctgggctgcttaagaaggaccccaagcagaggcttggtggggggcccagcgatgccaaggaggtcatggagcacaggttcttcctcagcatcaactggcaggacgtggtccagaagaagctcctgccacccttcaaacctcaggtcacgtccgaggtcgacacaaggtacttcgatgatgaatttaccgcccagtccatcacaatcacaccccctgaccgctatgacagcctgggcttactggagctggaccagcggacccacttcccccagttctcctactcggccagcatccgcgagtgagcagtctgcccacgcagaggacgcacgctcgctgccatcaccgctgggtggttttttccccctaactttttacttagcctttttggtttgtgtccccacccccacctcctcaccccctttccagttcttcttcaggcccctcccagacgcaccccagcggcccctgcagcccctgcctccagcctccagcctcacctttgtgcccagactcgcatttggaagactccacctcccgcccaggcctgggctgttgggcggttggagattcaggttttaatccacacaagccccagtgaggggtgaagcatggcgcctggggcctgcctgagtttctggcctgggtgtcgtgctggtgtctgcctccgcgctgctgcatctggacgaaggctgccttctggtgggacgcgacacccggcagacagtggtgctgccttccaggccccgtggcctaggctcggagtggccaggcacggggcggtccaatcccccacccgctgtccccctatgggggcagaaaagcaataatgtccaggggcaggcaggggcccttgggagctgcagggctgggggttagggctgctccctggtgaatggagtcagatcctaggatctgtaccatggggaaccaggagtggccgggctgggtgccgcctcctggtccggcctcctccccaccaaactgtcctcaccctatggatgaggcaggaggaacatttggggccaaacctgcctgcctcccagccccgtgccttactagggcttccttccagctggccttacctcccgctggaccctgggcctggcctggccccactgggggctatgggctgggctcaccctctcctctgcgggggtggagggccaccagccttggctgttacaatcttacaccggacagtattgggccccatggacttggtcagggaggggtgggggtgggcatctctggtacctattggggtggggggcctctgaaaagggaggctcctaggcccccctcacccctccctctccccagggccccacgttctgcagccttaaggttgaacatgagtgcacgtccatgtcagtgctgtgggactcctgtgcgtgcctcggactgcgtgtgtcggcgggacgcaggcacacgtgggtgtgtgtgcatgtgtgtttgtgtgagggcagcgtgtcctccagtgtgcatggtgtgtgggcttgggccccatccctggcccgagcatttcatcctgtgggggaggggtgctgacctagtgggaggagccccactgtgatccatgagctgccctgcccacgcctcccctccctgtagcaacacctctgggtgtttggagtttagcttttgtgggtttgctctccctatcccatctcctgtactacacagttcatggcagggtggggaggggtggggttggttcgggtgggtgagggtctttttcctctgtgtgcgatgttgttatctgacagttctccgtccctactggcctttctcctcgtcttcatatttgtacggtacaagcaataaagacactcatttcagacaaaaaaaaaaaaaaaaaaaaaaggggggataaaggggggggggggaaaaaggggtantggaangggcntgggtaaagtggttccgnacccattttttggtaannggnnaaattggggggccccnaaaagggggngnanaantgaaaagcggtaactgtaagatgggaaaa

SEQ ID NO: 97054 - DNA, 3497 bp, Homo sapiens
  misc_feature (3384)..(3384): n is a, c, g, or t
  misc_feature (3390)..(3390): n is a, c, g, or t
  misc_feature (3395)..(3395): n is a, c, g, or t
  misc_feature (3413)..(3413): n is a, c, g, or t
  misc_feature (3430)..(3431): n is a, c, g, or t
  misc_feature (3434)..(3435): n is a, c, g, or t
  misc_feature (3451)..(3451): n is a, c, g, or t
  misc_feature (3461)..(3461): n is a, c, g, or t
  misc_feature (3463)..(3463): n is a, c, g, or t
  misc_feature (3465)..(3465): n is a, c, g, or t
  misc_feature (3468)..(3468): n is a, c, g, or t
gcaggctgtcggtccaagtccttgatggtagcgggggctgggggggagggggcggggggggccgcgccgtgctagccgttgggcctgcctcggaggaggcgtcgccgccgccgctgccgctgccggcgccgttgccgctgccgggaaacacaaggaaagggaaccagcgcagcgtggcgatgggcgggggtagagccccgccggagaggctgggcggctgccggtgacagactgtgccctgtccacggtgcctcctgcatgtcctgctgccctgagctgtcccgagctaggtgacagcgtaccacgctgccaccatgaatgaggtgtctgtcatcaaagaaggctggctccacaagcgtggtgaatacatcaagacctggaggccacggtacttcctgctgaagagcgacggctccttcattgggtacaaggagaggcccgaggcccctgatcagactctaccccccttaaacaacttctccgtagcagaatgccagctgatgaagaccgagaggccgcgacccaacacctttgtcatacgctgcctgcagtggaccacagtcatcgagaggaccttccacgtggattctccagacgagagggaggagtggatgcgggccatccagatggtcgccaacagcctcaagcagcgggccccaggcgaggaccccatggactacaagtgtggctcccccagtgactcctccacgactgaggagatggaagtggcggtcagcaaggcacgggctaaagtgaccatgaatgacttcgactatctcaaactccttggcaagggaacctttggcaaagtcatcctggtgcgggagaaggccactggccgctactacgccatgaagatcctgcggaaggaagtcatcattgccaaggatgaagtcgctcacacagtcaccgagagccgggtcctccagaacaccaggcacccgttcctcactgcgctgaagtatgccttccagacccacgaccgcctgtgctttgtgatggagtatgccaacgggggtgagctgttcttccacctgtcccgggagcgtgtcttcacagaggagcgggcccggttttatggtgcagagattgtctcggctcttgagtacttgcactcgcgggacgtggtataccgcgacatcaagctggaaaacctcatgctggacaaagatggccacatcaagatcactgactttggcctctgcaaagagggcatcagtgacggggccaccatgaaaaccttctgtgggaccccggagtacctggcgcctgaggtgctggaggacaatgactatggccgggccgtggactggtgggggctgggtgtggtcatgtacgagatgatgtgcggccgcctgcccttctacaaccaggaccacgagcgcctcttcgagctcatcctcatggaagagatccgcttcccgcgcacgctcagccccgaggccaagtccctgcttgctgggctgcttaagaaggaccccaagcagaggcttggtggggggcccagcgatgccaaggaggtcatggagcacaggttcttcctcagcatcaactggcaggacgtggtccagaagaagctcctgccacccttcaaacctcaggtcacgtccgaggtcgacacaaggtacttcgatgatgaatttaccgcccagtccatcacaatcacaccccctgaccgctatgacagcctgggcttactggagctggaccagcggacccacttcccccagttctcctactcggccagcatccgcgagtgagcagtctgcccacgcagaggacgcacgctcgctgccatcaccgctgggtggttttttccccctaactttttacttagcctttttggtttgtgtccccacccccacctcctcaccccctttccagttcttcttcaggcccctcccagacgcaccccagcggcccctgcagcccctgcctccagcctccagcctcacctttgtgcccagactcgcatttggaagactccacctcccgcccaggcctgggctgttgggcggttggagattcaggttttaatccacacaagccccagtgaggggtgaagcatggcgcctggggcctgcctgagtttctggcctgggtgtcgtgctggtgtctgcctccgcgctgctgcatctggacgaaggctgccttctggtgggacgcgacacccggcagacagtggtgctgccttccaggccccgtggcctaggctcggagtggccaggcacggggcggtccaatcccccacccgctgtccccctatgggggcagaaaagcaataatgtccaggggcaggcaggggcccttgggagctgcagggctgggggttagggctgctccctggtgaatggagtcagatcctaggatctgtaccatggggaaccaggagtggccgggctgggtgccgcctcctggtccggcctcctccccaccaaactgtcctcaccctatggatgaggcaggaggaacatttggggccaaacctgcctgcctcccagccccgtgccttactagggcttccttccagctggccttacctcccgctggaccctgggcctggcctggccccactgggggctatgggctgggctcaccctctcctctgcgggggtggagggccaccagccttggctgttacaatcttacaccggacagtattgggccccatggacttggtcagggaggggtgggggtgggcatctctggtacctattggggtggggggcctctgaaaagggaggctcctaggcccccctcacccctccctctccccagggccccacgttctgcagccttaaggttgaacatgagtgcacgtccatgtcagtgctgtgggactcctgtgcgtgcctcggactgcgtgtgtcggcgggacgcaggcacacgtgggtgtgtgtgcatgtgtgtttgtgtgagggcagcgtgtcctccagtgtgcatggtgtgtgggcttgggccccatccctggcccgagcatttcatcctgtgggggaggggtgctgacctagtgggaggagccccactgtgatccatgagctgccctgcccacgcctcccctccctgtagcaacacctctgggtgtttggagtttagcttttgtgggtttgctctccctatcccatctcctgtactacacagttcatggcagggtggggaggggtggggttggttcgggtgggtgagggtctttttcctctgtgtgcgatgttgttatctgacagttctccgtccctactggcctttctcctcgtcttcatatttgtacggtacaagcaataaagacactcatttcagacaaaaaaaaaaaaaaaaaaaaaaaaaaaaaaaaaaaaaaaaaaaaaaaaaaggggggataaaggggggggggggaaaaaggggtantggaangggcntgggtaaagtggttccgnacccattttttggtaannggnnaaattggggggccccnaaaagggggngnanaantgaaaagcggtaactgtaagatgggaaaa

SEQ ID NO: 97055 - DNA, 4683 bp, Homo sapiens
gcaggctgtcggtccaagtccttgatggtagcgggggctgggggggagggggcggggggggccgcgccgtgctagccgttgggcctgcctcggaggaggcgtcgccgccgccgctgccgctgccggcgccgttgccgctgccgggaaacacaaggaaagggaaccagcgcagcgtggcgatgggcgggggtagagccccgccggagaggctgggcggctgccggtgacagactgtgccctgtccacggtgcctcctgcatgtcctgctgccctgagctgtcccgagctaggtgacagcgtaccacgctgccaccatgaatgaggtgtctgtcatcaaagaaggctggctccacaagcgtggtgaatacatcaagacctggaggccacggtacttcctgctgaagagcgacggctccttcattgggtacaaggagaggcccgaggcccctgatcagactctaccccccttaaacaacttctccgtagcagaatgccagctgatgaagaccgagaggccgcgacccaacacctttgtcatacgctgcctgcagtggaccacagtcatcgagaggaccttccacgtggattctccagacgagagggaggagtggatgcgggccatccagatggtcgccaacagcctcaagcagcgggccccaggcgaggaccccatggactacaagtgtggctcccccagtgactcctccacgactgaggagatggaagtggcggtcagcaaggcacgggctaaagtgaccatgaatgacttcgactatctcaaactccttggcaagggaacctttggcaaagtcatcctggtgcgggagaaggccactggccgctactacgccatgaagatcctgcggaaggaagtcatcattgccaaggatgaagtcgctcacacagtcaccgagagccgggtcctccagaacaccaggcacccgttcctcactgcgctgaagtatgccttccagacccacgaccgcctgtgctttgtgatggagtatgccaacgggggtgagctgttcttccacctgtcccgggagcgtgtcttcacagaggagcgggcccggttttatggtgcagagattgtctcggctcttgagtacttgcactcgcgggacgtggtataccgcgacatcaagctggaaaacctcatgctggacaaagatggccacatcaagatcactgactttggcctctgcaaagagggcatcagtgacggggccaccatgaaaaccttctgtgggaccccggagtacctggcgcctgagggtgtctggggttggtgggggtaggaacgtgtgaggccaagggtagggggatcccccagacctgtgtgtttccagcccagatgccctgagggcaggactgtgatgccagcctcagggccacgggcccagccctcatttctcctccatcctcaggtgctggaggacaatgactatggccgggccgtggactggtgggggctgggtgtggtcatgtacgagatgatgtgcggccgcctgcccttctacaaccaggaccacgagcgcctcttcgagctcatcctcatggaagagatccgcttcccgcgcacgctcagccccgaggccaagtccctgcttgctgggctgcttaagaaggaccccaagcagaggcttggtggggggcccagcgatgccaaggaggtcatggagcacaggttcttcctcagcatcaactggcaggacgtggtccagaagaagctcctgccacccttcaaacctcaggtcacgtccgaggtcgacacaaggtacttcgatgatgaatttaccgcccagtccatcacaatcacaccccctgaccgctatgacagcctgggcttactggagctggaccagcggacccacttcccccagttctcctactcggccagcatccgcgagtgagcagtctgcccacgcagaggacgcacgctcgctgccatcaccgctgggtggttttttccccctaactttttacttagcctttttggtttgtgtccccacccccacctcctcaccccctttccagttcttcttcaggcccctcccagacgcaccccagcggcccctgcagcccctgcctccagcctccagcctcacctttgtgcccagactcgcatttggaagactccacctcccgcccaggcctgggctgttgggcggttggagattcaggttttaatccacacaagccccagtgaggggtgaagcatggcgcctggggcctgcctgagtttctggcctgggtgtcgtgctggtgtctgcctccgcgctgctgcatctggacgaaggctgccttctggtgggacgcgacacccggcagacagtggtgctgccttccaggccccgtggcctaggctcggagtggccaggcacggggcggtccaatcccccacccgctgtccccctatgggggcagaaaagcaataatgtccaggggcaggcaggggcccttgggagctgcagggctgggggttagggctgctccctggtgaatggagtcagatcctaggatctgtaccatggggaaccaggagtggccgggctgggtgccgcctcctggtccggcctcctccccaccaaactgtcctcaccctatggatgaggcaggaggaacatttggggccaaacctgcctgcctcccagccccgtgccttactagggcttccttccagctggccttacctcccgctggaccctgggcctggcctggccccactgggggctatgggctgggctcaccctctcctctgcgggggtggagggccaccagccttggctgttacaatcttacaccggacagtattgggccccatggacttggtcagggaggggtgggggtgggcatctctggtacctattggggtggggggcctctgaaaagggaggctcctaggcccccctcacccctccctctccccagggccccacgttctgcagccttaaggttgaacatgagtgcacgtccatgtcagtgctgtgggactcctgtgcgtgcctcggactgcgtgtgtcggcgggacgcaggcacacgtgggtgtgtgtgcatgtgtgtttgtgtgagggcagcgtgtcctccagtgtgcatggtgtgtgggcttgggccccatccctggcccgagcatttcatcctgtgggggaggggtgctgacctagtgggaggagccccactgtgatccatgagctgccctgcccacgcctcccctccctgtagcaacacctctgggtgtttggagtttagcttttgtgggtttgctctccctatcccatctcctgtactacacagttcatggcagggtggggaggggtggggttggttcgggtgggtgagggtctttttcctctgtgtgcgatgttgttatctgacagttctccgtccctactggcctttctcctcgtcttcatatttgtacggtacaagcaataaagacactcatttcagaccagggcccagcctgcactcacgccagcccaaccactctgggctttgccttggtgatggagtcagacccctgggccccagctcctcctgtactagccgttcccttcagcaaggagggcactgagctcagggtgagggcagctggggtgtgtgcaggagctcaggctggagagggtgggtggagctggtgctgtggggctgaggggtatgggaaggctccccgcatgtgggggtggggtggacagagaccactccaggccctcagtgctgcttaggctaagagaggtggggtggagggacagggctggaagatctgggtagcccagaatgaggagggtgcctgtgctgtcactgaatgagagggagtggttcattccacccggctgccgagcctcagaggggggcattcctatcctgccccacctccctgtttatgctgccacctggaagccttgaggcccccaaattccagtacagacccagtggtgtgttcatggtggcgtggttgctgtcacctgggagctcctgagcgtttggttagaaccctgttcagcttggggtcagccctcccctagtcactgccctttagcctggatgtgtctgggcccctgcacttcccgtgcttgagtcacgtggctgcatggccgggcgctggccggatggaacacctcccccagcaagggaccagggaccagagccctggcctgccctgctgagccctgctgtgcagagggcctggcacagatgaatttgagattttgccgcaaggtgttagcacttcacacccattgagtctttgagattttaagtgaatgtaagcagaaaaagtcagatccaatttacagaaatcagagttagctacagctaggactcgtttggttggggttttttagtttgtctttctaaagtcatgtggaccttaatttaattacaaaagtctaccctggtggtcataaaataggcaggcctatgaagaaaggccttttactcttccatctcgtcccagccccgagttgacccacgttgctgctcctcacaccatggtgatgcaggtctcgtagtgtgggcacaggcctggctacctcatctttttagtgcctctctcctcttccacaggatggggtcccacagctgcagcagctggccccgtagttgagcatgtgtggttatcctgtagagcttttcccaagaagggtgtttgaacttagagtcttaataaaatcttaccaaata

SEQ ID NO: 97056 - DNA, 4653 bp, Homo sapiens
gcaggctgtcggtccaagtccttgatggtagcgggggctgggggggagggggcggggggggccgcgccgtgctagccgttgggcctgcctcggaggaggcgtcgccgccgccgctgccgctgccggcgccgttgccgctgccgggaaacacaaggaaagggaaccagcgcagcgtggcgatgggcgggggtagagccccgccggagaggctgggcggctgccggtgacagactgtgccctgtccacggtgcctcctgcatgtcctgctgccctgagctgtcccgagctaggtgacagcgtaccacgctgccaccatgaatgaggtgtctgtcatcaaagaaggctggctccacaagcgtggtgaatacatcaagacctggaggccacggtacttcctgctgaagagcgacggctccttcattgggtacaaggagaggcccgaggcccctgatcagactctaccccccttaaacaacttctccgtagcagaatgccagctgatgaagaccgagaggccgcgacccaacacctttgtcatacgctgcctgcagtggaccacagtcatcgagaggaccttccacgtggattctccagacgagagggaggagtggatgcgggccatccagatggtcgccaacagcctcaagcagcgggccccaggcgaggaccccatggactacaagtgtggctcccccagtgactcctccacgactgaggagatggaagtggcggtcagcaaggcacgggctaaagtgaccatgaatgacttcgactatctcaaactccttggcaagggaacctttggcaaagtcatcctggtgcgggagaaggccactggccgctactacgccatgaagatcctgcggaaggaagtcatcattgccaaggatgaagtcgctcacacagtcaccgagagccgggtcctccagaacaccaggcacccgttcctcactgcgctgaagtatgccttccagacccacgaccgcctgtgctttgtgatggagtatgccaacgggggtgagctgttcttccacctgtcccgggagcgtgtcttcacagaggagcgggcccggttttatggtgcagagattgtctcggctcttgagtacttgcactcgcgggacgtggtataccgcgacatcaagctggaaaacctcatgctggacaaagatggccacatcaagatcactgactttggcctctgcaaagagggcatcagtgacggggccaccatgaaaaccttctgtgggaccccggagtacctggcgcctgaggtgctggaggacaatgactatggccgggccgtggactggtgggggctgggtgtggtcatgtacgagatgatgtgcggccgcctgcccttctacaaccaggaccacgagcgcctcttcgagctcatcctcatggaagagatccgcttcccgcgcacgctcagccccgaggccaagtccctgcttgctgggctgcttaagaaggaccccaagcagaggcttggtggggggcccagcgatgccaaggaggtcatggagcacaggttcttcctcagcatcaactggcaggacgtggtccagaagaagctcctgccacccttcaaacctcaggtcacgtccgaggtcgacacaaggtacttcgatgatgaatttaccgcccagtccatcacaatcacaccccctgaccgctttagggagggctttctagaggaggaagcaaacgtgtcagctggccggaggaatgacgtgtgggatgccagcaatgggagaagcatggcatagctaaggaccggcagcagccagggagatggtgatgacagcctgggcttactggagctggaccagcggacccacttcccccagttctcctactcggccagcatccgcgagtgagcagtctgcccacgcagaggacgcacgctcgctgccatcaccgctgggtggttttttccccctaactttttacttagcctttttggtttgtgtccccacccccacctcctcaccccctttccagttcttcttcaggcccctcccagacgcaccccagcggcccctgcagcccctgcctccagcctccagcctcacctttgtgcccagactcgcatttggaagactccacctcccgcccaggcctgggctgttgggcggttggagattcaggttttaatccacacaagccccagtgaggggtgaagcatggcgcctggggcctgcctgagtttctggcctgggtgtcgtgctggtgtctgcctccgcgctgctgcatctggacgaaggctgccttctggtgggacgcgacacccggcagacagtggtgctgccttccaggccccgtggcctaggctcggagtggccaggcacggggcggtccaatcccccacccgctgtccccctatgggggcagaaaagcaataatgtccaggggcaggcaggggcccttgggagctgcagggctgggggttagggctgctccctggtgaatggagtcagatcctaggatctgtaccatggggaaccaggagtggccgggctgggtgccgcctcctggtccggcctcctccccaccaaactgtcctcaccctatggatgaggcaggaggaacatttggggccaaacctgcctgcctcccagccccgtgccttactagggcttccttccagctggccttacctcccgctggaccctgggcctggcctggccccactgggggctatgggctgggctcaccctctcctctgcgggggtggagggccaccagccttggctgttacaatcttacaccggacagtattgggccccatggacttggtcagggaggggtgggggtgggcatctctggtacctattggggtggggggcctctgaaaagggaggctcctaggcccccctcacccctccctctccccagggccccacgttctgcagccttaaggttgaacatgagtgcacgtccatgtcagtgctgtgggactcctgtgcgtgcctcggactgcgtgtgtcggcgggacgcaggcacacgtgggtgtgtgtgcatgtgtgtttgtgtgagggcagcgtgtcctccagtgtgcatggtgtgtgggcttgggccccatccctggcccgagcatttcatcctgtgggggaggggtgctgacctagtgggaggagccccactgtgatccatgagctgccctgcccacgcctcccctccctgtagcaacacctctgggtgtttggagtttagcttttgtgggtttgctctccctatcccatctcctgtactacacagttcatggcagggtggggaggggtggggttggttcgggtgggtgagggtctttttcctctgtgtgcgatgttgttatctgacagttctccgtccctactggcctttctcctcgtcttcatatttgtacggtacaagcaataaagacactcatttcagaccagggcccagcctgcactcacgccagcccaaccactctgggctttgccttggtgatggagtcagacccctgggccccagctcctcctgtactagccgttcccttcagcaaggagggcactgagctcagggtgagggcagctggggtgtgtgcaggagctcaggctggagagggtgggtggagctggtgctgtggggctgaggggtatgggaaggctccccgcatgtgggggtggggtggacagagaccactccaggccctcagtgctgcttaggctaagagaggtggggtggagggacagggctggaagatctgggtagcccagaatgaggagggtgcctgtgctgtcactgaatgagagggagtggttcattccacccggctgccgagcctcagaggggggcattcctatcctgccccacctccctgtttatgctgccacctggaagccttgaggcccccaaattccagtacagacccagtggtgtgttcatggtggcgtggttgctgtcacctgggagctcctgagcgtttggttagaaccctgttcagcttggggtcagccctcccctagtcactgccctttagcctggatgtgtctgggcccctgcacttcccgtgcttgagtcacgtggctgcatggccgggcgctggccggatggaacacctcccccagcaagggaccagggaccagagccctggcctgccctgctgagccctgctgtgcagagggcctggcacagatgaatttgagattttgccgcaaggtgttagcacttcacacccattgagtctttgagattttaagtgaatgtaagcagaaaaagtcagatccaatttacagaaatcagagttagctacagctaggactcgtttggttggggttttttagtttgtctttctaaagtcatgtggaccttaatttaattacaaaagtctaccctggtggtcataaaataggcaggcctatgaagaaaggccttttactcttccatctcgtcccagccccgagttgacccacgttgctgctcctcacaccatggtgatgcaggtctcgtagtgtgggcacaggcctggctacctcatctttttagtgcctctctcctcttccacaggatggggtcccacagctgcagcagctggccccgtagttgagcatgtgtggttatcctgtagagcttttcccaagaagggtgtttgaacttagagtcttaataaaatcttaccaaata

SEQ ID NO: 97057 - DNA, 4474 bp, Homo sapiens
gcaggctgtcggtccaagtccttgatggtagcgggggctgggggggagggggcggggggggccgcgccgtgctagccgttgggcctgcctcggaggaggcgtcgccgccgccgctgccgctgccggcgccgttgccgctgccgggaaacacaaggaaagggaaccagcgcagcgtggcgatgggcgggggtagagccccgccggagaggctgggcggctgccggtgacagactgtgccctgtccacggtgcctcctgcatgtcctgctgccctgagctgtcccgagctaggtgacagcgtaccacgctgccaccatgaatgaggtgtctgtcatcaaagaaggctggctccacaagcgtggtgaatacatcaagacctggaggccacggtacttcctgctgaagagcgacggctccttcattgggtacaaggagaggcccgaggcccctgatcagactctaccccccttaaacaacttctccgtagcagaatgccagctgatgaagaccgagaggccgcgacccaacacctttgtcatacgctgcctgcagtggaccacagtcatcgagaggaccttccacgtggattctccagacgagagggaggagtggatgcgggccatccagatggtcgccaacagcctcaagcagcgggccccaggcgaggaccccatggactacaagtgtggctcccccagtgactcctccacgactgaggagatggaagtggcggtcagcaaggcacgggctaaagtgaccatgaatgacttcgactatctcaaactccttggcaagggaacctttggcaaagtcatcctggtgcgggagaaggccactggccgctactacgccatgaagatcctgcggaaggaagtcatcattgccaaggatgaagtcgctcacacagtcaccgagagccgggtcctccagaacaccaggcacccgttcctcactgcgctgaagtatgccttccagacccacgaccgcctgtgctttgtgatggagtatgccaacgggggtgagctgttcttccacctgtcccgggagcgtgtcttcacagaggagcgggcccggttttatggtgcagagattgtctcggctcttgagtacttgcactcgcgggacgtggtataccgcgacatcaagctggaaaacctcatgctggacaaagatggccacatcaagatcactgactttggcctctgcaaagagggcatcagtgacggggccaccatgaaaaccttctgtgggaccccggagtacctggcgcctgaggtgctggaggacaatgactatggccgggccgtggactggtgggggctgggtgtggtcatgtacgagatgatgtgcggccgcctgcccttctacaaccaggaccacgagcgcctcttcgagctcatcctcatggaagagatccgcttcccgcgcacgctcagccccgaggccaagtccctgcttgctgggctgcttaagaaggaccccaagcagaggcttggtggggggcccagcgatgccaaggaggtcatggagcacaggttcttcctcagcatcaactggcaggacgtggtccagaagaagctcctgccacccttcaaacctcaggtcacgtccgaggtcgacacaagatgacagcctgggcttactggagctggaccagcggacccacttcccccagttctcctactcggccagcatccgcgagtgagcagtctgcccacgcagaggacgcacgctcgctgccatcaccgctgggtggttttttccccctaactttttacttagcctttttggtttgtgtccccacccccacctcctcaccccctttccagttcttcttcaggcccctcccagacgcaccccagcggcccctgcagcccctgcctccagcctccagcctcacctttgtgcccagactcgcatttggaagactccacctcccgcccaggcctgggctgttgggcggttggagattcaggttttaatccacacaagccccagtgaggggtgaagcatggcgcctggggcctgcctgagtttctggcctgggtgtcgtgctggtgtctgcctccgcgctgctgcatctggacgaaggctgccttctggtgggacgcgacacccggcagacagtggtgctgccttccaggccccgtggcctaggctcggagtggccaggcacggggcggtccaatcccccacccgctgtccccctatgggggcagaaaagcaataatgtccaggggcaggcaggggcccttgggagctgcagggctgggggttagggctgctccctggtgaatggagtcagatcctaggatctgtaccatggggaaccaggagtggccgggctgggtgccgcctcctggtccggcctcctccccaccaaactgtcctcaccctatggatgaggcaggaggaacatttggggccaaacctgcctgcctcccagccccgtgccttactagggcttccttccagctggccttacctcccgctggaccctgggcctggcctggccccactgggggctatgggctgggctcaccctctcctctgcgggggtggagggccaccagccttggctgttacaatcttacaccggacagtattgggccccatggacttggtcagggaggggtgggggtgggcatctctggtacctattggggtggggggcctctgaaaagggaggctcctaggcccccctcacccctccctctccccagggccccacgttctgcagccttaaggttgaacatgagtgcacgtccatgtcagtgctgtgggactcctgtgcgtgcctcggactgcgtgtgtcggcgggacgcaggcacacgtgggtgtgtgtgcatgtgtgtttgtgtgagggcagcgtgtcctccagtgtgcatggtgtgtgggcttgggccccatccctggcccgagcatttcatcctgtgggggaggggtgctgacctagtgggaggagccccactgtgatccatgagctgccctgcccacgcctcccctccctgtagcaacacctctgggtgtttggagtttagcttttgtgggtttgctctccctatcccatctcctgtactacacagttcatggcagggtggggaggggtggggttggttcgggtgggtgagggtctttttcctctgtgtgcgatgttgttatctgacagttctccgtccctactggcctttctcctcgtcttcatatttgtacggtacaagcaataaagacactcatttcagaccagggcccagcctgcactcacgccagcccaaccactctgggctttgccttggtgatggagtcagacccctgggccccagctcctcctgtactagccgttcccttcagcaaggagggcactgagctcagggtgagggcagctggggtgtgtgcaggagctcaggctggagagggtgggtggagctggtgctgtggggctgaggggtatgggaaggctccccgcatgtgggggtggggtggacagagaccactccaggccctcagtgctgcttaggctaagagaggtggggtggagggacagggctggaagatctgggtagcccagaatgaggagggtgcctgtgctgtcactgaatgagagggagtggttcattccacccggctgccgagcctcagaggggggcattcctatcctgccccacctccctgtttatgctgccacctggaagccttgaggcccccaaattccagtacagacccagtggtgtgttcatggtggcgtggttgctgtcacctgggagctcctgagcgtttggttagaaccctgttcagcttggggtcagccctcccctagtcactgccctttagcctggatgtgtctgggcccctgcacttcccgtgcttgagtcacgtggctgcatggccgggcgctggccggatggaacacctcccccagcaagggaccagggaccagagccctggcctgccctgctgagccctgctgtgcagagggcctggcacagatgaatttgagattttgccgcaaggtgttagcacttcacacccattgagtctttgagattttaagtgaatgtaagcagaaaaagtcagatccaatttacagaaatcagagttagctacagctaggactcgtttggttggggttttttagtttgtctttctaaagtcatgtggaccttaatttaattacaaaagtctaccctggtggtcataaaataggcaggcctatgaagaaaggccttttactcttccatctcgtcccagccccgagttgacccacgttgctgctcctcacaccatggtgatgcaggtctcgtagtgtgggcacaggcctggctacctcatctttttagtgcctctctcctcttccacaggatggggtcccacagctgcagcagctggccccgtagttgagcatgtgtggttatcctgtagagcttttcccaagaagggtgtttgaacttagagtcttaataaaatcttaccaaata

SEQ ID NO: 97058 - DNA, 5440 bp, Homo sapiens
gcaggctgtcggtccaagtccttgatggtagcgggggctgggggggagggggcggggggggccgcgccgtgctagccgttgggcctgcctcggaggaggcgtcgccgccgccgctgccgctgccggcgccgttgccgctgccgggaaacacaaggaaagggaaccagcgcagcgtggcgatgggcgggggtagagccccgccggagaggctgggcggctgccggtgacagactgtgccctgtccacggtgcctcctgcatgtcctgctgccctgagctgtcccgagctaggtgacagcgtaccacgctgccaccatgaatgaggtgtctgtcatcaaagaaggctggctccacaagcgtggtgaatacatcaagacctggaggccacggtacttcctgctgaagagcgacggctccttcattgggtacaaggagaggcccgaggcccctgatcagactctaccccccttaaacaacttctccgtagcagaatgccagctgatgaagaccgagaggccgcgacccaacacctttgtcatacgctgcctgcagtggaccacagtcatcgagaggaccttccacgtggattctccagacgagagggaggagtggatgcgggccatccagatggtcgccaacagcctcaagcagcgggccccaggcgaggaccccatggactacaagtgtggctcccccagtgactcctccacgactgaggagatggaagtggcggtcagcaaggcacgggctaaagtgaccatgaatgacttcgactatctcaaactccttggcaagggaacctttggcaaagtcatcctggtgcgggagaaggccactggccgctactacgccatgaagatcctgcggaaggaagtcatcattgccaaggatgaagtcgctcacacagtcaccgagagccgggtcctccagaacaccaggcacccgttcctcactgcgctgaagtatgccttccagacccacgaccgcctgtgctttgtgatggagtatgccaacgggggtgagctgttcttccacctgtcccgggagcgtgtcttcacagaggagcgggcccggttttatggtgcagagattgtctcggctcttgagtacttgcactcgcgggacgtggtataccgcgacatcaagaggttagtggcagggtgtgcgccaggctgacctgtggcatgcacaccacatgggactcacactggggaagttgggctgagcttctgccctcattcgccaggctccccaccaaggtccagggtggtggctgccctcattcgccaggctccccaccaaggtccagggtggtggctgccctcattcaccaggctccccaccaaggtccagggtggtggctctgtggcaagttgccccaagtagggaccttcccaagcctcccatgagcgctcctaggccactagcggagtgtcaactgccacaatacctactttatttgtatttatttatttatttatttttgaggagtcttactctattgagtgcagtggtgtgatctcggctcgctgcaacctctgcctcccgggttcaagcgattgtcctgcctcagcctcccgaataggtgggattacaggtgcccgccaccatgcccagctaatttttgtatttttagtagagacggggtttcatcatattggccaggctggtctcaaactcctgaccttgtgatccacccacctcagcctcccaaagtgcttggattacaggcatgagcccccgcgcccggccaagtttagaagatagtttggcagtgtccaccaaagctgagcaccagccatctgccctagctgtgtgcacaggagaagtggggacacacactcaccttagaaagtgtccccctcactcagcagcaggacttactctagccccaactggaacaacccaagtatccactgtgagaggaacagtcagatccactgtggagtgttctcacagtgggacgccacacagcagttaggaatgagctacagctacacacgacagtgtggacgcgtctcataggctaatgtcgagggaaagccgcacagaggagctggaaaacctcatgctggacaaagatggccacatcaagatcactgactttggcctctgcaaagagggcatcagtgacggggccaccatgaaaaccttctgtgggaccccggagtacctggcgcctgaggtgctggaggacaatgactatggccgggccgtggactggtgggggctgggtgtggtcatgtacgagatgatgtgcggccgcctgcccttctacaaccaggaccacgagcgcctcttcgagctcatcctcatggaagagatccgcttcccgcgcacgctcagccccgaggccaagtccctgcttgctgggctgcttaagaaggaccccaagcagaggcttggtggggggcccagcgatgccaaggaggtcatggagcacaggttcttcctcagcatcaactggcaggacgtggtccagaagaagctcctgccacccttcaaacctcaggtcacgtccgaggtcgacacaaggtacttcgatgatgaatttaccgcccagtccatcacaatcacaccccctgaccgctatgacagcctgggcttactggagctggaccagcggacccacttcccccagttctcctactcggccagcatccgcgagtgagcagtctgcccacgcagaggacgcacgctcgctgccatcaccgctgggtggttttttccccctaactttttacttagcctttttggtttgtgtccccacccccacctcctcaccccctttccagttcttcttcaggcccctcccagacgcaccccagcggcccctgcagcccctgcctccagcctccagcctcacctttgtgcccagactcgcatttggaagactccacctcccgcccaggcctgggctgttgggcggttggagattcaggttttaatccacacaagccccagtgaggggtgaagcatggcgcctggggcctgcctgagtttctggcctgggtgtcgtgctggtgtctgcctccgcgctgctgcatctggacgaaggctgccttctggtgggacgcgacacccggcagacagtggtgctgccttccaggccccgtggcctaggctcggagtggccaggcacggggcggtccaatcccccacccgctgtccccctatgggggcagaaaagcaataatgtccaggggcaggcaggggcccttgggagctgcagggctgggggttagggctgctccctggtgaatggagtcagatcctaggatctgtaccatggggaaccaggagtggccgggctgggtgccgcctcctggtccggcctcctccccaccaaactgtcctcaccctatggatgaggcaggaggaacatttggggccaaacctgcctgcctcccagccccgtgccttactagggcttccttccagctggccttacctcccgctggaccctgggcctggcctggccccactgggggctatgggctgggctcaccctctcctctgcgggggtggagggccaccagccttggctgttacaatcttacaccggacagtattgggccccatggacttggtcagggaggggtgggggtgggcatctctggtacctattggggtggggggcctctgaaaagggaggctcctaggcccccctcacccctccctctccccagggccccacgttctgcagccttaaggttgaacatgagtgcacgtccatgtcagtgctgtgggactcctgtgcgtgcctcggactgcgtgtgtcggcgggacgcaggcacacgtgggtgtgtgtgcatgtgtgtttgtgtgagggcagcgtgtcctccagtgtgcatggtgtgtgggcttgggccccatccctggcccgagcatttcatcctgtgggggaggggtgctgacctagtgggaggagccccactgtgatccatgagctgccctgcccacgcctcccctccctgtagcaacacctctgggtgtttggagtttagcttttgtgggtttgctctccctatcccatctcctgtactacacagttcatggcagggtggggaggggtggggttggttcgggtgggtgagggtctttttcctctgtgtgcgatgttgttatctgacagttctccgtccctactggcctttctcctcgtcttcatatttgtacggtacaagcaataaagacactcatttcagaccagggcccagcctgcactcacgccagcccaaccactctgggctttgccttggtgatggagtcagacccctgggccccagctcctcctgtactagccgttcccttcagcaaggagggcactgagctcagggtgagggcagctggggtgtgtgcaggagctcaggctggagagggtgggtggagctggtgctgtggggctgaggggtatgggaaggctccccgcatgtgggggtggggtggacagagaccactccaggccctcagtgctgcttaggctaagagaggtggggtggagggacagggctggaagatctgggtagcccagaatgaggagggtgcctgtgctgtcactgaatgagagggagtggttcattccacccggctgccgagcctcagaggggggcattcctatcctgccccacctccctgtttatgctgccacctggaagccttgaggcccccaaattccagtacagacccagtggtgtgttcatggtggcgtggttgctgtcacctgggagctcctgagcgtttggttagaaccctgttcagcttggggtcagccctcccctagtcactgccctttagcctggatgtgtctgggcccctgcacttcccgtgcttgagtcacgtggctgcatggccgggcgctggccggatggaacacctcccccagcaagggaccagggaccagagccctggcctgccctgctgagccctgctgtgcagagggcctggcacagatgaatttgagattttgccgcaaggtgttagcacttcacacccattgagtctttgagattttaagtgaatgtaagcagaaaaagtcagatccaatttacagaaatcagagttagctacagctaggactcgtttggttggggttttttagtttgtctttctaaagtcatgtggaccttaatttaattacaaaagtctaccctggtggtcataaaataggcaggcctatgaagaaaggccttttactcttccatctcgtcccagccccgagttgacccacgttgctgctcctcacaccatggtgatgcaggtctcgtagtgtgggcacaggcctggctacctcatctttttagtgcctctctcctcttccacaggatggggtcccacagctgcagcagctggccccgtagttgagcatgtgtggttatcctgtagagcttttcccaagaagggtgtttgaacttagagtcttaataaaatcttaccaaata

SEQ ID NO: 97059 - DNA, 3485 bp, Homo sapiens
gcaggctgtcggtccaagtccttgatggtagcgggggctgggggggagggggcggggggggccgcgccgtgctagccgttgggcctgcctcggaggaggcgtcgccgccgccgctgccgctgccggcgccgttgccgctgccgggaaacacaaggaaagggaaccagcgcagcgtggcgatgggcgggggtagagccccgccggagaggctgggcggctgccggtgacagactgtgccctgtccacggtgcctcctgcatgtcctgctgccctgagctgtcccgagctaggtgacagcgtaccacgctgccaccatgaatgaggtgtctgtcatcaaagaaggctggctccacaagcgtggtgaatacatcaagacctggaggccacggtacttcctgctgaagagcgacggctccttcattgggtacaaggagaggcccgaggcccctgatcagactctaccccccttaaacaacttctccgtagcagaatgccagctgatgaagaccgagaggccgcgacccaacacctttgtcatacgctgcctgcagtggaccacagtcatcgagaggaccttccacgtggattctccagacgagagggaggagtggatgcgggccatccagatggtcgccaacagcctcaagcagcgggccccaggcgaggaccccatggactacaagtgtggctcccccagtgactcctccacgactgaggagatggaagtggcggtcagcaaggcacgggctaaagtgaccatgaatgacttcgactatctcaaactccttggcaagggaacctttggcaaagtcatcctggtgcgggagaaggccactggccgctactacgccatgaagatcctgcggaaggaagtcatcattgccaaggatgaagtcgctcacacagtcaccgagagccgggtcctccagaacaccaggcacccgttcctcactgcgctgaagtatgccttccagacccacgaccgcctgtgctttgtgatggagtatgccaacgggggtgagctgttcttccacctgtcccgggagcgtgtcttcacagaggagcgggcccggttttatggtgcagagattgtctcggctcttgagtacttgcactcgcgggacgtggtataccgcgacatcaagctggaaaacctcatgctggacaaagatggccacatcaagatcactgactttggcctctgcaaagagggcatcagtgacggggccaccatgaaaaccttctgtgggaccccggagtacctggcgcctgaggtgctggaggacaatgactatggccgggccgtggactggtgggggctgggtgtggtcatgtacgagatgatgtgcggccgcctgcccttctacaaccaggaccacgagcgcctcttcgagctcatcctcatggaagagatccgcttcccgcgcacgctcagccccgaggccaagtccctgcttgctgggctgcttaagaaggaccccaagcagaggcttggtggggggcccagcgatgccaaggaggtcatggagcacaggttcttcctcagcatcaactggcaggacgtggtccagaagaagctcctgccacccttcaaacctcaggtcacgtccgaggtcgacacaaggtacttcgatgatgaatttaccgcccagtccatcacaatcacaccccctgaccgctatgacagcctgggcttactggagctggaccagcggacccacttcccccagttctcctccacgttctgcagccttaaggttgaacatgagtgcacgtccatgtcagtgctgtgggactcctgtgcgtgcctcggactgcgtgtgtcggcgggacgcaggcacacgtgggtgtgtgtgcatgtgtgtttgtgtgagggcagcgtgtcctccagtgtgcatggtgtgtgggcttgggccccatccctggcccgagcatttcatcctgtgggggaggggtgctgacctagtgggaggagccccactgtgatccatgagctgccctgcccacgcctcccctccctgtagcaacacctctgggtgtttggagtttagcttttgtgggtttgctctccctatcccatctcctgtactacacagttcatggcagggtggggaggggtggggttggttcgggtgggtgagggtctttttcctctgtgtgcgatgttgttatctgacagttctccgtccctactggcctttctcctcgtcttcatatttgtacggtacaagcaataaagacactcatttcagaccagggcccagcctgcactcacgccagcccaaccactctgggctttgccttggtgatggagtcagacccctgggccccagctcctcctgtactagccgttcccttcagcaaggagggcactgagctcagggtgagggcagctggggtgtgtgcaggagctcaggctggagagggtgggtggagctggtgctgtggggctgaggggtatgggaaggctccccgcatgtgggggtggggtggacagagaccactccaggccctcagtgctgcttaggctaagagaggtggggtggagggacagggctggaagatctgggtagcccagaatgaggagggtgcctgtgctgtcactgaatgagagggagtggttcattccacccggctgccgagcctcagaggggggcattcctatcctgccccacctccctgtttatgctgccacctggaagccttgaggcccccaaattccagtacagacccagtggtgtgttcatggtggcgtggttgctgtcacctgggagctcctgagcgtttggttagaaccctgttcagcttggggtcagccctcccctagtcactgccctttagcctggatgtgtctgggcccctgcacttcccgtgcttgagtcacgtggctgcatggccgggcgctggccggatggaacacctcccccagcaagggaccagggaccagagccctggcctgccctgctgagccctgctgtgcagagggcctggcacagatgaatttgagattttgccgcaaggtgttagcacttcacacccattgagtctttgagattttaagtgaatgtaagcagaaaaagtcagatccaatttacagaaatcagagttagctacagctaggactcgtttggttggggttttttagtttgtctttctaaagtcatgtggaccttaatttaattacaaaagtctaccctggtggtcataaaataggcaggcctatgaagaaaggccttttactcttccatctcgtcccagccccgagttgacccacgttgctgctcctcacaccatggtgatgcaggtctcgtagtgtgggcacaggcctggctacctcatctttttagtgcctctctcctcttccacaggatggggtcccacagctgcagcagctggccccgtagttgagcatgtgtggttatcctgtagagcttttcccaagaagggtgtttgaacttagagtcttaataaaatcttaccaaata

SEQ ID NO: 97060 - DNA, 3586 bp, Homo sapiens
cagctggcccttacctcccgctggacctctgggcctggcctgtgcccactgggggctatgggctgggctcaccctctcctctgcgggggtggagggccaccagccttggctgttacaatcttacaccggttttatggtgcagagattgtctcggctcttgagtacttgcactcgcgggacgtggtataccgcgacatcaagctggaaaacctcatgctggacaaagatggccacatcaagatcactgactttggcctctgcaaagagggcatcagtgacggggccaccatgaaaaccttctgtgggaccccggagtacctggcgcctgaggtgctggaggacaatgactatggccgggccgtggactggtgggggctgggtgtggtcatgtacgagatgatgtgcggccgcctgcccttctacaaccaggaccacgagcgcctcttcgagctcatcctcatggaagagatccgcttcccgcgcacgctcagccccgaggccaagtccctgcttgctgggctgcttaagaaggaccccaagcagaggcttggtggggggcccagcgatgccaaggaggtcatggagcacaggttcttcctcagcatcaactggcaggacgtggtccagaagaagctcctgccacccttcaaacctcaggtcacgtccgaggtcgacacaaggtacttcgatgatgaatttaccgcccagtccatcacaatcacaccccctgaccgctatgacagcctgggcttactggagctggaccagcggacccacttcccccagttctcctactcggccagcatccgcgagtgagcagtctgcccacgcagaggacgcacgctcgctgccatcaccgctgggtggttttttccccctaactttttacttagcctttttggtttgtgtccccacccccacctcctcaccccctttccagttcttcttcaggcccctcccagacgcaccccagcggcccctgcagcccctgcctccagcctccagcctcacctttgtgcccagactcgcatttggaagactccacctcccgcccaggcctgggctgttgggcggttggagattcaggttttaatccacacaagccccagtgaggggtgaagcatggcgcctggggcctgcctgagtttctggcctgggtgtcgtgctggtgtctgcctccgcgctgctgcatctggacgaaggctgccttctggtgggacgcgacacccggcagacagtggtgctgccttccaggccccgtggcctaggctcggagtggccaggcacggggcggtccaatcccccacccgctgtccccctatgggggcagaaaagcaataatgtccaggggcaggcaggggcccttgggagctgcagggctgggggttagggctgctccctggtgaatggagtcagatcctaggatctgtaccatggggaaccaggagtggccgggctgggtgccgcctcctggtccggcctcctccccaccaaactgtcctcaccctatggatgaggcaggaggaacatttggggccaaacctgcctgcctcccagccccgtgccttactagggcttccttccagctggccttacctcccgctggaccctgggcctggcctggccccactgggggctatgggctgggctcaccctctcctctgcgggggtggagggccaccagccttggctgttacaatcttacaccggacagtattgggccccatggacttggtcagggaggggtgggggtgggcatctctggtacctattggggtggggggcctctgaaaagggaggctcctaggcccccctcacccctccctctccccagggccccacgttctgcagccttaaggttgaacatgagtgcacgtccatgtcagtgctgtgggactcctgtgcgtgcctcggactgcgtgtgtcggcgggacgcaggcacacgtgggtgtgtgtgcatgtgtgtttgtgtgagggcagcgtgtcctccagtgtgcatggtgtgtgggcttgggccccatccctggcccgagcatttcatcctgtgggggaggggtgctgacctagtgggaggagccccactgtgatccatgagctgccctgcccacgcctcccctccctgtagcaacacctctgggtgtttggagtttagcttttgtgggtttgctctccctatcccatctcctgtactacacagttcatggcagggtggggaggggtggggttggttcgggtgggtgagggtctttttcctctgtgtgcgatgttgttatctgacagttctccgtccctactggcctttctcctcgtcttcatatttgtacggtacaagcaataaagacactcatttcagaccagggcccagcctgcactcacgccagcccaaccactctgggctttgccttggtgatggagtcagacccctgggccccagctcctcctgtactagccgttcccttcagcaaggagggcactgagctcagggtgagggcagctggggtgtgtgcaggagctcaggctggagagggtgggtggagctggtgctgtggggctgaggggtatgggaaggctccccgcatgtgggggtggggtggacagagaccactccaggccctcagtgctgcttaggctaagagaggtggggtggagggacagggctggaagatctgggtagcccagaatgaggagggtgcctgtgctgtcactgaatgagagggagtggttcattccacccggctgccgagcctcagaggggggcattcctatcctgccccacctccctgtttatgctgccacctggaagccttgaggcccccaaattccagtacagacccagtggtgtgttcatggtggcgtggttgctgtcacctgggagctcctgagcgtttggttagaaccctgttcagcttggggtcagccctcccctagtcactgccctttagcctggatgtgtctgggcccctgcacttcccgtgcttgagtcacgtggctgcatggccgggcgctggccggatggaacacctcccccagcaagggaccagggaccagagccctggcctgccctgctgagccctgctgtgcagagggcctggcacagatgaatttgagattttgccgcaaggtgttagcacttcacacccattgagtctttgagattttaagtgaatgtaagcagaaaaagtcagatccaatttacagaaatcagagttagctacagctaggactcgtttggttggggttttttagtttgtctttctaaagtcatgtggaccttaatttaattacaaaagtctaccctggtggtcataaaataggcaggcctatgaagaaaggccttttactcttccatctcgtcccagccccgagttgacccacgttgctgctcctcacaccatggtgatgcaggtctcgtagtgtgggcacaggcctggctacctcatctttttagtgcctctctcctcttccacaggatggggtcccacagctgcagcagctggccccgtagttgagcatgtgtggttatcctgtagagcttttcccaagaagggtgtttgaacttagagtcttaataaaatcttaccaaata

SEQ ID NO: 97061 - DNA, 3293 bp, Homo sapiens
gcaggctgtcggtccaagtccttgatggtagcgggggctgggggggagggggcggggggggccgcgccgtgctagccgttgggcctgcctcggaggaggcgtcgccgccgccgctgccgctgccggcgccgttgccgctgccgggaaacacaaggaaagggaaccagcgcagcgtggcgatgggcgggggtagagccccgccggagaggctgggcggctgccggtgacagactgtgccctgtccacggtgcctcctgcatgtcctgctgccctgagctgtcccgagctaggtgacagcgtaccacgctgccaccatgaatgaggtgtctgtcatcaaagaaggctggctccacaagcgtggtgaatacatcaagacctggaggccacggtacttcctgctgaagagcgacggctccttcattgggtacaaggagaggcccgaggcccctgatcagactctaccccccttaaacaacttctccgtagcagaatgccagctgatgaagaccgagaggccgcgacccaacacctttgtcatacgctgcctgcagtggaccacagtcatcgagaggaccttccacgtggattctccagacgagagggaggagtggatgcgggccatccagatggtcgccaacagcctcaagcagcgggccccaggcgaggaccccatggactacaagtgtggctcccccagtgactcctccacgactgaggagatggaagtggcggtcagcaaggcacgggctaaagtgaccatgaatgacttcgactatctcaaactccttggcaagggaacctttggcaaagtcatcctggtgcgggagaaggccactggccgctactacgccatgaagatcctgcggaaggaagtcatcattgccaaggatgaagtcgctcacacagtcaccgagagccgggtcctccagaacaccaggcacccgttcctcactgcgctgaagtatgccttccagacccacgaccgcctgtgctttgtgatggagtatgccaacgggggtgagctgttcttccacctgtcccgggagcgtgtcttcacagaggagcgggcccggttttatggtgcagagattgtctcggctcttgagtacttgcactcgcgggacgtggtataccgcgacatcaagctggaaaacctcatgctggacaaagatggccacatcaagatcactgactttggcctctgcaaagagggcatcagtgacggggccaccatgaaaaccttctgtgggaccccggagtacctggcgcctgaggtgctggaggacaatgactatggccgggccgtggactggtgggggctgggtgtggtcatgtacgagatgatgtgcggccgcctgcccttctacaaccaggaccacgagcgcctcttcgagctcatcctcatggaagagatccgcttcccgcgcacgctcagccccgaggccaagtccctgcttgctgggctgcttaagaaggaccccaagcagaggcttggtggggggcccagcgatgccaaggaggtcatggagcacaggttcttcctcaccacgttctgcagccttaaggttgaacatgagtgcacgtccatgtcagtgctgtgggactcctgtgcgtgcctcggactgcgtgtgtcggcgggacgcaggcacacgtgggtgtgtgtgcatgtgtgtttgtgtgagggcagcgtgtcctccagtgtgcatggtgtgtgggcttgggccccatccctggcccgagcatttcatcctgtgggggaggggtgctgacctagtgggaggagccccactgtgatccatgagctgccctgcccacgcctcccctccctgtagcaacacctctgggtgtttggagtttagcttttgtgggtttgctctccctatcccatctcctgtactacacagttcatggcagggtggggaggggtggggttggttcgggtgggtgagggtctttttcctctgtgtgcgatgttgttatctgacagttctccgtccctactggcctttctcctcgtcttcatatttgtacggtacaagcaataaagacactcatttcagaccagggcccagcctgcactcacgccagcccaaccactctgggctttgccttggtgatggagtcagacccctgggccccagctcctcctgtactagccgttcccttcagcaaggagggcactgagctcagggtgagggcagctggggtgtgtgcaggagctcaggctggagagggtgggtggagctggtgctgtggggctgaggggtatgggaaggctccccgcatgtgggggtggggtggacagagaccactccaggccctcagtgctgcttaggctaagagaggtggggtggagggacagggctggaagatctgggtagcccagaatgaggagggtgcctgtgctgtcactgaatgagagggagtggttcattccacccggctgccgagcctcagaggggggcattcctatcctgccccacctccctgtttatgctgccacctggaagccttgaggcccccaaattccagtacagacccagtggtgtgttcatggtggcgtggttgctgtcacctgggagctcctgagcgtttggttagaaccctgttcagcttggggtcagccctcccctagtcactgccctttagcctggatgtgtctgggcccctgcacttcccgtgcttgagtcacgtggctgcatggccgggcgctggccggatggaacacctcccccagcaagggaccagggaccagagccctggcctgccctgctgagccctgctgtgcagagggcctggcacagatgaatttgagattttgccgcaaggtgttagcacttcacacccattgagtctttgagattttaagtgaatgtaagcagaaaaagtcagatccaatttacagaaatcagagttagctacagctaggactcgtttggttggggttttttagtttgtctttctaaagtcatgtggaccttaatttaattacaaaagtctaccctggtggtcataaaataggcaggcctatgaagaaaggccttttactcttccatctcgtcccagccccgagttgacccacgttgctgctcctcacaccatggtgatgcaggtctcgtagtgtgggcacaggcctggctacctcatctttttagtgcctctctcctcttccacaggatggggtcccacagctgcagcagctggccccgtagttgagcatgtgtggttatcctgtagagcttttcccaagaagggtgtttgaacttagagtcttaataaaatcttaccaaata

SEQ ID NO: 97062 - DNA, 2993 bp, Homo sapiens
ccggtcgctcggacactgggtagacgtggtcgagaagaagctcctgccacccttcaaacctcaggtcacgtccgaggtcgacacaaggtacttcgatgatgaatttaccgcccagtccatcacaatcacaccccctgaccgctatgacagcctgggcttactggagctggaccagcggacccacttcccccagttctcctactcggccagcatccgcgagtgagcagtctgcccacgcagaggacgcacgctcgctgccatcaccgctgggtggttttttccccctaactttttacttagcctttttggtttgtgtccccacccccacctcctcaccccctttccagttcttcttcaggcccctcccagacgcaccccagcggcccctgcagcccctgcctccagcctccagcctcacctttgtgcccagactcgcatttggaagactccacctcccgcccaggcctgggctgttgggcggttggagattcaggttttaatccacacaagccccagtgaggggtgaagcatggcgcctggggcctgcctgagtttctggcctgggtgtcgtgctggtgtctgcctccgcgctgctgcatctggacgaaggctgccttctggtgggacgcgacacccggcagacagtggtgctgccttccaggccccgtggcctaggctcggagtggccaggcacggggcggtccaatcccccacccgctgtccccctatgggggcagaaaagcaataatgtccaggggcaggcaggggcccttgggagctgcagggctgggggttagggctgctccctggtgaatggagtcagatcctaggatctgtaccatggggaaccaggagtggccgggctgggtgccgcctcctggtccggcctcctccccaccaaactgtcctcaccctatggatgaggcaggaggaacatttggggccaaacctgcctgcctcccagccccgtgccttactagggcttccttccagctggccttacctcccgctggaccctgggcctggcctggccccactgggggctatgggctgggctcaccctctcctctgcgggggtggagggccaccagccttggctgttacaatcttacaccggacagtattgggccccatggacttggtcagggaggggtgggggtgggcatctctggtacctattggggtggggggcctctgaaaagggaggctcctaggcccccctcacccctccctctccccagggccccacgttctgcagccttaaggttgaacatgagtgcacgtccatgtcagtgctgtgggactcctgtgcgtgcctcggactgcgtgtgtcggcgggacgcaggcacacgtgggtgtgtgtgcatgtgtgtttgtgtgagggcagcgtgtcctccagtgtgcatggtgtgtgggcttgggccccatccctggcccgagcatttcatcctgtgggggaggggtgctgacctagtgggaggagccccactgtgatccatgagctgccctgcccacgcctcccctccctgtagcaacacctctgggtgtttggagtttagcttttgtgggtttgctctccctatcccatctcctgtactacacagttcatggcagggtggggaggggtggggttggttcgggtgggtgagggtctttttcctctgtgtgcgatgttgttatctgacagttctccgtccctactggcctttctcctcgtcttcatatttgtacggtacaagcaataaagacactcatttcagaccagggcccagcctgcactcacgccagcccaaccactctgggctttgccttggtgatggagtcagacccctgggccccagctcctcctgtactagccgttcccttcagcaaggagggcactgagctcagggtgagggcagctggggtgtgtgcaggagctcaggctggagagggtgggtggagctggtgctgtggggctgaggggtatgggaaggctccccgcatgtgggggtggggtggacagagaccactccaggccctcagtgctgcttaggctaagagaggtggggtggagggacagggctggaagatctgggtagcccagaatgaggagggtgcctgtgctgtcactgaatgagagggagtggttcattccacccggctgccgagcctcagaggggggcattcctatcctgccccacctccctgtttatgctgccacctggaagccttgaggcccccaaattccagtacagacccagtggtgtgttcatggtggcgtggttgctgtcacctgggagctcctgagcgtttggttagaaccctgttcagcttggggtcagccctcccctagtcactgccctttagcctggatgtgtctgggcccctgcacttcccgtgcttgagtcacgtggctgcatggccgggcgctggccggatggaacacctcccccagcaagggaccagggaccagagccctggcctgccctgctgagccctgctgtgcagagggcctggcacagatgaatttgagattttgccgcaaggtgttagcacttcacacccattgagtctttgagattttaagtgaatgtaagcagaaaaagtcagatccaatttacagaaatcagagttagctacagctaggactcgtttggttggggttttttagtttgtctttctaaagtcatgtggaccttaatttaattacaaaagtctaccctggtggtcataaaataggcaggcctatgaagaaaggccttttactcttccatctcgtcccagccccgagttgacccacgttgctgctcctcacaccatggtgatgcaggtctcgtagtgtgggcacaggcctggctacctcatctttttagtgcctctctcctcttccacaggatggggtcccacagctgcagcagctggccccgtagttgagcatgtgtggttatcctgtagagcttttcccaagaagggtgtttgaacttagagtcttaataaaatcttaccaaata

SEQ ID NO: 97063 - DNA, 3228 bp, Homo sapiens
gcaggctgtcggtccaagtccttgatggtagcgggggctgggggggagggggcggggggggccgcgccgtgctagccgttgggcctgcctcggaggaggcgtcgccgccgccgctgccgctgccggcgccgttgccgctgccgggaaacacaaggaaagggaaccagcgcagcgtggcgatgggcgggggtagagccccgccggagaggctgggcggctgccggtgacagactgtgccctgtccacggtgcctcctgcatgtcctgctgccctgagctgtcccgagctaggtgacagcgtaccacgctgccaccatgaatgaggtgtctgtcatcaaagaaggctggctccacaagcgtggtgaatacatcaagacctggaggccacggtacttcctgctgaagagcgacggctccttcattgggtacaaggagaggcccgaggcccctgatcagactctaccccccttaaacaacttctccgtagcagaatgccagctgatgaagaccgagaggccgcgacccaacacctttgtcatacgctgcctgcagtggaccacagtcatcgagaggaccttccacgtggattctccagacgagagggaggagtggatgcgggccatccagatggtcgccaacagcctccagcctcacctttgtgcccagactcgcatttggaagactccacctcccgcccaggcctgggctgttgggcggttggagattcaggttttaatccacacaagccccagtgaggggtgaagcatggcgcctggggcctgcctgagtttctggcctgggtgtcgtgctggtgtctgcctccgcgctgctgcatctggacgaaggctgccttctggtgggacgcgacacccggcagacagtggtgctgccttccaggccccgtggcctaggctcggagtggccaggcacggggcggtccaatcccccacccgctgtccccctatgggggcagaaaagcaataatgtccaggggcaggcaggggcccttgggagctgcagggctgggggttagggctgctccctggtgaatggagtcagatcctaggatctgtaccatggggaaccaggagtggccgggctgggtgccgcctcctggtccggcctcctccccaccaaactgtcctcaccctatggatgaggcaggaggaacatttggggccaaacctgcctgcctcccagccccgtgccttactagggcttccttccagctggccttacctcccgctggaccctgggcctggcctggccccactgggggctatgggctgggctcaccctctcctctgcgggggtggagggccaccagccttggctgttacaatcttacaccggacagtattgggccccatggacttggtcagggaggggtgggggtgggcatctctggtacctattggggtggggggcctctgaaaagggaggctcctaggcccccctcacccctccctctccccagggccccacgttctgcagccttaaggttgaacatgagtgcacgtccatgtcagtgctgtgggactcctgtgcgtgcctcggactgcgtgtgtcggcgggacgcaggcacacgtgggtgtgtgtgcatgtgtgtttgtgtgagggcagcgtgtcctccagtgtgcatggtgtgtgggcttgggccccatccctggcccgagcatttcatcctgtgggggaggggtgctgacctagtgggaggagccccactgtgatccatgagctgccctgcccacgcctcccctccctgtagcaacacctctgggtgtttggagtttagcttttgtgggtttgctctccctatcccatctcctgtactacacagttcatggcagggtggggaggggtggggttggttcgggtgggtgagggtctttttcctctgtgtgcgatgttgttatctgacagttctccgtccctactggcctttctcctcgtcttcatatttgtacggtacaagcaataaagacactcatttcagaccagggcccagcctgcactcacgccagcccaaccactctgggctttgccttggtgatggagtcagacccctgggccccagctcctcctgtactagccgttcccttcagcaaggagggcactgagctcagggtgagggcagctggggtgtgtgcaggagctcaggctggagagggtgggtggagctggtgctgtggggctgaggggtatgggaaggctccccgcatgtgggggtggggtggacagagaccactccaggccctcagtgctgcttaggctaagagaggtggggtggagggacagggctggaagatctgggtagcccagaatgaggagggtgcctgtgctgtcactgaatgagagggagtggttcattccacccggctgccgagcctcagaggggggcattcctatcctgccccacctccctgtttatgctgccacctggaagccttgaggcccccaaattccagtacagacccagtggtgtgttcatggtggcgtggttgctgtcacctgggagctcctgagcgtttggttagaaccctgttcagcttggggtcagccctcccctagtcactgccctttagcctggatgtgtctgggcccctgcacttcccgtgcttgagtcacgtggctgcatggccgggcgctggccggatggaacacctcccccagcaagggaccagggaccagagccctggcctgccctgctgagccctgctgtgcagagggcctggcacagatgaatttgagattttgccgcaaggtgttagcacttcacacccattgagtctttgagattttaagtgaatgtaagcagaaaaagtcagatccaatttacagaaatcagagttagctacagctaggactcgtttggttggggttttttagtttgtctttctaaagtcatgtggaccttaatttaattacaaaagtctaccctggtggtcataaaataggcaggcctatgaagaaaggccttttactcttccatctcgtcccagccccgagttgacccacgttgctgctcctcacaccatggtgatgcaggtctcgtagtgtgggcacaggcctggctacctcatctttttagtgcctctctcctcttccacaggatggggtcccacagctgcagcagctggccccgtagttgagcatgtgtggttatcctgtagagcttttcccaagaagggtgtttgaacttagagtcttaataaaatcttaccaaata

SEQ ID NO: 97064 - DNA, 2424 bp, Homo sapiens
  misc_feature (2311)..(2311): n is a, c, g, or t
  misc_feature (2317)..(2317): n is a, c, g, or t
  misc_feature (2322)..(2322): n is a, c, g, or t
  misc_feature (2340)..(2340): n is a, c, g, or t
  misc_feature (2357)..(2358): n is a, c, g, or t
  misc_feature (2361)..(2362): n is a, c, g, or t
  misc_feature (2378)..(2378): n is a, c, g, or t
  misc_feature (2388)..(2388): n is a, c, g, or t
  misc_feature (2390)..(2390): n is a, c, g, or t
  misc_feature (2392)..(2392): n is a, c, g, or t
  misc_feature (2395)..(2395): n is a, c, g, or t
gcaggctgtcggtccaagtccttgatggtagcgggggctgggggggagggggcggggggggccgcgccgtgctagccgttgggcctgcctcggaggaggcgtcgccgccgccgctgccgctgccggcgccgttgccgctgccgggaaacacaaggaaagggaaccagcgcagcgtggcgatgggcgggggtagagccccgccggagaggctgggcggctgccggtgacagactgtgccctgtccacggtgcctcctgcatgtcctgctgccctgagctgtcccgagctaggtgacagcgtaccacgctgccaccatgaatgaggtgtctgtcatcaaagaaggctggctccacaagcgtggtgaatacatcaagacctggaggccacggtacttcctgctgaagagcgacggctccttcattgggtacaaggagaggcccgaggcccctgatcagactctaccccccttaaacaacttctccgtagcagaatgccagctgatgaagaccgagaggccgcgacccaacacctttgtcatacgctgcctgcagtggaccacagtcatcgagaggaccttccacgtggattctccagacgagagggaggagtggatgcgggccatccagatggtcgccaacagcctcaagcagcgggccccaggcgaggaccccatggactacaagtgtggctcccccagtgactcctccacgactgaggagatggaagtggcggtcagcaaggcacgggctaaagtgaccatgaatgacttcgactatctcaaactccttggcaagggaacctttggcaaagtcatcctggtgcgggagaaggccactggccgctactacgccatgaagatcctgcggaaggaagtcatcattgccaaggatgaagtcgctcacacagtcaccgagagccgggtcctccagaacaccaggcacccgttcctcactgcgctgaagtatgccttccagacccacgaccgcctgtgctttgtgatggagtatgccaacgggggtgagctgttcttccacctgtcccgggagcgtgtcttcacagaggagcgggcccggttttatggtgcagagattgtctcggctcttgagtacttgcactcgcgggacgtggtataccgcgacatcaagctggaaaacctcatgctggacaaagatggccacatcaagatcactgactttggcctctgcaaagagggcatcagtgacggggccaccatgaaaaccttctgtgggaccccggagtacctggcgcctgaggtgctggaggacaatgactatggccgggccgtggactggtgggggctgggtgtggtcatgtacgagatgatgtgcggccgcctgcccttctacaaccaggaccacgagcgcctcttcgagctcatcctcatggaagagatccgcttcccgcgcacgctcagccccgaggccaagtccctgcttgctgggctgcttaagaaggaccccaagcagaggcttggtggggggcccagcgatgccaaggaggtcatggagcacaggttcttcctcagcatcaactggcaggacgtggtccagaagaagctcctgccacccttcaaacctcaggtcacgtccgaggtcgacacaaggtacttcgatgatgaatttaccgcccagtccatcacaatcacaccccctgaccgctatgacagcctgggcttactggagctggaccagcggacccacttcccccagttctcctccacgttctgcagccttaaggttgaacatgagtgcacgtccatgtcagtgctgtgggactcctgtgcgtgcctcggactgcgtgtgtcggcgggacgcaggcacacgtgggtgtgtgtgcatgtgtgtttgtgtgagggcagcgtgtcctccagtgtgcatggtgtgtgggcttgggccccatccctggcccgagcatttcatcctgtgggggaggggtgctgacctagtgggaggagccccactgtgatccatgagctgccctgcccacgcctcccctccctgtagcaacacctctgggtgtttggagtttagcttttgtgggtttgctctccctatcccatctcctgtactacacagttcatggcagggtggggaggggtggggttggttcgggtgggtgagggtctttttcctctgtgtgcgatgttgttatctgacagttctccgtccctactggcctttctcctcgtcttcatatttgtacggtacaagcaataaagacactcatttcagacaaaaaaaaaaaaaaaaaaaaaaggggggataaaggggggggggggaaaaaggggtantggaangggcntgggtaaagtggttccgnacccattttttggtaannggnnaaattggggggccccnaaaagggggngnanaantgaaaagcggtaactgtaagatgggaaaa

SEQ ID NO: 97065 - DNA, 2100 bp, Homo sapiens
gcaggctgtcggtccaagtccttgatggtagcgggggctgggggggagggggcggggggggccgcgccgtgctagccgttgggcctgcctcggaggaggcgtcgccgccgccgctgccgctgccggcgccgttgccgctgccgggaaacacaaggaaagggaaccagcgcagcgtggcgatgggcgggggtagagccccgccggagaggctgggcggctgccggtgacagactgtgccctgtccacggtgcctcctgcatgtcctgctgccctgagctgtcccgagctaggtgacagcgtaccacgctgccaccatgaatgaggtgtctgtcatcaaagaaggctggctccacaagcgtggtgaatacatcaagacctggaggccacggtacttcctgctgaagagcgacggctccttcattgggtacaaggagaggcccgaggcccctgatcagactctaccccccttaaacaacttctccgtagcagaatgccagctgatgaagaccgagaggccgcgacccaacacctttgtcatacgctgcctgcagtggaccacagtcatcgagaggaccttccacgtggattctccagacgagagggaggagtggatgcgggccatccagatggtcgccaacagcctcaagcagcgggccccaggcgaggaccccatggactacaagtgtggctcccccagtgactcctccacgactgaggagatggaagtggcggtcagcaaggcacgggctaaagtgaccatgaatgacttcgactatctcaaactccttggcaagggaacctttggcaaagtcatcctggtgcgggagaaggccactggccgctactacgccatgaagatcctgcggaaggaagtcatcattgccaaggatgaagtcgctcacacagtcaccgagagccgggtcctccagaacaccaggcacccgttcctcactgcgctgaagtatgccttccagacccacgaccgcctgtgctttgtgatggagtatgccaacgggggtgagctgttcttccacctgtcccgggagcgtgtcttcacagaggagcgggcccggttttatggtgcagagattgtctcggctcttgagtacttgcactcgcgggacgtggtataccgcgacatcaagctggaaaacctcatgctggacaaagatggccacatcaagatcactgactttggcctctgcaaagagggcatcagtgacggggccaccatgaaaaccttctgtgggaccccggagtacctggcgcctgaggtgctggaggacaatgactatggccgggccgtggactggtgggggctgggtgtggtcatgtacgagatgatgtgcggccgcctgcccttctacaaccaggaccacgagcgcctcttcgagctcatcctcatggaagagatccgcttcccgcgcacgctcagccccgaggccaagtccctgcttgctgggctgcttaagaaggaccccaagcagaggcttggtggggggcccagcgatgccaaggaggtcatggagcacaggttcttcctcagcatcaactggcaggacgtggtccagaagaagctcctgccacccttcaaacctcaggtcacgtccgaggtcgacacaaggtacttcgatgatgaatttaccgcccagtccatcacaatcacaccccctgaccgctatgacagcctgggcttactggagctggaccagcggacccacttcccccagttctccttgtgcatggtgtgtgggcttgggccccatccctggcccgagcatttcatcctgtgggggaggggtgctgacctagtgggaggagccccactgtgatccatgagctgccctgcccacgcctcccctccctgtagcaacacctctgggtgtttggagtttagcttttgtgggtttgctctccctatcccatctcctgtactacacagttcatggcagggtggggaggggtggggttggttcgggtgggtgagggtctttttcctctgtgtgcgatgttgttatctgacagttctccgtccctactggcctttctcctcgtcttcatatttgtacggtacaagcaataaagacactcatttcagac

SEQ ID NO: 97066 - DNA, 1988 bp, Homo sapiens
gcaggctgtcggtccaagtccttgatggtagcgggggctgggggggagggggcggggggggccgcgccgtgctagccgttgggcctgcctcggaggaggcgtcgccgccgccgctgccgctgccggcgccgttgccgctgccgggaaacacaaggaaagggaaccagcgcagcgtggcgatgggcgggggtagagccccgccggagaggctgggcggctgccggtgacagactgtgccctgtccacggtgcctcctgcatgtcctgctgccctgagctgtcccgagctaggtgacagcgtaccacgctgccaccatgaatgaggtgtctgtcatcaaagaaggctggctccacaagcgtggtgaatacatcaagacctggaggccacggtacttcctgctgaagagcgacggctccttcattgggtacaaggagaggcccgaggcccctgatcagactctaccccccttaaacaacttctccgtagcagaatgccagctgatgaagaccgagaggccgcgacccaacacctttgtcatacgctgcctgcagtggaccacagtcatcgagaggaccttccacgtggattctccagacgagagggaggagtggatgcgggccatccagatggtcgccaacagcctcaagcagcgggccccaggcgaggaccccatggactacaagtgtggctcccccagtgactcctccacgactgaggagatggaagtggcggtcagcaaggcacgggctaaagtgaccatgaatgacttcgactatctcaaactccttggcaagggaacctttggcaaagtcatcctggtgcgggagaaggccactggccgctactacgccatgaagatcctgcggaaggaagtcatcattgccaaggatgaagtcgctcacacagtcaccgagagccgggtcctccagaacaccaggcacccgttcctcactgcgctgaagtatgccttccagacccacgaccgcctgtgctttgtgatggagtatgccaacgggggtgagctgttcttccacctgtcccgggagcgtgtcttcacagaggagcgggcccggttttatggtgcagagattgtctcggctcttgagtacttgcactcgcgggacgtggtataccgcgacatcaagctggaaaacctcatgctggacaaagatggccacatcaagatcactgactttggcctctgcaaagagggcatcagtgacggggccaccatgaaaaccttctgtgggaccccggagtacctggcgcctgaggtgctggaggacaatgactatggccgggccgtggactggtgggggctgggtgtggtcatgtacgagatgatgtgcggccgcctgcccttctacaaccaggaccacgagcgcctcttcgagctcatcctcatggaagagatccgcttcccgcgcacgctcagccccgaggccaagtccctgcttgctgggctgcttaagaaggaccccaagcagaggcttggtggggggcccagcgatgccaaggaggtcatggagcacaggttcttcctcagcatcaactggcaggacgtggtccagaagaagctcctgccacccttcaaacctcaggtcacgtccgaggtcgacacaaggtacttcgatgatgaatttaccgccgctgccgctgccggcgccgttgccgctgccgggaaacacaaggaaagggaaccagcgcagcgtggcgatgggcgggggtagagccccgccggagaggctgggcggctgccggtgacagactgtgccctgtccacggtgcctcctgcatgtcctgctgccctgagctgtcccgagctaggtgacagcgtaccacgctgccaccatgaatgaggtgtctgccatcaaggatgaaactcaacaggtgttactttcttcatgaatcagcgaaacatgagattgcagagaattcatttccctcccaagagcggatggacagtgccttgtcatgtcgctgctggg

SEQ ID NO: 97067 - DNA, 1918 bp, Homo sapiens
gcaggctgtcggtccaagtccttgatggtagcgggggctgggggggagggggcggggggggccgcgccgtgctagccgttgggcctgcctcggaggaggcgtcgccgccgccgctgccgctgccggcgccgttgccgctgccgggaaacacaaggaaagggaaccagcgcagcgtggcgatgggcgggggtagagccccgccggagaggctgggcggctgccggtgacagactgtgccctgtccacggtgcctcctgcatgtcctgctgccctgagctgtcccgagctaggtgacagcgtaccacgctgccaccatgaatgaggtgtctgtcatcaaagaaggctggctccacaagcgtggtgaatacatcaagacctggaggccacggtacttcctgctgaagagcgacggctccttcattgggtacaaggagaggcccgaggcccctgatcagactctaccccccttaaacaacttctccgtagcagaatgccagctgatgaagaccgagaggccgcgacccaacacctttgtcatacgctgcctgcagtggaccacagtcatcgagaggaccttccacgtggattctccagacgagagggaggagtggatgcgggccatccagatggtcgccaacagcctcaagcagcgggccccaggcgaggaccccatggactacaagtgtggctcccccagtgactcctccacgactgaggagatggaagtggcggtcagcaaggcacgggctaaagtgaccatgaatgacttcgactatctcaaactccttggcaagggaacctttggcaaagtcatcctggtgcgggagaaggccactggccgctactacgccatgaagatcctgcggaaggaagtcatcattgccaaggatgaagtcgctcacacagtcaccgagagccgggtcctccagaacaccaggcacccgttcctcactgcgctgaagtatgccttccagacccacgaccgcctgtgctttgtgatggagtatgccaacgggggtgagctgttcttccacctgtcccgggagcgtgtcttcacagaggagcgggcccggttttatggtgcagagattgtctcggctcttgagtacttgcactcgcgggacgtggtataccgcgacatcaagctggaaaacctcatgctggacaaagatggccacatcaagatcactgactttggcctctgcaaagagggcatcagtgacggggccaccatgaaaaccttctgtgggaccccggagtacctggcgcctgaggtgctggaggacaatgactatggccgggccgtggactggtgggggctgggtgtggtcatgtacgagatgatgtgcggccgcctgcccttctacaaccaggaccacgagcgcctcttcgagctcatcctcatggaagagatccgcttcccgcgcacgctcagccccgaggccaagtccctgcttgctgggctgcttaagaaggaccccaagcagaggcttggtggggggcccagcgatgccaaggaggtcatggagcacaggttcttcctcagcatcaactggcaggacgtggtccagaagaagctcctgccacccttcaaacctcaggtcacgtccgaggtcgacacaaggtacttcgatgatgaatttaccgcccagtccatcacaatcacaccccctgaccgctctaactggagctggaccagcggagcgcctcccgggacaggcgacgacgcagcaaaaccttggaccagaggcgctaaagaggagcacggtggactgattcgttccccccgccatgagaagaagacgacaggtccgtaaatactgggccgtgccacccccaaggatttgagcacctcaccccaatgcagtacaaggccatgcaagctgcgggtcagatacctgccagctgtgcctcagca

SEQ ID NO: 97068 - DNA, 1842 bp, Homo sapiens
gcaggctgtcggtccaagtccttgatggtagcgggggctgggggggagggggcggggggggccgcgccgtgctagccgttgggcctgcctcggaggaggcgtcgccgccgccgctgccgctgccggcgccgttgccgctgccgggaaacacaaggaaagggaaccagcgcagcgtggcgatgggcgggggtagagccccgccggagaggctgggcggctgccggtgacagactgtgccctgtccacggtgcctcctgcatgtcctgctgccctgagctgtcccgagctaggtgacagcgtaccacgctgccaccatgaatgaggtgtctgtcatcaaagaaggctggctccacaagcgtggtgaatacatcaagacctggaggccacggtacttcctgctgaagagcgacggctccttcattgggtacaaggagaggcccgaggcccctgatcagactctaccccccttaaacaacttctccgtagcagaatgccagctgatgaagaccgagaggccgcgacccaacacctttgtcatacgctgcctgcagtggaccacagtcatcgagaggaccttccacgtggattctccagacgagagggaggagtggatgcgggccatccagatggtcgccaacagcctcaagcagcgggccccaggcgaggaccccatggactacaagtgtggctcccccagtgactcctccacgactgaggagatggaagtggcggtcagcaaggcacgggctaaagtgaccatgaatgacttcgactatctcaaactccttggcaagggaacctttggcaaagtcatcctggtgcgggagaaggccactggccgctactacgccatgaagatcctgcggaaggaagtcatcattgccaaggatgaagtcgctcacacagtcaccgagagccgggtcctccagaacaccaggcacccgttcctcactgcgctgaagtatgccttccagacccacgaccgcctgtgctttgtgatggagtatgccaacgggggtgagctgttcttccacctgtcccgggagcgtgtcttcacagaggagcgggcccggttttatggtgcagagattgtctcggctcttgagtacttgcactcgcgggacgtggtataccgcgacatcaagctggaaaacctcatgctggacaaagatggccacatcaagatcactgactttggcctctgcaaagagggcatcagtgacggggccaccatgaaaaccttctgtgggaccccggagtacctggcgcctgaggtgctggaggacaatgactatggccgggccgtggactggtgggggctgggtgtggtcatgtacgagatgatgtgcggccgcctgcccttctacaaccaggaccacgagcgcctcttcgagctcatcctcatggaagagatccgcttcccgcgcacgctcagccccgaggccaagtccctgcttgctgggctgcttaagaaggaccccaagcagaggcttggtggggggcccagcgatgccaaggaggtcatggagcacaggttcttcctcagcatcaactggcaggacgtggtccagaagaagctcctgccacccttcaaacctcaggtcacgtccgaggtcgacacaaggtacttcgatgatgaatttaccgcccagtccatcacaatcacaccccctgaccgcttgcacgtgggttctcggtcagcatctgctgagtgagaggaagtgggcagtcctggccatacccaagtctctttcaggtcctcgtcccagtgtggtatatagacacggcttccccactggacccagggaaggagctgcaggagtccacccagtcagggaggct

SEQ ID NO: 97069 - DNA, 1937 bp, Homo sapiens
  misc_feature (1897)..(1897): n is a, c, g, or t
gcaggctgtcggtccaagtccttgatggtagcgggggctgggggggagggggcggggggggccgcgccgtgctagccgttgggcctgcctcggaggaggcgtcgccgccgccgctgccgctgccggcgccgttgccgctgccgggaaacacaaggaaagggaaccagcgcagcgtggcgatgggcgggggtagagccccgccggagaggctgggcggctgccggtgacagactgtgccctgtccacggtgcctcctgcatgtcctgctgccctgagctgtcccgagctaggtgacagcgtaccacgctgccaccatgaatgaggtgtctgtcatcaaagaaggctggctccacaagcgtggtgaatacatcaagacctggaggccacggtacttcctgctgaagagcgacggctccttcattgggtacaaggagaggcccgaggcccctgatcagactctaccccccttaaacaacttctccgtagcagaatgccagctgatgaagaccgagaggccgcgacccaacacctttgtcatacgctgcctgcagtggaccacagtcatcgagaggaccttccacgtggattctccagacgagagggaggagtggatgcgggccatccagatggtcgccaacagcctcaagcagcgggccccaggcgaggaccccatggactacaagtgtggctcccccagtgactcctccacgactgaggagatggaagtggcggtcagcaaggcacgggctaaagtgaccatgaatgacttcgactatctcaaactccttggcaagggaacctttggcaaagtcatcctggtgcgggagaaggccactggccgctactacgccatgaagatcctgcggaaggaagtcatcattgccaaggatgaagtcgctcacacagtcaccgagagccgggtcctccagaacaccaggcacccgttcctcactgcgctgaagtatgccttccagacccacgaccgcctgtgctttgtgatggagtatgccaacgggggtgagctgttcttccacctgtcccgggagcgtgtcttcacagaggagcgggcccggttttatggtgcagagattgtctcggctcttgagtacttgcactcgcgggacgtggtataccgcgacatcaagctggaaaacctcatgctggacaaagatggccacatcaagatcactgactttggcctctgcaaagagggcatcagtgacggggccaccatgaaaaccttctgtgggaccccggagtacctggcgcctgaggtgctggaggacaatgactatggccgggccgtggactggtgggggctgggtgtggtcatgtacgagatgatgtgcggccgcctgcccttctacaaccaggaccacgagcgcctcttcgagctcatcctcatggaagagatccgcttcccgcgcacgctcagccccgaggccaagtccctgcttgctgggctgcttaagaaggaccccaagcagagtggtttgtggtcaagacagaatcattaagggccatacagggcctgcctgctccgaaagcccgtctgcccgaacccagctgctccgggaggcaggtgctgacggccgtctctgcacaggcttggtggggggcccagcgatgccaaggaggtcatggagcacaggttcttcctcagcatcaactggcaggacgtggtccagaagaagctcctgccacccttcaaacctcaggtcacgtccgaggtcgacacaaggtacttcgatgatgaatttaccgcccagtccatcacaatcacaccccctgaccgctatgcctggctaattttttttttcatattaagaaatatggagatggggtctcgctgtgttgcccaggctggtctcaaactcatgggttcaagcaatcctgncacctaagtcccccaaattgctgggattacaggtgtgagc

SEQ ID NO: 97070 - DNA, 1299 bp, Homo sapiens
gcaggctgtcggtccaagtccttgatggtagcgggggctgggggggagggggcggggggggccgcgccgtgctagccgttgggcctgcctcggaggaggcgtcgccgccgccgctgccgctgccggcgccgttgccgctgccgggaaacacaaggaaagggaaccagcgcagcgtggcgatgggcgggggtagagccccgccggagaggctgggcggctgccggtgacagactgtgccctgtccacggtgcctcctgcatgtcctgctgccctgagctgtcccgagctaggtgacagcgtaccacgctgccaccatgaatgaggtgtctgtcatcaaagaaggctggctccacaagcgtggtgaatacatcaagacctggaggccacggtacttcctgctgaagagcgacggctccttcattgggtacaaggagaggcccgaggcccctgatcagactctaccccccttaaacaacttctccgtagcagaatgccagctgatgaagaccgagaggccgcgacccaacacctttgtcatacgctgcctgcagtggaccacagtcatcgagaggaccttccacgtggattctccagacgagagggaggagtggatgcgggccatccagatggtcgccaacagcctcaagcagcgggccccaggcgaggaccccatggactacaagtgtggctcccccagtgactcctccacgactgaggagatggaagtggcggtcagcaaggcacgggctaaagtgaccatgaatgacttcgactatctcaaactccttggcaagggaacctttggcaaagtcatcctggtgcgggagaaggccactggccgctactacgccatgaagatcctgcggaaggaagtcatcattgccaaggatgaagtcgctcacacagtcaccgagagccgggtcctccagaacaccaggcacccgttcctcactgcgctgaagtatgccttccagacccacgaccgcctgtgctttgtgatggagtatgccaacgggggtgagctgttcttccacctgtcccgggagcgtgtcttcacagaggagcgggcccggttttatggtgcagagattgtctcggctcttgagtacttgcactcgcgggacgtggtataccgcgacatcaagctggaaaacctcatgctggacaaagatggccacatcaagatcactgactttggcctctgcaaagagggcatcagtgacggggccaccatgaaaaccttctgtgggaccccggagtacctggcgcctgagagttgttgaagaccattaactatgc

SEQ ID NO: 97071 - DNA, 2863 bp, Homo sapiens
gcaggctgtcggtccaagtccttgatggtagcgggggctgggggggagggggcggggggggccgcgccgtgctagccgttgggcctgcctcggaggaggcgtcgccgccgccgctgccgctgccggcgccgttgccgctgccgggaaacacaaggaaagggaaccagcgcagcgtggcgatgggcgggggtagagccccgccggagaggctgggcggctgccggtgacagactgtgccctgtccacggtgcctcctgcatgtcctgctgccctgagctgtcccgagctaggtgacagcgtaccacgctgccaccatgaatgaggtgtctgtcatcaaagaaggctggctccacaagcgtggtgaatacatcaagacctggaggccacggtacttcctgctgaagagcgacggctccttcattgggtacaaggagaggcccgaggcccctgatcagactctaccccccttaaacaacttctccgtagcagaatgccagctgatgaagaccgagaggccgcgacccaacacctttgtcatacgctgcctgcagtggaccacagtcatcgagaggaccttccacgtggattctccagacgagagggaggagtggatgcgggccatccagatggtcgccaacagcctcaagcagcgggccccaggcgaggaccccatggactacaagtgtggctcccccagtgactcctccacgactgaggagatggaagtggcggtcagcaaggcacgggctaaagtgaccatgaatgacttcgactatctcaaactccttggcaagggaacctttggcaaagtcatcctggtgcgggagaaggccactggccgctactacgccatgaagatcctgcggaaggaagtcatcattgccaaggatgaagtcgctcacacagtcaccgagagccgggtcctccagaacaccaggcacccgttcctcactgcgctgaagtatgccttccagacccacgaccgcctgtgctttgtgatggagtatgccaacgggggtgagctgttcttccacctgtcccgggagcgtgtcttcacagaggagcgggcccggttttatggtgcagagattgtctcggctcttgagtacttgcactcgcgggacgtggtataccgcgacatcaagaggttagtggcagggtgtgcgccaggctgacctgtggcatgcacaccacatgggactcacactggggaagttgggctgagcttctgccctcattcgccaggctccccaccaaggtccagggtggtggctgccctcattcgccaggctccccaccaaggtccagggtggtggctgccctcattcaccaggctccccaccaaggtccagggtggtggctctgtggcaagttgccccaagtagggaccttcccaagcctcccatgagcgctcctaggccactagcggagtgtcaactgccacaatacctactttatttgtatttatttatttatttatttttgaggagtcttactctattgagtgcagtggtgtgatctcggctcgctgcaacctctgcctcccgggttcaagcgattgtcctgcctcagcctcccgaataggtgggattacaggtgcccgccaccatgcccagctaatttttgtatttttagtagagacggggtttcatcatattggccaggctggtctcaaactcctgaccttgtgatccacccacctcagcctcccaaagtgcttggattacaggcatgagcccccgcgcccggccaagtttagaagatagtttggcagtgtccaccaaagctgagcaccagccatctgccctagctgtgtgcacaggagaagtggggacacacactcaccttagaaagtgtccccctcactcagcagcaggacttactctagccccaactggaacaacccaagtatccactgtgagaggaacagtcagatccactgtggagtgttctcacagtgggacgccacacagcagttaggaatgagctacagctacacacgacagtgtggacgcgtctcataggctaatgtcgagggaaagccgcacagaggaggtgagtccacagttcacaggtgtgtctgtgtgcagtggtacagatgggaagtagaggttaattcttgtgggggatggtcagtaaccgggaggggcacacagggccttccagggggagatgccacctcagcctcgcaagtagctgggactataggtgtgtgccaccatgcctggctaattttttttttcatattaagaaatatggagaccttcatctctacaaaaaatacaaaaattagctgggcatggtggtgcatgcctgcaatcccagctaacttggaaggctgaggtgaggtgggaagatcacttgagcccaggagtttgaggctgcagtgagctatgattgcggcactgcactgcagcctgggacaatgagactgtgtctctaaaaataaaaaaaaaaaaaacatgatacatgctattaaaaaagacagcaaagcaggagtataagaaaggaaattcacccgaggtcgcagggccttgagtactcattttggtgctgattacctctctgcaaatggacacggcatcataaattggtagtttcctgctctttttgtgtaatcttttccagttaatgtgaagcctctgggggctgccctcgtgcactgatggttgtgtggagtcgggggcggcagtgcgattcccttttagctgctgcatggggggaactcaggctttccagctgcttcctggggttccatggggtagacccctcaaccgcttcagctgccccgttaacaggaattgacttggtttcgtttggtgctaccagcagtcctgtaataaactagctatccatctgtaaa

SEQ ID NO: 97072 - DNA, 2407 bp, Homo sapiens
gcaggctgtcggtccaagtccttgatggtagcgggggctgggggggagggggcggggggggccgcgccgtgctagccgttgggcctgcctcggaggaggcgtcgccgccgccgctgccgctgccggcgccgttgccgctgccgggaaacacaaggaaagggaaccagcgcagcgtggcgatgggcgggggtagagccccgccggagaggctgggcggctgccggtgacagactgtgccctgtccacggtgcctcctgcatgtcctgctgccctgagctgtcccgagctaggtgacagcgtaccacgctgccaccatgaatgaggtgtctgtcatcaaagaaggctggctccacaagcgtggtgaatacatcaagacctggaggccacggtacttcctgctgaagagcgacggctccttcattgggtacaaggagaggcccgaggcccctgatcagactctaccccccttaaacaacttctccgtagcagaatgccagctgatgaagaccgagaggccgcgacccaacacctttgtcatacgctgcctgcagtggaccacagtcatcgagaggaccttccacgtggattctccagacgagagggaggagtggatgcgggccatccagatggtcgccaacagcctcaagcagcgggccccaggcgaggaccccatggactacaagtgtggctcccccagtgactcctccacgactgaggagatggaagtggcggtcagcaaggcacgggctaaagtgaccatgaatgacttcgactatctcaaactccttggcaagggaacctttggcaaagtcatcctggtgcgggagaaggccactggccgctactacgccatgaagatcctgcggaaggaagtcatcattgccaaggatgaagtcgctcacacagtcaccgagagccgggtcctccagaacaccaggcacccgttcctcactgcgctgaagtatgccttccagacccacgaccgcctgtgctttgtgatggagtatgccaacgggggtgagctgttcttccacctgtcccgggagcgtgtcttcacagaggagcgggcccggttttatggtgcagagattgtctcggctcttgagtacttgcactcgcgggacgtggtataccgcgacatcaagaggttagtggcagggtgtgcgccaggctgacctgtggcatgcacaccacatgggactcacactggggaagttgggctgagcttctgccctcattcgccaggctccccaccaaggtccagggtggtggctgccctcattcgccaggctccccaccaaggtccagggtggtggctgccctcattcaccaggctccccaccaaggtccagggtggtggctctgtggcaagttgccccaagtagggaccttcccaagcctcccatgagcgctcctaggccactagcggagtgtcaactgccacaatacctactttatttgtatttatttatttatttatttttgaggagtcttactctattgagtgcagtggtgtgatctcggctcgctgcaacctctgcctcccgggttcaagcgattgtcctgcctcagcctcccgaataggtgggattacaggtgcccgccaccatgcccagctaatttttgtatttttagtagagacggggtttcatcatattggccaggctggtctcaaactcctgaccttgtgatccacccacctcagcctcccaaagtgcttggattacaggcatgagcccccgcgcccggccaagtttagaagatagtttggcagtgtccaccaaagctgagcaccagccatctgccctagctgtgtgcacaggagaagtggggacacacactcaccttagaaagtgtccccctcactcagcagcaggacttactctagccccaactggaacaacccaagtatccactgtgagaggaacagtcagatccactgtggagtgttctcacagtgggacgccacacagcagttaggaatgagctacagctacacacgacagtgtggacgcgtctcataggctaatgtcgagggaaagccgcacagaggaggtgagtccacagttcacaggtgtgtctgtgtgcagtggtacagatgggaagtagaggttaattcttgtgggggatggtcagtaaccgggaggggcacacagggccttccagggggagatgccacctcagcctcgcaagtagctgggactataggtgtgtgccaccatgcctggctaattttttttttcatattaagaaatatggagatggggtctcgctgtgttgcccaggctggtctcaaactcatgggttcaagcaatcctgccacctaagtcccccaaattgctgggattacaggtgtgagccactttgcctggctgcatatttcataattaaaggacagaaagtctag

SEQ ID NO: 97073 - DNA, 1546 bp, Homo sapiens
gcaggctgtcggtccaagtccttgatggtagcgggggctgggggggagggggcggggggggccgcgccgtgctagccgttgggcctgcctcggaggaggcgtcgccgccgccgctgccgctgccggcgccgttgccgctgccgggaaacacaaggaaagggaaccagcgcagcgtggcgatgggcgggggtagagccccgccggagaggctgggcggctgccggtgacagactgtgccctgtccacggtgcctcctgcatgtcctgctgccctgagctgtcccgagctaggtgacagcgtaccacgctgccaccatgaatgaggtgtctgtcatcaaagaaggctggctccacaagcgtggtgaatacatcaagacctggaggccacggtacttcctgctgaagagcgacggctccttcattgggtacaaggagaggcccgaggcccctgatcagactctaccccccttaaacaacttctccgtagcagaatgccagctgatgaagaccgagaggccgcgacccaacacctttgtcatacgctgcctgcagtggaccacagtcatcgagaggaccttccacgtggattctccagacgagagggaggagtggatgcgggccatccagatggtcgccaacagcctcaagcagcgggccccaggcgaggaccccatggactacaagtgtggctcccccagtgactcctccacgactgaggagatggaagtggcggtcagcaaggcacgggctaaagtgaccatgaatgacttcgactatctcaaactccttggcaagggaacctttggcaaagtcatcctggtgcgggagaaggccactggccgctactacgccatgaagatcctgcggaaggaagtcatcattgccaaggatgaagtcgctcacacagtcaccgagagccgggtcctccagaacaccaggcacccgttcctcactgcgctgaagtatgccttccagacccacgaccgcctgtgctttgtgatggagtatgccaacgggggtgagctgttcttccacctgtcccgggagcgtgtcttcacagaggagcgggcccggttttatggtgcagagattgtctcggctcttgagtacttgcactcgcgggacgtggtataccgcgacatcaagaggttagtggcagggtgtgcgccaggctgacctgtggcatgcacaccacatgggactcacactggggaagttgggctgagcttctgccctcattcgccaggctccccaccaaggtccagggtggtggctgccctcattcgccaggctccccaccaaggtccagggtggtggctgccctcattcaccaggctccccaccaaggtccagggtggtggctctgtggcaagttgccccaagtagggaccttcccaagcctcccatgagcgctcctaggccactagcggagtgtcaactgccacaatacctactttatttgtatttatttatttatttatttttgaggagtcttactctattgagattgcaccactgtagcctgggcgacagagcaagactgtcta

SEQ ID NO: 97074 - DNA, 1215 bp, Homo sapiens
gcaggctgtcggtccaagtccttgatggtagcgggggctgggggggagggggcggggggggccgcgccgtgctagccgttgggcctgcctcggaggaggcgtcgccgccgccgctgccgctgccggcgccgttgccgctgccgggaaacacaaggaaagggaaccagcgcagcgtggcgatgggcgggggtagagccccgccggagaggctgggcggctgccggtgacagactgtgccctgtccacggtgcctcctgcatgtcctgctgccctgagctgtcccgagctaggtgacagcgtaccacgctgccaccatgaatgaggtgtctgtcatcaaagaaggctggctccacaagcgtggtgaatacatcaagacctggaggccacggtacttcctgctgaagagcgacggctccttcattgggtacaaggagaggcccgaggcccctgatcagactctaccccccttaaacaacttctccgtagcagaatgccagctgatgaagaccgagaggccgcgacccaacacctttgtcatacgctgcctgcagtggaccacagtcatcgagaggaccttccacgtggattctccagacgagagggaggagtggatgcgggccatccagatggtcgccaacagcctcaagcagcgggccccaggcgaggaccccatggactacaagtgtggctcccccagtgactcctccacgactgaggagatggaagtggcggtcagcaaggcacgggctaaagtgaccatgaatgacttcgactatctcaaactccttggcaagggaacctttggcaaagtcatcctggtgcgggagaaggccactggccgctactacgccatgaagatcctgcggaaggaagtcatcattgccaaggatgaagtcgctcacacagtcaccgagagccgggtcctccagaacaccaggcacccgttcctcactgcgctgaagtatgccttccagacccacgaccgcctgtgctttgtgatggagtatgccaacgggggtgagctgttcttccacctgtcccgggagcgtgtcttcacagaggagcgggcccggttttatggtgcagagattgtctcggctcttgagtacttgcactcgcgggacgtggtataccgcgacatcaagtttccctcacgaaacacggtttgccactagctggggtacctgcccgcggtttccctcaggaacagctata

SEQ ID NO: 97075 - DNA, 1000 bp, Homo sapiens
  misc_feature (961)..(961): n is a, c, g, or t
gcaggctgtcggtccaagtccttgatggtagcgggggctgggggggagggggcggggggggccgcgccgtgctagccgttgggcctgcctcggaggaggcgtcgccgccgccgctgccgctgccggcgccgttgccgctgccgggaaacacaaggaaagggaaccagcgcagcgtggcgatgggcgggggtagagccccgccggagaggctgggcggctgccggtgacagactgtgccctgtccacggtgcctcctgcatgtcctgctgccctgagctgtcccgagctaggtgacagcgtaccacgctgccaccatgaatgaggtgtctgtcatcaaagaaggctggctccacaagcgtggtgaatacatcaagacctggaggccacggtacttcctgctgaagagcgacggctccttcattgggtacaaggagaggcccgaggcccctgatcagactctaccccccttaaacaacttctccgtagcagaatgccagctgatgaagaccgagaggccgcgacccaacacctttgtcatacgctgcctgcagtggaccacagtcatcgagaggaccttccacgtggattctccagacgagagggaggagtggatgcgggccatccagatggtcgccaacagcctcaagcagcgggccccaggcgaggaccccatggactacaagtgtggctcccccagtgactcctccacgactgaggagatggaagtggcggtcagcaaggcacgggctaaagtgaccatgaatgacttcgactatctcaaactccttggcaagggaacctttggcaaagtcatcctggtgcgggagaaggccactggccgctactacgccatgaagatcctgcggaaggaagtcatcattgccaaggatgaagtcgctcacacagtcaccgagagccgggtcctccagaacaccaggcacccgttcctcactcgctgaantatgccttcagacccactggatgaggggtaccgagctcg

SEQ ID NO: 97076 - DNA, 789 bp, Homo sapiens
gcaggctgtcggtccaagtccttgatggtagcgggggctgggggggagggggcggggggggccgcgccgtgctagccgttgggcctgcctcggaggaggcgtcgccgccgccgctgccgctgccggcgccgttgccgctgccgggaaacacaaggaaagggaaccagcgcagcgtggcgatgggcgggggtagagccccgccggagaggctgggcggctgccggtgacagactgtgccctgtccacggtgcctcctgcatgtcctgctgccctgagctgtcccgagctaggtgacagcgtaccacgctgccaccatgaatgaggtgtctgtcatcaaagaaggctggctccacaagcgtggtgaatacatcaagacctggaggccacggtacttcctgctgaagagcgacggctccttcattgggtacaaggagaggcccgaggcccctgatcagactctaccccccttaaacaacttctccgtagcagaatgccagctgatgaagaccgagaggccgcgacccaacacctttgtcatacgctgcctgcagtggaccacagtcatcgagaggaccttccacgtggattctccagacgagagggaggagtggatgcgggccatccagatggtcgccaacagcctcaagcagcgggccccaggcgaggaccccatggactacaagtgtggctcccccagtgactcctccacgactgaggagatggaagtggcggtcagcaaggcacgggctaaagtgaccatggatgacagtctaccgggtaccgagctga

SEQ ID NO: 97077 - DNA, 458 bp, Homo sapiens
ctgagggggtcgctgccacctccccaatgagcctccgcagcaccaggaaggagccccacccaccagctccagctccaagagacgcagatctctgcttccccacctgcctccctagcccatctgtgctgtctggcatcaaaaccaggtcagtgagagggggcgagagaaaaaggacttagtaagtggcaaggaaaggaattgagcttattttgagcctgttctgggcacagggcttcactctgtacatgttcattccacagatacttattaagtacccactccactctgtgcccaacaccctacaaagctctggggatccagctgtggctaaggcagccaagagtcctgcctttgtcgtgctgacattccagtgtgggtggtgggctgtcagcgtaagcaaacacatacagtaacatcggtggtgatgggtgcttaggggaaaatgaagggtaagggta

SEQ ID NO: 97078 - DNA, 1186 bp, Homo sapiens
gcaggctgtcggtccaagtccttgatggtagcgggggctgggggggagggggcggggggggccgcgccgtgctagccgttgggcctgcctcggaggaggcgtcgccgccgccgctgccgctgccggcgccgttgccgctgccgggaaacacaaggaaagggaaccagcgcagcgtggcgatgggcgggggtagagccccgccggagaggctgggcggctgccggtgacaggtgaatacatcaagacctggaggccacggtacttcctgctgaagagcgacggctccttcattgggtacaaggagaggcccgaggcccctgatcagactctaccccccttaaacaacttctccgtagcagaatgccagctgatgaagaccgagaggccgcgacccaacacctttgtcatacgctgcctgcagtggaccacagtcatcgagaggaccttccacgtggattctccagacgagagggaggagtggatgcgggccatccagatggtcgccaacagcctcaagcagcgggccccaggcgaggaccccatggactacaagtgtggctcccccagtgactcctccacgactgaggagatggaagtggcggtcagcaaggcacgggctaaagtgaccatgaatgacttcgactatctcaaactccttggcaagggaacctttggcaaagtcatcctggtgcgggagaaggccactggccgctactacgccatgaagatcctgcggaaggaagtcatcattgccaaggtgcgtgccccgggaattgcgctcgcgagcctctgtgggggctgcggtctggagcctgaccctgaggcctggacgcttacccgcgctttctgctgctgtgggcttatttcccccacaaattccccctagtcagaaaagggggagcctgaggcccagagaggagcagcaggccttgctgctgagtccccacctccaccctatgttaggggctgggggtgcctgtggagagagagagcctcggggccccacccagcaggtactgtcaagggaggctggggcctgttggggaggacgtcgctgttggggagtcccgggctttgctcagggtatcccaggtggaggccgggccaggagtggaattctactttttcccttatttgaattttttgtagtggaagattccaaagacattcaaaaatttaaaaagaa

SEQ ID NO: 97079 - DNA, 4530 bp, Homo sapiens
gcaggctgtcggtccaagtccttgatggtagcgggggctgggggggagggggcggggggggccgcgccgtgctagccgttgggcctgcctcggaggaggcgtcgccgccgccgctgccgctgccggcgccgttgccgctgccgggaaacacaaggaaagggaaccagcgcagcgtggcgatgggcgggggtagagccccgccggagaggctgggcggctgccggtgacagactgtgccctgtccacggtgcctcctgcatgtcctgctgccctgagctgtcccgagctaggtgacagcgtaccacgctgccaccatgaatgaggtgtctgtcatcaaagaaggctggctccacaagcgtggtgaatacatcaagacctggaggccacggtacttcctgctgaagagcgacggctccttcattgggtacaaggagaggcccgaggcccctgatcagactctaccccccttaaacaacttctccgtagcagaatgccagctgatgaagaccgagaggccgcgacccaacacctttgtcatacgctgcctgcagtggaccacagtcatcgagaggaccttccacgtggattctccagacgagagggaggagtggatgcgggccatccagatggtcgccaacagcctcaagcagcgggccccaggcgaggaccccatggactacaagtgtggctcccccagtgactcctccacgactgaggagatggaagtggcggtcagcaaggcacgggctaaagtgaccatgaatgacttcgactatctcaaactccttggcaagggaacctttggcaaagtcatcctggtgcgggagaaggccactggccgctactacgccatgaagatcctgcggaaggaagtcatcattgccaaggatgaagtcgctcacacagtcaccgagagccgggtcctccagaacaccaggcacccgttcctcactgcgctgaagtatgccttccagacccacgaccgcctgtgctttgtgatggagtatgccaacgggggtgagctgttcttccacctgtcccgggagcgtgtcttcacagaggagcgggcccggttttatggtgcagagattgtctcggctcttgagtacttgcactcgcgggacgtggtataccgcgacatcaagctggaaaacctcatgctggacaaagatggccacatcaagatcactgactttggcctctgcaaagagggcatcagtgacggggccaccatgaaaaccttctgtgggaccccggagtacctggcgcctgaggtgctggaggacaatgactatggccgggccgtggactggtgggggctgggtgtggtcatgtacgagatgatgtgcggccgcctgcccttctacaaccaggaccacgagcgcctcttcgagctcatcctcatggaagagatccgcttcccgcgcacgctcagccccgaggccaagtccctgcttgctgggctgcttaagaaggaccccaagcagaggcttggtggggggcccagcgatgccaaggaggtcatggagcacaggttcttcctcagcatcaactggcaggacgtggtccagaagaagctcctgccacccttcaaacctcaggtcacgtccgaggtcgacacaaggtacttcgatgatgaatttaccgcccagtccatcacaatcacaccccctgaccgctatgacagcctgggcttactggagctggaccagcggacccacttcccccagttctcctactcggccagcatccgcgagtgagcagtctgcccacgcagaggacgcacgctcgctgccatcaccgctgggtggttttttccccctaactttttacttagcctttttggtttgtgtccccacccccacctcctcaccccctttccagttcttcttcaggcccctcccagacgcaccccagcggcccctgcagcccctgcctccagcctccagcctcacctttgtgcccagactcgcatttggaagactccacctcccgcccaggcctgggctgttgggcggttggagattcaggttttaatccacacaagccccagtgaggggtgaagcatggcgcctggggcctgcctgagtttctggcctgggtgtcgtgctggtgtctgcctccgcgctgctgcatctggacgaaggctgccttctggtgggacgcgacacccggcagacagtggtgctgccttccaggccccgtggcctaggctcggagtggccaggcacggggcggtccaatcccccacccgctgtccccctatgggggcagaaaagcaataatgtccaggggcaggcaggggcccttgggagctgcagggctgggggttagggctgctccctggtgaatggagtcagatcctaggatctgtaccatggggaaccaggagtggccgggctgggtgccgcctcctggtccggcctcctccccaccaaactgtcctcaccctatggatgaggcaggaggaacatttggggccaaacctgcctgcctcccagccccgtgccttactagggcttccttccagctggccttacctcccgctggaccctgggcctggcctggccccactgggggctatgggctgggctcaccctctcctctgcgggggtggagggccaccagccttggctgttacaatcttacaccggacagtattgggccccatggacttggtcagggaggggtgggggtgggcatctctggtacctattggggtggggggcctctgaaaagggaggctcctaggcccccctcacccctccctctccccagggccccacgttctgcagccttaaggttgaacatgagtgcacgtccatgtcagtgctgtgggactcctgtgcgtgcctcggactgcgtgtgtcggcgggacgcaggcacacgtgggtgtgtgtgcatgtgtgtttgtgtgagggcagcgtgtcctccagtgtgcatggtgtgtgggcttgggccccatccctggcccgagcatttcatcctgtgggggaggggtgctgacctagtgggaggagccccactgtgatccatgagctgccctgcccacgcctcccctccctgtagcaacacctctgggtgtttggagtttagcttttgtgggtttgctctccctatcccatctcctgtactacacagttcatggcagggtggggaggggtggggttggttcgggtgggtgagggtctttttcctctgtgtgcgatgttgttatctgacagttctccgtccctactggcctttctcctcgtcttcatatttgtacggtacaagcaataaagacactcatttcagaccagggcccagcctgcactcacgccagcccaaccactctgggctttgccttggtgatggagtcagacccctgggccccagctcctcctgtactagccgttcccttcagcaaggagggcactgagctcagggtgagggcagctggggtgtgtgcaggagctcaggctggagagggtgggtggagctggtgctgtggggctgaggggtatgggaaggctccccgcatgtgggggtggggtggacagagaccactccaggccctcagtgctgcttaggctaagagaggtggggtggagggacagggctggaagatctgggtagcccagaatgaggagggtgcctgtgctgtcactgaatgagagggagtggttcattccacccggctgccgagcctcagaggggggcattcctatcctgccccacctccctgtttatgctgccacctggaagccttgaggcccccaaattccagtacagacccagtggtgtgttcatggtggcgtggttgctgtcacctgggagctcctgagcgtttggttagaaccctgttcagcttggggtcagccctcccctagtcactgccctttagcctggatgtgtctgggcccctgcacttcccgtgcttgagtcacgtggctgcatggccgggcgctggccggatggaacacctcccccagcaagggaccagggaccagagccctggcctgccctgctgagccctgctgtgcagagggcctggcacagatgaatttgagattttgccgcaaggtgttagcacttcacacccattgagtctttgagattttaagtgaatgtaagcagaaaaagtcagatccaatttacagaaatcagagttagctacagctaggactcgtttggttggggttttttagtttgtctttctaaagtcatgtggaccttaatttaattacaaaagtctaccctggtggtcataaaataggcaggcctatgaagaaaggccttttactcttccatctcgtcccagccccgagttgacccacgttgctgctcctcacaccatggtgatgcaggtctcgtagtgtgggcacaggcctggctacctcatctttttagtgcctctctcctcttccacaggatggggtcccacagctgcagcagctggccccgtagttgagcatgtgtggttatcctgtagagcttttcccaagaagggtgtttgaacttagagtcttaataaaatcttaccaaata

SEQ ID NO: 97080 - DNA, 4486 bp, Homo sapiens
gcaggctgtcggtccaagtccttgatggtagcgggggctgggggggagggggcggggggggccgcgccgtgctagccgttgggcctgcctcggaggaggcgtcgccgccgccgctgccgctgccggcgccgttgccgctgccgggaaacacaaggaaagggaaccagcgcagcgtggcgatgggcgggggtagagccccgccggagaggctgggcggctgccggtgacagactgtgccctgtccacggtgcctcctgcatgtcctgctgccctgagctgtcccgagctaggtgacagcgtaccacgctgccaccatgaatgaggtgtctgtcatcaaagaaggctggctccacaagcgtggtgaatacatcaagacctggaggccacggtacttcctgctgaagagcgacggctccttcattgggtacaaggagaggcccgaggcccctgatcagactctaccccccttaaacaacttctccgtagcagaatgccagctgatgaagaccgagaggccgcgacccaacacctttgtcatacgctgcctgcagtggaccacagtcatcgagaggaccttccacgtggattctccagacgagagggaggagtggatgcgggccatccagatggtcgccaacagcctcaagcagcgggccccaggcgaggaccccatggactacaagtgtggctcccccagtgactcctccacgactgaggagatggaagtggcggtcagcaaggcacgggctaaagtgaccatgaatgacttcgactatctcaaactccttggcaagggaacctttggcaaagtcatcctggtgcgggagaaggccactggccgctactacgccatgaagatcctgcggaaggaagtcatcattgccaaggatgaagtcgctcacacagtcaccgagagccgggtcctccagaacaccaggcacccgttcctcactgcgctgaagtatgccttccagacccacgaccgcctgtgctttgtgatggagtatgccaacgggggtgagctgttcttccacctgtcccgggagcgtgtcttcacagaggagcgggcccggttttatggtgcagagattgtctcggctcttgagtacttgcactcgcgggacgtggtataccgcgacatcaagctggaaaacctcatgctggacaaagatggccacatcaagatcactgactttggcctctgcaaagagggcatcagtgacggggccaccatgaaaaccttctgtgggaccccggagtacctggcgcctgaggtgctggaggacaatgactatggccgggccgtggactggtgggggctgggtgtggtcatgtacgagatgatgtgcggccgcctgcccttctacaaccaggaccacgagcgcctcttcgagctcatcctcatggaagagatccgcttcccgcgcacgctcagccccgaggccaagtccctgcttgctgggctgcttaagaaggaccccaagcagaggcttggtggggggcccagcgatgccaaggaggtcatggagcacaggttcttcctcagcatcaactggcaggacgtggtccagaagaagctcctgccacccttcaaacctcaggtcacgtccgaggtcgacacaaggtacttcgatgatgaatttaccgcccagtccatcacaatcacaccccctgaccgctatgacagcctgggcttactggagctggaccagcggacccacttcccccagttctcctactcggccagcatccgcgagtgagcagtctgcccacgcagaggacgcacgctcgctgccatcaccgctgggtggttttttccccctaactttttacttagcctttttggtttgtgtccccacccccacctcctcaccccctttccagttcttcttcaggcccctcccagacgcaccccagcggcccctgcagcccctgcctccagcctccagcctcacctttgtgcccagactcgcatttggaagactccacctcccgcccaggcctgggctgttgggcggttggagattcaggttttaatccacacaagccccagtgaggggtgaagcatggcgcctggggcctgcctgagtttctggcctgggtgtcgtgctggtgtctgcctccgcgctgctgcatctggacgaaggctgccttctggtgggacgcgacacccggcagacagtggtgctgccttccaggccccgtggcctaggctcggagtggccaggcacggggcggtccaatcccccacccgctgtccccctatgggggcagaaaagcaataatgtccaggggcaggcaggggcccttgggagctgcagggctgggggttagggctgctccctggtgaatggagtcagatcctaggatctgtaccatggggaaccaggagtggccgggctgggtgccgcctcctggtccggcctcctccccaccaaactgtcctcaccctatggatgaggcaggaggaacatttggggccaaacctgcctgcctcccagccccgtgccttactagggcttccttccagctggccttacctcccgctggaccctgggcctggcctggccccactgggggctatgggctgggctcaccctctcctctgcgggggtggagggccaccagccttggctgttacaatcttacaccggacagtattgggccccatggacttggtcagggaggggtgggggtgggcatctctggtacctattggggtggggggcctctgaaaagggaggctcctaggcccccctcacccctccctctccccagggccccacgttctgcagccttaaggttgaacatgagtgcacgtccatgtcagtgctgtgggactcctgtgcgtgcctcggactgcgtgtgtcggcgggacgcaggcacacgtgggtgtgtgtgcatgtgtgtttgtgtgagggcagcgtgtcctccagtgtgcatggtgtgtgggcttgggccccatccctggcccgagcatttcatcctgtgggggaggggtgctgacctagtgggaggagccccactgtgatccatgagctgccctgcccacgcctcccctccctgtagcaacacctctgggtgtttggagtttagcttttgtgggtttgctctccctatcccatctcctgtactacacagttcatggcagggtggggaggggtggggttggttcgggtgggtgagggtctttttcctctgtgtgcgatgttgttatctgacagttctccgtccctactggcctttctcctcgtcttcatatttgtacggtacaagcaataaagacactcatttcagaccagggcccagcctgcactcacgccagcccaaccactctgggctttgccttggtgatggagtcagacccctgggccccagctcctcctgtactagccgttcccttcagcaaggagggcactgagctcagggtgagggcagctggggtgtgtgcaggagctcaggctggagagggtgggtggagctggtgctgtggggctgaggggtatgggaaggctccccgcatgtgggggtggggtggacagagaccactccaggccctcagtgctgcttaggctaagagaggtggggtggagggacagggctggaagatctgggtagcccagaatgaggagggtgcctgtgctgtcactgaatgagagggagtggttcattccacccggctgccgagcctcagaggggggcattcctatcctgccccacctccctgtttatgctgccacctggaagccttgaggcccccaaattccagtacagacccagtggtgtgttcatggtggcgtggttgctgtcacctgggagctcctgagcgtttggttagaaccctgttcagcttggggtcagccctcccctagtcactgccctttagcctggatgtgtctgggcccctgcacttcccgtgcttgagtcacgtggctgcatggccgggcgctggccggatggaacacctcccccagcaagggaccagggaccagagccctggcctgccctgctgagccctgctgtgcagagggcctggcacagatgaatttgagattttgccgcaaggtgttagcacttcacacccattgagtctttgagattttaagtgaatgtaagcagaaaaagtcagatccaatttacagaaatcagagttagctacagctaggactcgtttggttggggttttttagtttgtctttctaaagtcatgtggaccttaatttaattacaaaagtctaccctggtggtcataaaataggcaggcctatgaagaaaggccttttactcttccatctcgtccgcccgagtgcccgtgctgtctcacccggtgttccgtcgtttgtgggcgggctggtccctctttaggccttcctccggggtcccgtgcgagggccattgctgtgtccggactccggggggtggttaatcccaaaaacggctttggaggggtgggtgtcctttgtgctttgtcttcttcttcgtaggg

SEQ ID NO: 97081 - DNA, 3536 bp, Homo sapiens
gcaggctgtcggtccaagtccttgatggtagcgggggctgggggggagggggcggggggggccgcgccgtgctagccgttgggcctgcctcggaggaggcgtcgccgccgccgctgccgctgccggcgccgttgccgctgccgggaaacacaaggaaagggaaccagcgcagcgtggcgatgggcgggggtagagccccgccggagaggctgggcggctgccggtgacagactgtgccctgtccacggtgcctcctgcatgtcctgctgccctgagctgtcccgagctaggtgacagcgtaccacgctgccaccatgaatgaggtgtctgtcatcaaagaaggctggctccacaagcgtggtgaatacatcaagacctggaggccacggtacttcctgctgaagagcgacggctccttcattgggtacaaggagaggcccgaggcccctgatcagactctaccccccttaaacaacttctccgtagcagaatgccagctgatgaagaccgagaggccgcgacccaacacctttgtcatacgctgcctgcagtggaccacagtcatcgagaggaccttccacgtggattctccagacgagagggaggagtggatgcgggccatccagatggtcgccaacagcctcaagcagcgggccccaggcgaggaccccatggactacaagtgtggctcccccagtgactcctccacgactgaggagatggaagtggcggtcagcaaggcacgggctaaagtgaccatgaatgacttcgactatctcaaactccttggcaagggaacctttggcaaagtcatcctggtgcgggagaaggccactggccgctactacgccatgaagatcctgcggaaggaagtcatcattgccaaggatgaagtcgctcacacagtcaccgagagccgggtcctccagaacaccaggcacccgttcctcactgcgctgaagtatgccttccagacccacgaccgcctgtgctttgtgatggagtatgccaacgggggtgagctgttcttccacctgtcccgggagcgtgtcttcacagaggagcgggcccggttttatggtgcagagattgtctcggctcttgagtacttgcactcgcgggacgtggtataccgcgacatcaagctggaaaacctcatgctggacaaagatggccacatcaagatcactgactttggcctctgcaaagagggcatcagtgacggggccaccatgaaaaccttctgtgggaccccggagtacctggcgcctgaggtgctggaggacaatgactatggccgggccgtggactggtgggggctgggtgtggtcatgtacgagatgatgtgcggccgcctgcccttctacaaccaggaccacgagcgcctcttcgagctcatcctcatggaagagatccgcttcccgcgcacgctcagccccgaggccaagtccctgcttgctgggctgcttaagaaggaccccaagcagaggcttggtggggggcccagcgatgccaaggaggtcatggagcacaggttcttcctcagcatcaactggcaggacgtggtccagaagaagctcctgccacccttcaaacctcaggtcacgtccgaggtcgacacaaggtacttcgatgatgaatttaccgcccagtccatcacaatcacaccccctgaccgctatgacagcctgggcttactggagctggaccagcggacccacttcccccagttctcctactcggccagcatccgcgagtgagcagtctgcccacgcagaggacgcacgctcgctgccatcaccgctgggtggttttttccccctaactttttacttagcctttttggtttgtgtccccacccccacctcctcaccccctttccagttcttcttcaggcccctcccagacgcaccccagcggcccctgcagcccctgcctccagcctccagcctcacctttgtgcccagactcgcatttggaagactccacctcccgcccaggcctgggctgttgggcggttggagattcaggttttaatccacacaagccccagtgaggggtgaagcatggcgcctggggcctgcctgagtttctggcctgggtgtcgtgctggtgtctgcctccgcgctgctgcatctggacgaaggctgccttctggtgggacgcgacacccggcagacagtggtgctgccttccaggccccgtggcctaggctcggagtggccaggcacggggcggtccaatcccccacccgctgtccccctatgggggcagaaaagcaataatgtccaggggcaggcaggggcccttgggagctgcagggctgggggttagggctgctccctggtgaatggagtcagatcctaggatctgtaccatggggaaccaggagtggccgggctgggtgccgcctcctggtccggcctcctccccaccaaactgtcctcaccctatggatgaggcaggaggaacatttggggccaaacctgcctgcctcccagccccgtgccttactagggcttccttccagctggccttacctcccgctggaccctgggcctggcctggccccactgggggctatgggctgggctcaccctctcctctgcgggggtggagggccaccagccttggctgttacaatcttacaccggacagtattgggccccatggacttggtcagggaggggtgggggtgggcatctctggtacctattggggtggggggcctctgaaaagggaggctcctaggcccccctcacccctccctctccccagggccccacgttctgcagccttaaggttgaacatgagtgcacgtccatgtcagtgctgtgggactcctgtgcgtgcctcggactgcgtgtgtcggcgggacgcaggcacacgtgggtgtgtgtgcatgtgtgtttgtgtgagggcagcgtgtcctccagtgtgcatggtgtgtgggcttgggccccatccctggcccgagcatttcatcctgtgggggaggggtgctgacctagtgggaggagccccactgtgatccatgagctgccctgcccacgcctcccctccctgtagcaacacctctgggtgtttggagtttagcttttgtgggtttgctctccctatcccatctcctgtactacacagttcatggcagggtggggaggggtggggttggttcgggtgggtgagggtctttttcctctgtgtgcgatgttgttatctgacagttctccgtccctactggcctttctcctcgtcttcatatttgtacggtacaagcaataaagacactcatttcagaccagggcccagcctgcactcacgccagcccaaccactctgggctttgccttggtgatggagtcagacccctgggccccagctcctcctgtactagccgttcccttcagcaaggagggcactgagctcagggtgagggcagctggggtgtgtgcaggagctcaggctggagagggtgggcagatatcatgctgtccaagagatgttaatagatgtaagaaaaaaagtgtgtgtgtgttg

SEQ ID NO: 97082 - DNA, 4464 bp, Homo sapiens
gcaggctgtcggtccaagtccttgatggtagcgggggctgggggggagggggcggggggggccgcgccgtgctagccgttgggcctgcctcggaggaggcgtcgccgccgccgctgccgctgccggcgccgttgccgctgccgggaaacacaaggaaagggaaccagcgcagcgtggcgatgggcgggggtagagccccgccggagaggctgggcggctgccggtgacagactgtgccctgtccacggtgcctcctgcatgtcctgctgccctgagctgtcccgagctaggtgacagcgtaccacgctgccaccatgaatgaggtgtctgtcatcaaagaaggctggctccacaagcgtggtgaatacatcaagacctggaggccacggtacttcctgctgaagagcgacggctccttcattgggtacaaggagaggcccgaggcccctgatcagactctaccccccttaaacaacttctccgtagcagaatgccagctgatgaagaccgagaggccgcgacccaacacctttgtcatacgctgcctgcagtggaccacagtcatcgagaggaccttccacgtggattctccagacgagagggaggagtggatgcgggccatccagatggtcgccaacagcctcaagcagcgggccccaggcgaggaccccatggactacaagtgtggctcccccagtgactcctccacgactgaggagatggaagtggcggtcagcaaggcacgggctaaagtgaccatgaatgacttcgactatctcaaactccttggcaagggaacctttggcaaagtcatcctggtgcgggagaaggccactggccgctactacgccatgaagatcctgcggaaggaagtcatcattgccaaggcgctgaagtatgccttccagacccacgaccgcctgtgctttgtgatggagtatgccaacgggggtgagctgttcttccacctgtcccgggagcgtgtcttcacagaggagcgggcccggttttatggtgcagagattgtctcggctcttgagtacttgcactcgcgggacgtggtataccgcgacatcaagctggaaaacctcatgctggacaaagatggccacatcaagatcactgactttggcctctgcaaagagggcatcagtgacggggccaccatgaaaaccttctgtgggaccccggagtacctggcgcctgaggtgctggaggacaatgactatggccgggccgtggactggtgggggctgggtgtggtcatgtacgagatgatgtgcggccgcctgcccttctacaaccaggaccacgagcgcctcttcgagctcatcctcatggaagagatccgcttcccgcgcacgctcagccccgaggccaagtccctgcttgctgggctgcttaagaaggaccccaagcagaggcttggtggggggcccagcgatgccaaggaggtcatggagcacaggttcttcctcagcatcaactggcaggacgtggtccagaagaagctcctgccacccttcaaacctcaggtcacgtccgaggtcgacacaaggtacttcgatgatgaatttaccgcccagtccatcacaatcacaccccctgaccgctatgacagcctgggcttactggagctggaccagcggacccacttcccccagttctcctactcggccagcatccgcgagtgagcagtctgcccacgcagaggacgcacgctcgctgccatcaccgctgggtggttttttccccctaactttttacttagcctttttggtttgtgtccccacccccacctcctcaccccctttccagttcttcttcaggcccctcccagacgcaccccagcggcccctgcagcccctgcctccagcctccagcctcacctttgtgcccagactcgcatttggaagactccacctcccgcccaggcctgggctgttgggcggttggagattcaggttttaatccacacaagccccagtgaggggtgaagcatggcgcctggggcctgcctgagtttctggcctgggtgtcgtgctggtgtctgcctccgcgctgctgcatctggacgaaggctgccttctggtgggacgcgacacccggcagacagtggtgctgccttccaggccccgtggcctaggctcggagtggccaggcacggggcggtccaatcccccacccgctgtccccctatgggggcagaaaagcaataatgtccaggggcaggcaggggcccttgggagctgcagggctgggggttagggctgctccctggtgaatggagtcagatcctaggatctgtaccatggggaaccaggagtggccgggctgggtgccgcctcctggtccggcctcctccccaccaaactgtcctcaccctatggatgaggcaggaggaacatttggggccaaacctgcctgcctcccagccccgtgccttactagggcttccttccagctggccttacctcccgctggaccctgggcctggcctggccccactgggggctatgggctgggctcaccctctcctctgcgggggtggagggccaccagccttggctgttacaatcttacaccggacagtattgggccccatggacttggtcagggaggggtgggggtgggcatctctggtacctattggggtggggggcctctgaaaagggaggctcctaggcccccctcacccctccctctccccagggccccacgttctgcagccttaaggttgaacatgagtgcacgtccatgtcagtgctgtgggactcctgtgcgtgcctcggactgcgtgtgtcggcgggacgcaggcacacgtgggtgtgtgtgcatgtgtgtttgtgtgagggcagcgtgtcctccagtgtgcatggtgtgtgggcttgggccccatccctggcccgagcatttcatcctgtgggggaggggtgctgacctagtgggaggagccccactgtgatccatgagctgccctgcccacgcctcccctccctgtagcaacacctctgggtgtttggagtttagcttttgtgggtttgctctccctatcccatctcctgtactacacagttcatggcagggtggggaggggtggggttggttcgggtgggtgagggtctttttcctctgtgtgcgatgttgttatctgacagttctccgtccctactggcctttctcctcgtcttcatatttgtacggtacaagcaataaagacactcatttcagaccagggcccagcctgcactcacgccagcccaaccactctgggctttgccttggtgatggagtcagacccctgggccccagctcctcctgtactagccgttcccttcagcaaggagggcactgagctcagggtgagggcagctggggtgtgtgcaggagctcaggctggagagggtgggtggagctggtgctgtggggctgaggggtatgggaaggctccccgcatgtgggggtggggtggacagagaccactccaggccctcagtgctgcttaggctaagagaggtggggtggagggacagggctggaagatctgggtagcccagaatgaggagggtgcctgtgctgtcactgaatgagagggagtggttcattccacccggctgccgagcctcagaggggggcattcctatcctgccccacctccctgtttatgctgccacctggaagccttgaggcccccaaattccagtacagacccagtggtgtgttcatggtggcgtggttgctgtcacctgggagctcctgagcgtttggttagaaccctgttcagcttggggtcagccctcccctagtcactgccctttagcctggatgtgtctgggcccctgcacttcccgtgcttgagtcacgtggctgcatggccgggcgctggccggatggaacacctcccccagcaagggaccagggaccagagccctggcctgccctgctgagccctgctgtgcagagggcctggcacagatgaatttgagattttgccgcaaggtgttagcacttcacacccattgagtctttgagattttaagtgaatgtaagcagaaaaagtcagatccaatttacagaaatcagagttagctacagctaggactcgtttggttggggttttttagtttgtctttctaaagtcatgtggaccttaatttaattacaaaagtctaccctggtggtcataaaataggcaggcctatgaagaaaggccttttactcttccatctcgtcccagccccgagttgacccacgttgctgctcctcacaccatggtgatgcaggtctcgtagtgtgggcacaggcctggctacctcatctttttagtgcctctctcctcttccacaggatggggtcccacagctgcagcagctggccccgtagttgagcatgtgtggttatcctgtagagcttttcccaagaagggtgtttgaacttagagtcttaataaaatcttaccaaata

SEQ ID NO: 97083 - DNA, 4568 bp, Homo sapiens
gcaggctgtcggtccaagtccttgatggtagcgggggctgggggggagggggcggggggggccgcgccgtgctagccgttgggcctgcctcggaggaggcgtcgccgccgccgctgccgctgccggcgccgttgccgctgccgggaaacacaaggaaagggaaccagcgcagcgtggcgatgggcgggggtagagccccgccggagaggctgggcggctgccggtgacagactgtgccctgtccacggtgcctcctgcatgtcctgctgccctgagctgtcccgagctaggtgacagcgtaccacgctgccaccatgaatgaggtgtctgtcatcaaagaaggctggctccacaagcgtggtgaatacatcaagacctggaggccacggtacttcctgctgaagagcgacggctccttcattgggtacaaggagaggcccgaggcccctgatcagactctaccccccttaaacaacttctccgtagcagaatgccagctgatgaagaccgagaggccgcgacccaacacctttgtcatacgctgcctgcagtggaccacagtcatcgagaggaccttccacgtggattctccagacgagagggaggagtggatgcgggccatccagatggtcgccaacagcctcaagcagcgggccccaggcgaggaccccatggactacaagtgtggctcccccagtgactcctccacgactgaggagatggaagtggcggtcagcaaggcacgggctaaagtgaccatgaatgacttcgactatctcaaactccttggcaagggaacctttggcaaagtcatcctggtgcgggagaaggccactggccgctactacgccatgaagatcctgcggaaggaagtcatcattgccaaggatgaagtcgctcacacagtcaccgagagccgggtcctccagaacaccaggcacccgttcctcactgcgctgaagtatgccttccagacccacgaccgcctgtgctttgtgatggagtatgccaacgggggtgagctgttcttccacctgtcccgggagcgtgtcttcacagaggagcgggcccggttttatggtgcagagattgtctcggctcttgagtacttgcactcgcgggacgtggtataccgcgacatcaagctggaaaacctcatgctggacaaagatggccacatcaagatcactgactttggcctctgcaaagagggcatcagtgacggggccaccatgaaaaccttctgtgggaccccggagtacctggcgcctgagggccacgggcccagccctcatttctcctccatcctcaggtgctggaggacaatgactatggccgggccgtggactggtgggggctgggtgtggtcatgtacgagatgatgtgcggccgcctgcccttctacaaccaggaccacgagcgcctcttcgagctcatcctcatggaagagatccgcttcccgcgcacgctcagccccgaggccaagtccctgcttgctgggctgcttaagaaggaccccaagcagaggcttggtggggggcccagcgatgccaaggaggtcatggagcacaggttcttcctcagcatcaactggcaggacgtggtccagaagaagctcctgccacccttcaaacctcaggtcacgtccgaggtcgacacaaggtacttcgatgatgaatttaccgcccagtccatcacaatcacaccccctgaccgctatgacagcctgggcttactggagctggaccagcggacccacttcccccagttctcctactcggccagcatccgcgagtgagcagtctgcccacgcagaggacgcacgctcgctgccatcaccgctgggtggttttttccccctaactttttacttagcctttttggtttgtgtccccacccccacctcctcaccccctttccagttcttcttcaggcccctcccagacgcaccccagcggcccctgcagcccctgcctccagcctccagcctcacctttgtgcccagactcgcatttggaagactccacctcccgcccaggcctgggctgttgggcggttggagattcaggttttaatccacacaagccccagtgaggggtgaagcatggcgcctggggcctgcctgagtttctggcctgggtgtcgtgctggtgtctgcctccgcgctgctgcatctggacgaaggctgccttctggtgggacgcgacacccggcagacagtggtgctgccttccaggccccgtggcctaggctcggagtggccaggcacggggcggtccaatcccccacccgctgtccccctatgggggcagaaaagcaataatgtccaggggcaggcaggggcccttgggagctgcagggctgggggttagggctgctccctggtgaatggagtcagatcctaggatctgtaccatggggaaccaggagtggccgggctgggtgccgcctcctggtccggcctcctccccaccaaactgtcctcaccctatggatgaggcaggaggaacatttggggccaaacctgcctgcctcccagccccgtgccttactagggcttccttccagctggccttacctcccgctggaccctgggcctggcctggccccactgggggctatgggctgggctcaccctctcctctgcgggggtggagggccaccagccttggctgttacaatcttacaccggacagtattgggccccatggacttggtcagggaggggtgggggtgggcatctctggtacctattggggtggggggcctctgaaaagggaggctcctaggcccccctcacccctccctctccccagggccccacgttctgcagccttaaggttgaacatgagtgcacgtccatgtcagtgctgtgggactcctgtgcgtgcctcggactgcgtgtgtcggcgggacgcaggcacacgtgggtgtgtgtgcatgtgtgtttgtgtgagggcagcgtgtcctccagtgtgcatggtgtgtgggcttgggccccatccctggcccgagcatttcatcctgtgggggaggggtgctgacctagtgggaggagccccactgtgatccatgagctgccctgcccacgcctcccctccctgtagcaacacctctgggtgtttggagtttagcttttgtgggtttgctctccctatcccatctcctgtactacacagttcatggcagggtggggaggggtggggttggttcgggtgggtgagggtctttttcctctgtgtgcgatgttgttatctgacagttctccgtccctactggcctttctcctcgtcttcatatttgtacggtacaagcaataaagacactcatttcagaccagggcccagcctgcactcacgccagcccaaccactctgggctttgccttggtgatggagtcagacccctgggccccagctcctcctgtactagccgttcccttcagcaaggagggcactgagctcagggtgagggcagctggggtgtgtgcaggagctcaggctggagagggtgggtggagctggtgctgtggggctgaggggtatgggaaggctccccgcatgtgggggtggggtggacagagaccactccaggccctcagtgctgcttaggctaagagaggtggggtggagggacagggctggaagatctgggtagcccagaatgaggagggtgcctgtgctgtcactgaatgagagggagtggttcattccacccggctgccgagcctcagaggggggcattcctatcctgccccacctccctgtttatgctgccacctggaagccttgaggcccccaaattccagtacagacccagtggtgtgttcatggtggcgtggttgctgtcacctgggagctcctgagcgtttggttagaaccctgttcagcttggggtcagccctcccctagtcactgccctttagcctggatgtgtctgggcccctgcacttcccgtgcttgagtcacgtggctgcatggccgggcgctggccggatggaacacctcccccagcaagggaccagggaccagagccctggcctgccctgctgagccctgctgtgcagagggcctggcacagatgaatttgagattttgccgcaaggtgttagcacttcacacccattgagtctttgagattttaagtgaatgtaagcagaaaaagtcagatccaatttacagaaatcagagttagctacagctaggactcgtttggttggggttttttagtttgtctttctaaagtcatgtggaccttaatttaattacaaaagtctaccctggtggtcataaaataggcaggcctatgaagaaaggccttttactcttccatctcgtcccagccccgagttgacccacgttgctgctcctcacaccatggtgatgcaggtctcgtagtgtgggcacaggcctggctacctcatctttttagtgcctctctcctcttccacaggatggggtcccacagctgcagcagctggccccgtagttgagcatgtgtggttatcctgtagagcttttcccaagaagggtgtttgaacttagagtcttaataaaatcttaccaaata

SEQ ID NO: 97084 - DNA, 4553 bp, Homo sapiens
gcaggctgtcggtccaagtccttgatggtagcgggggctgggggggagggggcggggggggccgcgccgtgctagccgttgggcctgcctcggaggaggcgtcgccgccgccgctgccgctgccggcgccgttgccgctgccgggaaacacaaggaaagggaaccagcgcagcgtggcgatgggcgggggtagagccccgccggagaggctgggcggctgccggtgacaggtgaatacatcaagacctggaggccacggtacttcctgctgaagagcgacggctccttcattgggtacaaggagaggcccgaggcccctgatcagactctaccccccttaaacaacttctccgtagcagaatgccagctgatgaagaccgagaggccgcgacccaacacctttgtcatacgctgcctgcagtggaccacagtcatcgagaggaccttccacgtggattctccagacgagagggaggagtggatgcgggccatccagatggtcgccaacagcctcaagcagcgggccccaggcgaggaccccatggactacaagtgtggctcccccagtgactcctccacgactgaggagatggaagtggcggtcagcaaggcacgggctaaagtgaccatgaatgacttcgactatctcaaactccttggcaagggaacctttggcaaagtcatcctggtgcgggagaaggccactggccgctactacgccatgaagatcctgcggaaggaagtcatcattgccaaggatgaagtcgctcacacagtcaccgagagccgggtcctccagaacaccaggcacccgttcctcactgcgctgaagtatgccttccagacccacgaccgcctgtgctttgtgatggagtatgccaacgggggtgagctgttcttccacctgtcccgggagcgtgtcttcacagaggagcgggcccggttttatggtgcagagattgtctcggctcttgagtacttgcactcgcgggacgtggtataccgcgacatcaagctggaaaacctcatgctggacaaagatggccacatcaagatcactgactttggcctctgcaaagagggcatcagtgacggggccaccatgaaaaccttctgtgggaccccggagtacctggcgcctgagggtgtctggggttggtgggggtaggaacgtgtgaggccaagggtagggggatcccccagacctgtgtgtttccagcccagatgccctgagggcaggactgtgatgccagcctcagggccacgggcccagccctcatttctcctccatcctcaggtgctggaggacaatgactatggccgggccgtggactggtgggggctgggtgtggtcatgtacgagatgatgtgcggccgcctgcccttctacaaccaggaccacgagcgcctcttcgagctcatcctcatggaagagatccgcttcccgcgcacgctcagccccgaggccaagtccctgcttgctgggctgcttaagaaggaccccaagcagaggcttggtggggggcccagcgatgccaaggaggtcatggagcacaggttcttcctcagcatcaactggcaggacgtggtccagaagaagctcctgccacccttcaaacctcaggtcacgtccgaggtcgacacaaggtacttcgatgatgaatttaccgcccagtccatcacaatcacaccccctgaccgctatgacagcctgggcttactggagctggaccagcggacccacttcccccagttctcctactcggccagcatccgcgagtgagcagtctgcccacgcagaggacgcacgctcgctgccatcaccgctgggtggttttttccccctaactttttacttagcctttttggtttgtgtccccacccccacctcctcaccccctttccagttcttcttcaggcccctcccagacgcaccccagcggcccctgcagcccctgcctccagcctccagcctcacctttgtgcccagactcgcatttggaagactccacctcccgcccaggcctgggctgttgggcggttggagattcaggttttaatccacacaagccccagtgaggggtgaagcatggcgcctggggcctgcctgagtttctggcctgggtgtcgtgctggtgtctgcctccgcgctgctgcatctggacgaaggctgccttctggtgggacgcgacacccggcagacagtggtgctgccttccaggccccgtggcctaggctcggagtggccaggcacggggcggtccaatcccccacccgctgtccccctatgggggcagaaaagcaataatgtccaggggcaggcaggggcccttgggagctgcagggctgggggttagggctgctccctggtgaatggagtcagatcctaggatctgtaccatggggaaccaggagtggccgggctgggtgccgcctcctggtccggcctcctccccaccaaactgtcctcaccctatggatgaggcaggaggaacatttggggccaaacctgcctgcctcccagccccgtgccttactagggcttccttccagctggccttacctcccgctggaccctgggcctggcctggccccactgggggctatgggctgggctcaccctctcctctgcgggggtggagggccaccagccttggctgttacaatcttacaccggacagtattgggccccatggacttggtcagggaggggtgggggtgggcatctctggtacctattggggtggggggcctctgaaaagggaggctcctaggcccccctcacccctccctctccccagggccccacgttctgcagccttaaggttgaacatgagtgcacgtccatgtcagtgctgtgggactcctgtgcgtgcctcggactgcgtgtgtcggcgggacgcaggcacacgtgggtgtgtgtgcatgtgtgtttgtgtgagggcagcgtgtcctccagtgtgcatggtgtgtgggcttgggccccatccctggcccgagcatttcatcctgtgggggaggggtgctgacctagtgggaggagccccactgtgatccatgagctgccctgcccacgcctcccctccctgtagcaacacctctgggtgtttggagtttagcttttgtgggtttgctctccctatcccatctcctgtactacacagttcatggcagggtggggaggggtggggttggttcgggtgggtgagggtctttttcctctgtgtgcgatgttgttatctgacagttctccgtccctactggcctttctcctcgtcttcatatttgtacggtacaagcaataaagacactcatttcagaccagggcccagcctgcactcacgccagcccaaccactctgggctttgccttggtgatggagtcagacccctgggccccagctcctcctgtactagccgttcccttcagcaaggagggcactgagctcagggtgagggcagctggggtgtgtgcaggagctcaggctggagagggtgggtggagctggtgctgtggggctgaggggtatgggaaggctccccgcatgtgggggtggggtggacagagaccactccaggccctcagtgctgcttaggctaagagaggtggggtggagggacagggctggaagatctgggtagcccagaatgaggagggtgcctgtgctgtcactgaatgagagggagtggttcattccacccggctgccgagcctcagaggggggcattcctatcctgccccacctccctgtttatgctgccacctggaagccttgaggcccccaaattccagtacagacccagtggtgtgttcatggtggcgtggttgctgtcacctgggagctcctgagcgtttggttagaaccctgttcagcttggggtcagccctcccctagtcactgccctttagcctggatgtgtctgggcccctgcacttcccgtgcttgagtcacgtggctgcatggccgggcgctggccggatggaacacctcccccagcaagggaccagggaccagagccctggcctgccctgctgagccctgctgtgcagagggcctggcacagatgaatttgagattttgccgcaaggtgttagcacttcacacccattgagtctttgagattttaagtgaatgtaagcagaaaaagtcagatccaatttacagaaatcagagttagctacagctaggactcgtttggttggggttttttagtttgtctttctaaagtcatgtggaccttaatttaattacaaaagtctaccctggtggtcataaaataggcaggcctatgaagaaaggccttttactcttccatctcgtcccagccccgagttgacccacgttgctgctcctcacaccatggtgatgcaggtctcgtagtgtgggcacaggcctggctacctcatctttttagtgcctctctcctcttccacaggatggggtcccacagctgcagcagctggccccgtagttgagcatgtgtggttatcctgtagagcttttcccaagaagggtgtttgaacttagagtcttaataaaatcttaccaaata

SEQ ID NO: 97085 - DNA, 3522 bp, Homo sapiens
gcagtatgagatatcgaagtcattcatggtcactttagcccgtgccttgctgacgccacttccacctggtgcgggagaaggccactggccgctactacgccatgaagatcctgcggaaggaagtcatcattgccaagctggaaaacctcatgctggacaaagatggccacatcaagatcactgactttggcctctgcaaagagggcatcagtgacggggccaccatgaaaaccttctgtgggaccccggagtacctggcgcctgaggtgctggaggacaatgactatggccgggccgtggactggtgggggctgggtgtggtcatgtacgagatgatgtgcggccgcctgcccttctacaaccaggaccacgagcgcctcttcgagctcatcctcatggaagagatccgcttcccgcgcacgctcagccccgaggccaagtccctgcttgctgggctgcttaagaaggaccccaagcagaggcttggtggggggcccagcgatgccaaggaggtcatggagcacaggttcttcctcagcatcaactggcaggacgtggtccagaagaagctcctgccacccttcaaacctcaggtcacgtccgaggtcgacacaaggtacttcgatgatgaatttaccgcccagtccatcacaatcacaccccctgaccgctatgacagcctgggcttactggagctggaccagcggacccacttcccccagttctcctactcggccagcatccgcgagtgagcagtctgcccacgcagaggacgcacgctcgctgccatcaccgctgggtggttttttccccctaactttttacttagcctttttggtttgtgtccccacccccacctcctcaccccctttccagttcttcttcaggcccctcccagacgcaccccagcggcccctgcagcccctgcctccagcctccagcctcacctttgtgcccagactcgcatttggaagactccacctcccgcccaggcctgggctgttgggcggttggagattcaggttttaatccacacaagccccagtgaggggtgaagcatggcgcctggggcctgcctgagtttctggcctgggtgtcgtgctggtgtctgcctccgcgctgctgcatctggacgaaggctgccttctggtgggacgcgacacccggcagacagtggtgctgccttccaggccccgtggcctaggctcggagtggccaggcacggggcggtccaatcccccacccgctgtccccctatgggggcagaaaagcaataatgtccaggggcaggcaggggcccttgggagctgcagggctgggggttagggctgctccctggtgaatggagtcagatcctaggatctgtaccatggggaaccaggagtggccgggctgggtgccgcctcctggtccggcctcctccccaccaaactgtcctcaccctatggatgaggcaggaggaacatttggggccaaacctgcctgcctcccagccccgtgccttactagggcttccttccagctggccttacctcccgctggaccctgggcctggcctggccccactgggggctatgggctgggctcaccctctcctctgcgggggtggagggccaccagccttggctgttacaatcttacaccggacagtattgggccccatggacttggtcagggaggggtgggggtgggcatctctggtacctattggggtggggggcctctgaaaagggaggctcctaggcccccctcacccctccctctccccagggccccacgttctgcagccttaaggttgaacatgagtgcacgtccatgtcagtgctgtgggactcctgtgcgtgcctcggactgcgtgtgtcggcgggacgcaggcacacgtgggtgtgtgtgcatgtgtgtttgtgtgagggcagcgtgtcctccagtgtgcatggtgtgtgggcttgggccccatccctggcccgagcatttcatcctgtgggggaggggtgctgacctagtgggaggagccccactgtgatccatgagctgccctgcccacgcctcccctccctgtagcaacacctctgggtgtttggagtttagcttttgtgggtttgctctccctatcccatctcctgtactacacagttcatggcagggtggggaggggtggggttggttcgggtgggtgagggtctttttcctctgtgtgcgatgttgttatctgacagttctccgtccctactggcctttctcctcgtcttcatatttgtacggtacaagcaataaagacactcatttcagaccagggcccagcctgcactcacgccagcccaaccactctgggctttgccttggtgatggagtcagacccctgggccccagctcctcctgtactagccgttcccttcagcaaggagggcactgagctcagggtgagggcagctggggtgtgtgcaggagctcaggctggagagggtgggtggagctggtgctgtggggctgaggggtatgggaaggctccccgcatgtgggggtggggtggacagagaccactccaggccctcagtgctgcttaggctaagagaggtggggtggagggacagggctggaagatctgggtagcccagaatgaggagggtgcctgtgctgtcactgaatgagagggagtggttcattccacccggctgccgagcctcagaggggggcattcctatcctgccccacctccctgtttatgctgccacctggaagccttgaggcccccaaattccagtacagacccagtggtgtgttcatggtggcgtggttgctgtcacctgggagctcctgagcgtttggttagaaccctgttcagcttggggtcagccctcccctagtcactgccctttagcctggatgtgtctgggcccctgcacttcccgtgcttgagtcacgtggctgcatggccgggcgctggccggatggaacacctcccccagcaagggaccagggaccagagccctggcctgccctgctgagccctgctgtgcagagggcctggcacagatgaatttgagattttgccgcaaggtgttagcacttcacacccattgagtctttgagattttaagtgaatgtaagcagaaaaagtcagatccaatttacagaaatcagagttagctacagctaggactcgtttggttggggttttttagtttgtctttctaaagtcatgtggaccttaatttaattacaaaagtctaccctggtggtcataaaataggcaggcctatgaagaaaggccttttactcttccatctcgtcccagccccgagttgacccacgttgctgctcctcacaccatggtgatgcaggtctcgtagtgtgggcacaggcctggctacctcatctttttagtgcctctctcctcttccacaggatggggtcccacagctgcagcagctggccccgtagttgagcatgtgtggttatcctgtagagcttttcccaagaagggtgtttgaacttagagtcttaataaaatcttaccaaata

SEQ ID NO: 97086 - DNA, 1316 bp, Homo sapiens
gcaggctgtcggtccaagtccttgatggtagcgggggctgggggggagggggcggggggggccgcgccgtgctagccgttgggcctgcctcggaggaggcgtcgccgccgccgctgccgctgccggcgccgttgccgctgccgggaaacacaaggaaagggaaccagcgcagcgtggcgatgggcgggggtagagccccgccggagaggctgggcggctgccggtgacagactgtgccctgtccacggtgcctcctgcatgtcctgctgccctgagctgtcccgagctaggtgacagcgtaccacgctgccaccatgaatgaggtgtctgtcatcaaagaaggctggctccacaagcgtggtgaatacatcaagacctggaggccacggtacttcctgctgaagagcgacggctccttcattgggtacaaggagaggcccgaggcccctgatcagactctaccccccttaaacaacttctccgtagcagaatgccagctgatgaagaccgagaggccgcgacccaacacctttgtcatacgctgcctgcagtggaccacagtcatcgagaggaccttccacgtggattctccagacgagagggaggagtggatgcgggccatccagatggtcgccaacagcctcaagcagcgggccccaggcgaggaccccatggactacaagtgtggctcccccagtgactcctccacgactgaggagatggaagtggcggtcagcaaggcacgggctaaagtgaccatgaatgacttcgactatctcaaactccttggcaagggaacctttggcaaagtcatcctggtgcgggagaaggccactggccgctactacgccatgaagatcctgcggaaggaagtcatcattgccaaggtgcgtgccccgggaattgcgctcgcgagcctctgtgggggctgcggtctggagcctgaccctgaggcctggacgcttacccgcgctttctgctgctgtgggcttatttcccccacaaattccccctagtcagaaaagggggagcctgaggcccagagaggagcagcaggccttgctgctgagtccccacctccaccctatgttaggggctgggggtgcctgtggagagagagagcctcggggccccacccagcaggtactgtcaagggaggctggggcctgttggggaggacgtcgctgttggggagtcccgggctttgctcagggtatcccaggtggaggccgggccaggagtggaattctactttttcccttatttgaattttttgtagtggaagattccaaagacattcaaaaatttaaaaagaa

SEQ ID NO: 97087 - DNA, 1304 bp, Homo sapiens
  misc_feature (8)..(8): n is a, c, g, or t
  misc_feature (104)..(104): n is a, c, g, or t
  misc_feature (150)..(150): n is a, c, g, or t
  misc_feature (157)..(157): n is a, c, g, or t
  misc_feature (212)..(212): n is a, c, g, or t
  misc_feature (1256)..(1256): n is a, c, g, or t
aaatggcncagtttttccgatgaagcgggcagttagccacgatttaaatggagtagtcacataggggcaccaggctttttccctagcggtctccgctttgttgntggtgggaattgtaacgatccattcaccccaggaaccagtatgggncatgatncgatttaatcgctcctcttaagggggaattgggcctcgaggcccaagattcggcnccgagttctgttttcctgcgcaggagccgcagggccgtaggcagccatggcgcccagccggaatggcatggtcttgaagccccacttcacaaaggactggcagcggcgcgtggccacgtggttcaaccagccgggcccgtaagatccgccagacgtaaggcccggcaagccaaggcgcgccgcatcgccccgcgccccgcgtcgggtcccatccggcccatcgtgcgctgccccacggttcggtaccacacgaaggtgcgcgccggccgcggcttcagcctggaggagctcagggtggccggcattcacaagaaggtggcccggaccatcggcatttctgtggatccgaggaggcggaacaagtccacggagtccctgcaggccaacgtgcagcggctgaaggagtaccgctccaaactcatcctcttccccaggaagccctcggcccccaagaagggagacagttctgctgaagaactgaaactggccacccagctgaccggaccggtcatgcccgtccggaacgtctataagaaggagaaagctcgagtcatcactgaggaagagaagaatttcaaagccttcgctagtctccgtatggcccgtgccaacgcccggctcttcggcatacgggcaaaaagagccaaggaagccgcagaacaggatgttgaaaagaaaaaataaagccctcctggggacttggaatcagtcggcagtcatgctgggtctccacgtggtgtgtttcgtgggaacaactgggcctgggatggggcttcactgctgtgacttcctcctgccaggggatttggggctttcttgaaagacagtccaagccctggataatgctttactttctgtgttgaagcactgttggttgtttggttagtgactgatgtaaaacggttttcttgtggggaggttacagaggctgacttcagagtggacttgtgttttttctttttaaagaggtaaggttgggctggtgctcacagctgtaatcccagcactttgagattggctgggagttcaagaccagcctggccnacatgtcaaactactaaaaataaagaaatcagcatgaaaaaacaaaaa

SEQ ID NO: 97088 - DNA, 676 bp, Homo sapiens
agcggcttttccgctcggctgttttcctgcgcaggagccgcagggccgtaggcagccatggcgcccagccggaatggcatggtcttgaagccccacttcacaaaggactggcagcggcgcgtggccacgtggttcaaccagccgggcccgtaagatccgccagacgtaaggcccggcaagccaaggcgcgccgcatcgccccgcgccccgcgtcgggtcccatccggcccatcgtgcgctgccccacggttcggtaccacacgtggccggcattcacaagaaggtggcccggaccatcggcatttctgtggatccgaggaggcggaacaagtccacggagtccctgcaggccaacgtgcagcggctgaaggagtaccgctccaaactcatcctcttccccaggaagccctcggcccccaagaagggagacagttctgctgaagaactgaaactggccacccagctgaccggaccggtcatgcccgtccggaacgtctataagaaggagaaagctcgagtcatcactgaggaagagaagaatttcaaagccttcgctagtctccgtatggcccgtgccaacgcccggctcttcggcatacgggcaaaaagagccaaggaagccgcagaacaggatgttgaaaagaaaaaataaagccctcctggggacttggaatca

SEQ ID NO: 97089 - DNA, 464 bp, Homo sapiens
agcttgcacgccggcagctgatctatcgaggatgacctacgacaaggcgggtggccggcattcacaagaaggtggcccggaccatcggcatttctgtggatccgaggaggcggaacaagtccacggagtccctgcaggccaacgtgcagcggctgaaggagtaccgctccaaactcatcctcttccccaggaagccctcggcccccaagaagggagacagttctgctgaagaactgaaactggccacccagctgaccggaccggtcatgcccgtccggaacgtctataagaaggagaaagctcgagtcatcactgaggaagagaagaatttcaaagccttcgctagtctccgtatggcccgtgccaacgcccggctcttcggcatacgggcaaaaagagccaaggaagccgcagaacaggatgttgaaaagaaaaaataaagccctcctggggacttggaatca

SEQ ID NO: 97090 - DNA, 1445 bp, Homo sapiens
  misc_feature (8)..(8): n is a, c, g, or t
  misc_feature (104)..(104): n is a, c, g, or t
  misc_feature (150)..(150): n is a, c, g, or t
  misc_feature (157)..(157): n is a, c, g, or t
  misc_feature (212)..(212): n is a, c, g, or t
  misc_feature (1397)..(1397): n is a, c, g, or t
aaatggcncagtttttccgatgaagcgggcagttagccacgatttaaatggagtagtcacataggggcaccaggctttttccctagcggtctccgctttgttgntggtgggaattgtaacgatccattcaccccaggaaccagtatgggncatgatncgatttaatcgctcctcttaagggggaattgggcctcgaggcccaagattcggcnccgagttctgttttcctgcgcaggagccgcagggccgtaggcagccatggcgcccagccggaatggcatggtcttgaagccccacttcacaaaggactggcagcggcgcgtggccacgtggttcaaccagccgggcccgtaagatccgccagacgtaaggcccggcaagccaaggcgcgccgcatcgccccgcgccccgcgtcgggtcccatccggcccatcgtgcgctgccccacggttcggtaccacacgaaggtgcgcgccggccgcggcttcagcctggaggagctcagggtggccggcattcacaagaaggtggcccggaccatcggcatttctgtggatccgaggaggcggaacaagtccacggagtccctgcaggccaacgtgcagcggctgaaggagtaccgctccaaactcatcctcttccccagggtggccggcattcacaagaaggtggcccggaccatcggcatttctgtggatccgaggaggcggaacaagtccacggagtccctgcaggccaacgtgcagcggctgaaggagtaccgctccaaactcatcctcttccccaggaagccctcggcccccaagaagggagacagttctgctgaagaactgaaactggccacccagctgaccggaccggtcatgcccgtccggaacgtctataagaaggagaaagctcgagtcatcactgaggaagagaagaatttcaaagccttcgctagtctccgtatggcccgtgccaacgcccggctcttcggcatacgggcaaaaagagccaaggaagccgcagaacaggatgttgaaaagaaaaaataaagccctcctggggacttggaatcagtcggcagtcatgctgggtctccacgtggtgtgtttcgtgggaacaactgggcctgggatggggcttcactgctgtgacttcctcctgccaggggatttggggctttcttgaaagacagtccaagccctggataatgctttactttctgtgttgaagcactgttggttgtttggttagtgactgatgtaaaacggttttcttgtggggaggttacagaggctgacttcagagtggacttgtgttttttctttttaaagaggtaaggttgggctggtgctcacagctgtaatcccagcactttgagattggctgggagttcaagaccagcctggccnacatgtcaaactactaaaaataaagaaatcagcatgaaaaaacaaaaa

SEQ ID NO: 97091 - DNA, 848 bp, Homo sapiens
  misc_feature (800)..(800): n is a, c, g, or t
agcttgcacgccggcagctgatctatcgaggatgacctacgacaaggcgggtggccggcattcacaagaaggtggcccggaccatcggcatttctgtggatccgaggaggcggaacaagtccacggagtccctgcaggccaacgtgcagcggctgaaggagtaccgctccaaactcatcctcttccccaggaagccctcggcccccaagaagggagacagttctgctgaagaactgaaactggccacccagctgaccggaccggtcatgcccgtccggaacgtctataagaaggagaaagctcgagtcatcactgaggaagagaagaatttcaaagccttcgctagtctccgtatggcccgtgccaacgcccggctcttcggcatacgggcaaaaagagccaaggaagccgcagaacaggatgttgaaaagaaaaaataaagccctcctggggacttggaatcagtcggcagtcatgctgggtctccacgtggtgtgtttcgtgggaacaactgggcctgggatggggcttcactgctgtgacttcctcctgccaggggatttggggctttcttgaaagacagtccaagccctggataatgctttactttctgtgttgaagcactgttggttgtttggttagtgactgatgtaaaacggttttcttgtggggaggttacagaggctgacttcagagtggacttgtgttttttctttttaaagaggtaaggttgggctggtgctcacagctgtaatcccagcactttgagattggctgggagttcaagaccagcctggccnacatgtcaaactactaaaaataaagaaatcagcatgaaaaaacaaaaa

SEQ ID NO: 97092 - DNA, 831 bp, Homo sapiens
  misc_feature (8)..(8): n is a, c, g, or t
  misc_feature (104)..(104): n is a, c, g, or t
  misc_feature (150)..(150): n is a, c, g, or t
  misc_feature (157)..(157): n is a, c, g, or t
  misc_feature (212)..(212): n is a, c, g, or t
aaatggcncagtttttccgatgaagcgggcagttagccacgatttaaatggagtagtcacataggggcaccaggctttttccctagcggtctccgctttgttgntggtgggaattgtaacgatccattcaccccaggaaccagtatgggncatgatncgatttaatcgctcctcttaagggggaattgggcctcgaggcccaagattcggcnccgagttctgttttcctgcgcaggagccgcagggccgtaggcagccatggcgcccagccggaatggcatggtcttgaagccccacttcacaaaggactggcagcggcgcgtggccacgtggttcaaccagccgggcccgtaagatccgccagacgtaaggcccggcaagccaaggcgcgccgcatcgccccgcgccccgcgtcgggtcccatccggcccatcgtgcgctgccccacggttcggtaccacacgaaggtgcgcgccggccgcggcttcagcctggaggagctcagggtggccggcattcacaagaaggtggcccggaccatcggcatttctgtggatccgaggaggcggaacaagtccacggagtccctgcaggccaacgtgcagcggctgaaggagtaccgctccaaactcatcctcttccccaggaagccctcggcccccaagaagggagacagttctgctgaagaactgaaactggccacccagctgaccggaccggtcatgcccgtccggaacgtctataagaaggagaaagctcgagtcatcactgaggaagagaagaatttcaaagccttcgctagtctccgtgggcctctatgattgagatcct

SEQ ID NO: 97093 - DNA, 794 bp, Homo sapiens
agccgcagggccgtaggcagccatggcgcccagccggaatggcatggtcttgaagccccacttcacaaaggactggcagcggcgcgtggccacgtggttcaaccagccgggcccgtaagatccgcaggtgagccctgcgctcggggctgcccctggggctcgtgcccgcggctgcgccttggcttgcgggtggccgatgccaggcggggggcgctgtctgcaaccgtcgcggagcgctggcctggcggccttaggcaagggtgaccgccgctgcgcttctctccaccagacgtaaggcccggcaagccaaggcgcgccgcatcgccccgcgccccgcgtcgggtcccatccggcccatcgtgcgctgccccacggttcggtaccacacgaaggtgcgcgccggccgcggcttcagcctggaggagctcagggtgagtactggcagcgctgcggtgtcaggaaggccccgaagtcccctctgttggcctcagtcgcgtgatgacattctccggaatcgctgtacggccttgatgaaagcacatttgaacccttttccatctgattgctgaggcttttcatccaggcctcggggctggagaaagcccgggcctgtctccatctctctctggttctggggccaggtggccgggtggccggcattcacaagaaggtggcccggaccatcggcatttctgtggatccgaggaggcggaacaagtccacggagtccctgcaggccaacgtgcagcggctgaaggagtaccgctccaaactcatcctcttccccaggaagc

SEQ ID NO: 97094 - DNA, 920 bp, Homo sapiens
  misc_feature (8)..(8): n is a, c, g, or t
  misc_feature (104)..(104): n is a, c, g, or t
  misc_feature (150)..(150): n is a, c, g, or t
  misc_feature (157)..(157): n is a, c, g, or t
  misc_feature (212)..(212): n is a, c, g, or t
aaatggcncagtttttccgatgaagcgggcagttagccacgatttaaatggagtagtcacataggggcaccaggctttttccctagcggtctccgctttgttgntggtgggaattgtaacgatccattcaccccaggaaccagtatgggncatgatncgatttaatcgctcctcttaagggggaattgggcctcgaggcccaagattcggcnccgagttctgttttcctgcgcaggagccgcagggccgtaggcagccatggcgcccagccggaatggcatggtcttgaagccccacttcacaaaggactggcagcggcgcgtggccacgtggttcaaccagccgggcccgtaagatccgccagacgtaaggcccggcaagccaaggcgcgccgcatcgccccgcgccccgcgtcgggtcccatccggcccatcgtgcgctgccccacggttcggtaccacacgaaggtgcgcgccggccgcggcttcagcctggaggagctcagggtggccggcattcacaagaaggtggcccggaccatcggcatttctgtggatccgaggaggcggaacaagtccacggagtccctgcaggccaacgtgcagcggctgaaggagtaccgctccaaactcatcctcttccccaggaagccctcggcccccaagaagggagacagttctgctgaagaactgaaactggccacccagctgaccggaccggtcatgcccgtccggaacgtctataagaaggagaaagctcgagtcatcactgaggaagagaagaatttcaaagccttcgctagtctccgtatggcccgtgccaacgcccggctcttcggcatacgggcaaaaagagccaaggaagccgcagaacaggatgttgaaaagaaaaaataaagccctcctggggacttggaatca

SEQ ID NO: 97095 - DNA, 1060 bp, Homo sapiens
  misc_feature (1012)..(1012): n is a, c, g, or t
agcggcttttccgctcggctgttttcctgcgcaggagccgcagggccgtaggcagccatggcgcccagccggaatggcatggtcttgaagccccacttcacaaaggactggcagcggcgcgtggccacgtggttcaaccagccgggcccgtaagatccgccagacgtaaggcccggcaagccaaggcgcgccgcatcgccccgcgccccgcgtcgggtcccatccggcccatcgtgcgctgccccacggttcggtaccacacgtggccggcattcacaagaaggtggcccggaccatcggcatttctgtggatccgaggaggcggaacaagtccacggagtccctgcaggccaacgtgcagcggctgaaggagtaccgctccaaactcatcctcttccccaggaagccctcggcccccaagaagggagacagttctgctgaagaactgaaactggccacccagctgaccggaccggtcatgcccgtccggaacgtctataagaaggagaaagctcgagtcatcactgaggaagagaagaatttcaaagccttcgctagtctccgtatggcccgtgccaacgcccggctcttcggcatacgggcaaaaagagccaaggaagccgcagaacaggatgttgaaaagaaaaaataaagccctcctggggacttggaatcagtcggcagtcatgctgggtctccacgtggtgtgtttcgtgggaacaactgggcctgggatggggcttcactgctgtgacttcctcctgccaggggatttggggctttcttgaaagacagtccaagccctggataatgctttactttctgtgttgaagcactgttggttgtttggttagtgactgatgtaaaacggttttcttgtggggaggttacagaggctgacttcagagtggacttgtgttttttctttttaaagaggtaaggttgggctggtgctcacagctgtaatcccagcactttgagattggctgggagttcaagaccagcctggccnacatgtcaaactactaaaaataaagaaatcagcatgaaaaaacaaaaa

SEQ ID NO: 97096 - DNA, 875 bp, Homo sapiens
gccagcgccatcggcctggcgcttcagccaacgcgggagtggatgggccccttcttcttcgcagacagcgttcggccgctgcccgggctctaggcgcggccggacggcccagtctggagggttcggggcggaggcccgggggggtgcgcgcgcccggggtccggcctctcactcgctcccctctcgtccgcagccgcagggccgtaggcagccatggcgcccagccggaatggcatggtcttgaagccccacttcacaaaggactggcagcggcgcgtggccacgtggttcaaccagccgggcccgtaagatccgccagacgtaaggcccggcaagccaaggcgcgccgcatcgccccgcgccccgcgtcgggtcccatccggcccatcgtgcgctgccccacggttcggtaccacacgaaggtgcgcgccggccgcggcttcagcctggaggagctcagggtggccggcattcacaagaaggtggcccggaccatcggcatttctgtggatccgaggaggcggaacaagtccacggagtccctgcaggccaacgtgcagcggctgaaggagtaccgctccaaactcatcctcttccccaggaagccctcggcccccaagaagggagacagttctgctgaagaactgaaactggccacccagctgaccggaccggtcatgcccgtccggaacgtctataagaaggagaaagctcgagtcatcactgaggaagagaagaatttcaaagccttcgctagtctccgtatggcccgtgccaacgcccggctcttcggcatacgggcaaaaagagccaaggaagccgcagaacaggatgttgaaaagaaaaaataaagccctcctggggacttggaatca

SEQ ID NO: 97097 - DNA, 1030 bp, Homo sapiens
  misc_feature (8)..(8): n is a, c, g, or t
  misc_feature (104)..(104): n is a, c, g, or t
  misc_feature (150)..(150): n is a, c, g, or t
  misc_feature (157)..(157): n is a, c, g, or t
  misc_feature (212)..(212): n is a, c, g, or t
aaatggcncagtttttccgatgaagcgggcagttagccacgatttaaatggagtagtcacataggggcaccaggctttttccctagcggtctccgctttgttgntggtgggaattgtaacgatccattcaccccaggaaccagtatgggncatgatncgatttaatcgctcctcttaagggggaattgggcctcgaggcccaagattcggcnccgagttctgttttcctgcgcaggagccgcagggccgtaggcagccatggcgcccagccggaatggcatggtcttgaagccccacttcacaaaggactggcagcggcgcgtggccacgtggttcaaccagccgggcccgtaagatccgccagacgtaaggcccggcaagccaaggcgcgccgcatcgccccgcgccccgcgtcgggtcccatccggcccatcgtgcgctgccccacggttcggtaccacacgaaggtgcgcgccggccgcggcttcagcctggaggagctcagggtggccggcattcacaagaaggtggcccggaccatcggcatttctgtggatccgaggaggcggaacaagtccacggagtccctgcaggccaacgtgcagcggctgaaggagtaccgctccaaactcatcctcttccccaggaagccctcggcccccaagaagggagacagttctgctgaagaactgaaactggccacccagctgaccggaccggtcatgcccgtccggaacgtctataagaaggagaaagctcgagtcatcactgaggaagagaagaatttcaaagccttcgctagtctccgtatggcccgtgccaacgcccggctcttcggcatacgggcaaaaagagccaaggaagccgcagaacaggatgttgaaaagaaaaaataaagccctcctggggacttggaatcaaaaaacaacgaaaaacactccggaggcaatcaatagggggagtagggaaacaaacacgggacagaacaacggggccacgagggacacaaagcaggggaaccatgaacacc

SEQ ID NO: 97098 - DNA, 690 bp, Homo sapiens
  misc_feature (8)..(8): n is a, c, g, or t
  misc_feature (104)..(104): n is a, c, g, or t
  misc_feature (150)..(150): n is a, c, g, or t
  misc_feature (157)..(157): n is a, c, g, or t
  misc_feature (212)..(212): n is a, c, g, or t
aaatggcncagtttttccgatgaagcgggcagttagccacgatttaaatggagtagtcacataggggcaccaggctttttccctagcggtctccgctttgttgntggtgggaattgtaacgatccattcaccccaggaaccagtatgggncatgatncgatttaatcgctcctcttaagggggaattgggcctcgaggcccaagattcggcnccgagttctgttttcctgcgcaggagccgcagggccgtaggcagccatggcgcccagccggaatggcatggtcttgaagccccacttcacaaaggactggcagcggcgcgtggccacgtggttcaaccagccgggcccgtaagatccgccagacgtaaggcccggcaagccaaggcgcgccgcatcgccccgcgccccgcgtcgggtcccatccggcccatcgtgcgctgccccacggttcggtaccacacgaaggtgcgcgccggccgcggcttcagcctggaggagctcagggtggccggcattcacaagaaggtggcccggaccatcggcatttctgtggatccgaggaggcggaacaagtccacggagtccctgcaggccaacgtgcagcggctgaaggagtaccgctccaaactcatcctcttccccaggaagccctcggccccgggccattcaacgcctccgggccattcaa

SEQ ID NO: 97099 - DNA, 181 bp, Homo sapiens
ttccagctcttgaagacgacataatccttcatgccttagtcttcacatatgttgaaccctctgaccagatatctgttccttatttctctgcctgttcaacagtcgcaattcacctccaatgattactgtctgaagtcattcttcagaattcaactcttctttattggtctcttactgtggc

SEQ ID NO: 97100 - DNA, 329 bp, Homo sapiens
taagaaatgtgaacaggcaagtcacagaaaggaaaacataaaagacaatttaaaaactataatagaatgctcactctcagttgtaatcagtaattataaattaatataacaccaagatatcattttatctttagtagattgggaaacatttataaagttggaatgtgcagaaaagagttagtggcagctggatggaatgctaaggtggcccttggctggcatctgggaacttgcatttcagggaatttcttctattctgataactggtaagagtggctcactatgtctagactgcatgcccaaatgctatcatttatgctttttttccc

SEQ ID NO: 97101 - DNA, 174 bp, Homo sapiens
gggtgtctagaggatcccaggtgttgtgggcagcccgagcacttacccatgtcagagaactggcccatgtctcctgcgcacttgccaggtctcagagctcttcccagggatctttttccacaggtcacccctccttcttctggcattcaaggctcctcagcctgtgcttgcctt

SEQ ID NO: 97102 - DNA, 829 bp, Homo sapiens
tgaggacctagtgcttcattcttaaagtcagtgagatcaagaacccaccaattctggacacacctggactatgttctcacgactccatcggtgttgcctccggtgtgaagaggtgatgcctggagtcccgcaaacccctcccacgtgactcccgtgttgcagctgcccacgccccctcagaggcagtgtatgctttcctagccatgggtggctgaaaccttaccagtctccagcttagatgtcctttctcctcctgccgtgcagggttccctgtggtggggatgggatcaagcattcttggctcttccttgccactttgctggcataatggagaattttttctgccttagggaaatgacttgaaagttactcagttggagtcacgtgtgactaaacacagatttggtttatcccagaaatagatgaagttctcagagaggaggattgttttcaatcttatggatcgtggggatttctaaagatttccctgtgttcagacttgcaactctcctagggtctcatcaccatcgtggacagatacagaacatcgggcagcttatggagtggggctgtcccccaggccacatgccggttcctcagaggttgctgggtaggattctgctgctttaacaaacttgcctggctaacaccactggctcacccttgaatgccttcctgggtgaagccatgaaccctccagggttaagccccaattttggggctcacctgccctgcatcagattgatggttaacttgtaaagaaactggcagctttccagagtgctaggaaaaaggaaaattatcattaaacaaaatcattgtcatagtt

SEQ ID NO: 97103 - DNA, 907 bp, Homo sapiens
gctgtaaaaggtcatttaaggtgctgtgatagcattccacccagggacccaggcaagtcccccggataaataggggctgagggaaggcgttcctgaggaatgatgtttgctcaaagacctataatgaccccattaattgaatatttggaagacagagggagggcaggccctgggctatcctgtaacagtatgtgggctacagcctgcaagccaattggtacacttggtaaaaagaattgtttctaaatttagaggaagtgttgaagcttctgggaagcaggtggtgacaatgacattcaaagaaaaaaattgttttgttttgttttttgagatggagtctcactcttgttactcaggctggagtgcagtggcacagtctcagctcactgcagcctctgccgcccaggctcgagcgattctcctgcctcagcttcccaagtaggggactacaggcgcctgccaccatgattggctaatttttatatttttggtagaggtggggtttcagcctagccaacatagcgaaaccccatctctactatataagaataaactggccaccgcacctggcctgaagccatagttcttaacctcagttgtgcaatagaattatctggggaatttaaaaattagaaaaaacccatgccctgaagattgtgatctaactggtcttgcgtagcgcctgggcaatggtattttttaaattgtttcccaactgatactaatggtggccattctgcaaagccacagtggaaagggcttattcaagcatcctgttgcgtgaatgcatgtcgttctttaccacatgactctggaggtttctggtattctggatgtggctgcccggttgaaggccggcccttagagtggagattatcccttgagaaagtggctggatatgtcccag

SEQ ID NO: 97104 - DNA, 434 bp, Homo sapiens
caagtggatatgtggagccttttgcggcctaaggtggaaaaggaaatatcttcacataaaaactacacagaagcattctgacaaactaccttgtgatgtgtgcattcatctgacagagttgaacctttattttgattgagcagttttgaaacactcttttgtagaatctgcaagtggatctttggagagctttgaggcctattgtaaaaaagaaaatatcttcacataaaaactacacagaaggagtctgagatactttttgcaacgtgtgcgttcatttcacctttcttttgactatgcagtttggaaatactcttttagtgtgatctgcaagtggctatttgcagtgctaggaggcatattgaggaaaaggaaatatcttcccataaaaaatacacagaagcattctgagaaacttatttgtgatgtgtgca

SEQ ID NO: 97105 - DNA, 300 bp, Homo sapiens
gagggttaagtaagataatggaggtgaaggccctggcacagggcctggaacataatgggagctcagtaggggaggtagtcattattattactatgggagcggtactgaccttgagggatcaaccacagcggctgtgatttaaaggtgccatttgttgtccaaagtgtaggcacggtatgtgttttagcacacacctgccacgtgctgcatatgcaataattatggtctaatattaccattgtgttgatgtgcatggccatgcaatggcaaagatccagaggttaacaatgccttgcattc

SEQ ID NO: 97106 - DNA, 452 bp, Homo sapiens
gaaagtaggaaacccaactaggcagtcagaaacacaagctggagctcaggaaagaggactgagtaagagacataaatgcaaagttgttggcatagaaggggaattcaaagctatataactggatgaactgattgaagggagtgagtttggtgtcctgaaaggcaagagaagtccacttgaagaggcagtagtattcaatggtgtccagtactgctgagaggtcaagtaaggaccaagaattgttgactgtatttagcagtgtggaagtcattgttttccttggcaagatcagttttactgatgctttgggagtaaaaccctgattcaattaagtttaagatgggggtgggggatgaattggagacaatgagtagagacaattattttgagatccattcatagtagaagcaggcaggaaggtggagtatatgggtacgaattcataggcagtt

SEQ ID NO: 97107 - DNA, 519 bp, Homo sapiens
cctcaggtgatccacccacctcaagcctcccaaagtgctgggattataggcatgagccaccatgtccggcaagtttctttttacttaatttgtatttatttatttatttgagaccgggtcttgccctgttgccctggctagagtgtagtggcgtgatcatgggtcactgcagcctgaacctcctgggctcaagcaatcctcccaccttagcttcctgagtagctgggactacgggctgtcactactacacctggctaaatgttgtatttttagtagagacagggtttcatcatgttggccaggctggtctcgaactcctggcctcaagtgatatgcttgtcaaagtgctgggattacaggtgtgagccactaggcccagcctcagtttcttttatggactcacttacctctgcagattggctcaaatgtcattattctcaggcttctctcctgtttacaggtgtcctgggccatccagtccagtctcatgatatttgccacccaatgtgctcatgtttc

SEQ ID NO: 97108 - DNA, 412 bp, Homo sapiens
ttagtagagacaggttttcaccatgtggtccaggctggtcttaaactcttgacctcaagaaattcacttgcctcagcctcccaaagtgctaagattacaggcatgagccatcacaccccacctctgttagcttttgtacttccagagttctagtcatgaaactgaatcaagtcctagatttctcacaacttatctggagactccatgaatcctctcttatgcttctagtccctggaattagaccaaactcttggggctctgagactctgactcttccctttccctatgctctgtatttctcctgagatgggcgcttgaacaaggaacaatttcataggaagcagcaagtatgggcatggattggccactgagagtgagagatagttaggctgttcagcccgaattgtacaca

SEQ ID NO: 97109 - DNA, 282 bp, Homo sapiens
tctagcaggatcctccccagctactcaggaggcagcccttatttgttagtctctgggtcagtgggctgctgaatacaatgaccagctggagccaaagaggacacatggcctgtgatggagtccaagtggggtagaatttcatgtccgtggttaaggtttccactcgcacataacaattcggtcaagaaggttttttttgttgttttttggttttggggtttttggggttttgtttttgtttttatttttgttttgagacagagtctcgctctgtcgcccagg

SEQ ID NO: 97110 - DNA, 515 bp, Homo sapiens
aggcagtcaggtcagttggatataggaatctgattctgcgagacagaggagcaggtcagcaatagagatatacacatgtacacataaagaaatataagtgagtgtgtgtgtgtcaattatctgcatatacttgatatttaaaaccatgaaacagtattgggagaagaaatgaggattaactgagctttgaggtgtagaaaggtttagcaaatcaggatgtcgaggaaacctcaaagagacagaaggaggtgacaacgaggaaggaagataatcaagagagtataatgtccgggaatctaaatgaacactgaataaaatgtaaagcctttcctgcatattcatttattcattcaaaaaatatcacctgacacttactatgtgtcagtccctgtggaaacaaacatggtccctgctcttatagggactgcaatccaagggggatatagataaacttgtaactggtattcctgaaagtgcagggtgttttgagagaatacactaggggcaactgaaag

SEQ ID NO: 97111 - DNA, 194 bp, Homo sapiens
gagaaagagacagaagggaaactaactcatccttggttatagttaagatataaccataagacaaggaacctaaaatcctcacttcttcatttatgttcactgagccctgtaattgacttcagatttgctgcttatctgacatctaaatgtctagtgctattaagagggtttttttttttgcaaagataacattt

SEQ ID NO: 97112 - DNA, 676 bp, Homo sapiens
agcggggtgtgagtaccagcagaagccgcctggacagcaaccggaagtgcggtggctctggtgggcgtggtggctgagtaccagcagaagccgcgtggacagcaaccggaagtgccgtggctctggactctgggctgtcgtagccaaacacgccttcttggccgagtggtggcattctgcctgccccctgtgggcatcattgagattctgctccccagcttccgcagtgctccgttttgtgatggaaagtcagcatcccttgccttaggagaaacccaggtatctggtgatggaagaacttttgagggaagcttgagactggccagtccacactctgcttaaccaagggaagggcaccacttctaccaccaggagatacctgctgtgggacacagtgctgctccagccatgcagaagctcacacaggcctgcagcagttattcatccgtgcacagctgccactggccagcagagcctgtgatggggccttcacaggtaattcccaagatcaaaacagcctcttgtacttaaaataattgctttgccaccatttccaaggtgctgcagagtgcttctgaattctgttcatttcaaagaacccacttcctctatttgaaaaacgggtattttaatgtctgccaggccacaattccatgaggcatgatggtgtgcagaa

SEQ ID NO: 97113 - DNA, 305 bp, Homo sapiens
atgacccaggggtgtcctcctgaggccctgcctggcagcatctcccacacagtaggtggctgacatggggagggcggatgggggagctgctggctcacagagcccctagcagtgtctgcaggaggtaaacaacaggaggatcgacagaaaccaacgcccaacccagccaggatgaatgcaaggcagagaccaggctcacctcctgaagcggccaacacgagttgccagggagaaacagcggggtcacggggccgcagcttggaccgtgccggcccgctctgtgggcacacctgcgatcccccacc

SEQ ID NO: 97114 - DNA, 386 bp, Homo sapiens
ggaagaattgtcagggcctggcacccatgagctgggatggcacacttgagaaagaaggaagttctgtagcttggactgtagtaatggaaacaaaggatgacagagagaatgacaagaaggcagacatccaaaggaataagcaaaggggagggtgtagttacataatgttgaggccagggtgtggtgagtgtgtgacatctatggccttgagcttctgatgtccgtgtgtatatgttaacatggtttggatgaaaataaatgtaaaggaaaggagtgattgatgaatatcccacaccccaggatttgatatgagattaatggaacatgcatggcagaagtgcaaactttctctcttggtattctccccacctgccctcattcttcta

SEQ ID NO: 97115 - DNA, 498 bp, Homo sapiens
gggtgttgcttgaccactgtagtttttctacgtagtgccaccttatttattataaaacatttgttaacgtttttagggttccagaatcctttgggaatctgatgaaagttgtaagcttttcccccacatagctaatatgtactcatctataataatggactttaggttaagaactcgagccctaaagaggttttcattccttccctaaattttaattgttactttattaacaaagaaaatactatattttacttttcgaactacattaaactcttggacaccaaagcctccaaggaaaagagaaataaaattaattccagtcttttttttttttcaaactaaattttcaactgcatttaaaaagtgaatcaaatgggccgggtgcggtggctcacgcctgtaatcccagcactttgggaggccgaggcggacagatcacgaagtcaggagatcgagaccatcctggctaacatggtgaaaccccgtctctactaaaaa

SEQ ID NO: 97116 - DNA, 566 bp, Homo sapiens
aaatgaagggacgcggctgctgggacacggcctccgtgcgctccttctgcagctccggctgcctgaataaatttaagaagggttagtgcttgccgggcttccacccggagggaggccaggctccccgcgcatgcacgcccggtgcctggctttgctgcgtgatcgatccacgggagcctctgatgtcactccctcgcggcgtggggagcgcggggagcctcggggaacccctgtccccgcaccccgccggcgtgcgctcccggcttgcttcacgcgcggggcattttggagagggggctgcggctagagacttgtccgtctaattaacctatgcaaaaagaaaatgaaatataatctatatctttatgaaaagaagggggaagcggtggtcggtgttttatccacccatctacctcttcttccccagagtcggcctggggtccgcatgcccctggagcccctgtagagtcgctgatttgcccacaagggcctcgtcctggggccaccagtggtgtcggctttgctcagtgtgtgattctccgagtggccgcctgggtttgagcaac

SEQ ID NO: 97117 - DNA, 384 bp, Homo sapiens
cagtgaaatacagtaaatcacccttatgctattaatgaaaataaatgaccgccagcccacatcaatcaagtgatatttccaaggttattaatttacatattatttgaagtccactagacaccatgactacaggtggtgattctagaaccagtgactgaaactaagtagaaatttaaatgcatgctcaggttcctaattaaaatctacatgagaaaatacatcatatgtctcaaaacacagatataaaaatagtcatttgaaacagatcttataagttgttgattgcctgtggattactgttactattgtagtttttaaaatttattttacttaaattttaaagaattctcttgagagaaagcacaaaaatcaggtagttgtttt

SEQ ID NO: 97118 - DNA, 427 bp, Homo sapiens
ctttagtgtgtggcttattcttcttatgtgtaaaatttctactacagtttataaattttattgtacatagttgccacggagccccaaaatgcatataaattaaaagccatctgctgttgtcctcttctctacagaactttcaacttttccttaccttcttgtagacatattcctccatattgatggttagctggtatttaaggaatccctaataacagttttgggttgttgatttacatacataatggaccttgcaacctctgtgtatacgtaatagttctctgggactgcatattttaacatgagattcctgaatcctactcctagaaattcttatgtctgggatggggcccaggaacttggttcaccaatcatacctaacatctttaatgagagaaataatcatatcttaagttgattttcttta

SEQ ID NO: 97119 - DNA, 403 bp, Homo sapiens
attgttattgtttacttttcctcaaaggtagccaaacagagttccctaggtcaaattttatttatagtcaacatatctcttcctctctcttcaacaacaaaagcaaaactgtggagcgtgtgatgcttttgttaaaaaaaaaaaaaagataggaagctatatgcactatatgtagaaatctatttcacagagggaaaaaagaaaaaagagtattattttacaaagcttggtggagaaccatgtggttagttaaaattatgaggcataaagcaggcaagatccagaatttagccttctggcatcattcaattagaatggaagtctgcactgatcatgatgttaaaattcaatgtaaaattcttcaaaaagaactgtctaagtacttttttggaggtttctccct

SEQ ID NO: 97120 - DNA, 378 bp, Homo sapiens
tgttgttggttgtttgcttgtttataagttacccagtctggtagtcttttatagcagcacaaaatgaagtaatatatacagcttttattgtgttgatgtaacttccttctattcttagtttgttgggggttttttaaattatgaaaatgtgttgaatttgtcaaatgctttttctgcataaattgagatgatcatgtgggttttgtatcattaattttattaatgacatttattgcattgatcaatttttgttgaaccatctttggattccaggaataaattccaatttgtcttgatgcataatcattttaatatgctgctgaattccatttgctagtattttgttgaggatttatacatcagtgttcataaggaata

SEQ ID NO: 97121 - DNA, 264 bp, Homo sapiens
tctcatatagtcaccccctctcccactagtgccgaagaggctatctgggaagctcatcatccagctcaggaagagatgaaaccaggaggcaggagaatgtcaggcatgaccccacacttgtgcaacagccacgtcctgctcctgccattagcatggctcatccgaggcccagccccaggatccatacaaagtgtgttcctgctgctggcttctcatctgctctgcttcctaagggacgtatctgttgctgcgtctgaacccacg

SEQ ID NO: 97122 - DNA, 750 bp, Homo sapiens
aaatggggaagttgtccccaccagctcttcagtttctgttctgcactatgtgggcctgggcagtcttaactggttccaattttagcaagttccattaatactgctcaaaggatttacatatcttctgttttacagtactggatagggggaacatttcccagtcagataaaatgtctcttcccataatgcagtcaggtaaaagagataaaaccatttcacatgaagtatgttcaaatatggcagctttcataatcctaacaaccgttacacttttatgttctagtcccaggaatttccccttttcatccccagatcattttaccctttcttctgcaaaaggctttgggtccccagcctggagtcccaccaggagaccctggcctctctcttaattgttaccttgattaaccagtctaacagggtaattatagatggggtttctcattttaatctttatcttcttgtctttaaaagttctccaaactgggggaaatgcagcaaactggtttgggcccttaaatgttgagagatcagccaggggtccctttcctccactcagtctttaataatgttgtattaagacttttgttttaaccccatcaatttctactttattcattccattttttaataaccacctaaatatgtccaccctcctggggtgagtcccatggctctcccctttctttttcctcttactttcattcctatgaatgttttctgtattcatcttatttcttacaaaccatt

SEQ ID NO: 97123 - DNA, 766 bp, Homo sapiens
aggctgcgctgtgggacttccaggagtccgagtcccatgctctgcctctgaggctggtggctggggtaaagctgggcagggctgagccaggcagggctgtactcaggctccccaatggtaggtacaagcaacggccataacatggatcagaaggcagtgctcaggccactggggcaatgcttcaaggaggagcataacaacttattttgtgccaaagagtcagcatgggaaaagagaagcagtttgtgttccacaacctagcagatggtagtgacacctgcctcactcccacacccttgacccagcaaggctccctcccataacccactcctggcagcaagctgaaacagtaagtcaagacacaagcaatctgtcttcagattacaaaactgtcctatgccacaaaactccctgccagggacaaaaacttggactcccaggccacacccctccgactccagtcctgcatcctgcagtgggactgcccaacgcttatgcccgtgtttcaaacccatgctacactcatctctcagatctggccatggggctcttcctcctcttaagactagattgcaaatctcattcttgagattctctaaaccgatgactaatgcttgttctggatgacagatttccgcacagccccctatgagttaagatcaggaatgatctcctattagcatcaaggtctgggagcatgtgcaaagtacttcctgctgcctcttctcacagtctcttcactgatcccagaattgtatcagttgga

SEQ ID NO: 97124 - DNA, 231 bp, Homo sapiens
catgaacaaaggaattagggcaacatttaaaagctggttaaggcaagaaaatggattctccctctagagattccagaatgaaacagccctgctgacatcttgatttttgcctagtgggactcgttttagttttctcatccccagaacagtaacataataaatttgttttcctttaagccaccaaattatggtaatttgttatgacagtcatagaaaaataataacaccacc

SEQ ID NO: 97125 - DNA, 413 bp, Homo sapiens
tcaaataccttctacatagcccttacatcacagagggcctggaagaagtgttctccagtggagggctacttttcccccacagcatatggcaaaaagggggttaagccagagactcatgaagactctggttggagggcccagaatgaacccattatccctgggcataagccctgagagggagaaaaccccaacagcagtcacgagaaaaatgacgattttggcaaccgttccccaagttcttacctccccaagaggaacagtggacaatgatgcggacacaatagtaaagaagacaggacaccagcagcgcccagcaggagaggggctgaccttccaaattcactgctgctccgagttaaggagccctggaccgggggctactgaacacttaaaaaacaactcttttgaccagg

SEQ ID NO: 97126 - DNA, 312 bp, Homo sapiens
atatgtttctggtttctcttcaagtcatataaatctttcaccttttactattttagactttttctatccccattctatttcattcaagtgtattggatcatattgatgacagacaaatctcagtgtggtcaaactactgaataccaatcaatatcatatggaaaatttgttacactttaagagtttcgtgtcacaaacatacatcttaattttcccattaattattctaaaacttttcatatttatatatgcttgtgtacctttgacttgttctgaatcctaaaatggtatattaaagtcctgtatcatatg

SEQ ID NO: 97127 - DNA, 595 bp, Homo sapiens
atggtggtgcgtgcctgtggtcctagctacgcgagaggctgaggaaggaggatcacttgagccagggaggtggaggtttcactgaaccatattcacgccactccactgcagcctgggcaacagagctagaccttgtctcaaaaaattaagttagttaaattaaacataaagttgcattgtatctaagaaattgggaaagcaggaaatgcttctgtttttcttttgagttgaacaatgagaacacatggacacagggaggggaacatcacataccggggcctgtcaggggggtgggaggctgggggagtgatagcattaggagaaatacctaatgtagatgatgggttgatgggtgcagtaaaccaccatggcatgtgtatacctatgtaacaaacctccacgttctgtacatgtatctcagaacttaaaatgtaataataacaataataaaaacgacaaaaaaaggaaatgcttcttgttagaacagattacataacctcattgctttttataatagcctataataacagaatatccacaaggtggcagtaatatatcagtttcatcctctgaaattaaaacttttgcctattca

SEQ ID NO: 97128 - DNA, 275 bp, Homo sapiens
tggatgagatgctgctcttttgttattcagacaaactgattgacgtgagtcttgtgctgtgaaatactgaagagctttccgagaattcacacaagagatttctggagcctgtcacatcctccctacctgtcctcatctcagctctctagaactccttgtagcctaatcagtaatgtcatcaaacctcaacaaaccattactctggtatttcctgttacaccatatcttagtttgctagggctaccataacaaaataccaaagactgggaaacttt

SEQ ID NO: 97129 - DNA, 214 bp, Homo sapiens
ggtccacttgaatctaagcctgagctcccatcctgccatgctggtgagaaattctaccttagttatcattgagcatttcctctccatccagggttgtacaaagtttctagggcttgaattattatagaagtacctggaattatctcaaattacttggtcatctctccacattgatttggtgctgggattcccttttgtgccatcttcacttcag

SEQ ID NO: 97130 - DNA, 735 bp, Homo sapiens
cctaaacacacaaacaccctcatcccttccctgctttaggttcctcctagcacctgtcactgttttaatgtagccatttttgaaaaacgtattcttatttattgtctgtctctacatcccctaactagattatatactccatgagggctagaattgttttctccaatgctgaattccagtgctaatagcatctggcaaataataggcacaaacaaatatttcttgaatagattatcgaacctactttccagcttttctatgtctttggaaaagcctgctcacagtaagatagagaagtgactcctttagagagtggaaattaggaagataagaactaatatgccaatttacatgatttcttaaccaattaacactagcttcatgtaatgtgctgtttttcaaatgtttctttaaagaattcttaggccaaaggggaaataaagcatttcaactagagaatatattaaaatacaatgactcaagaactgaagaaagtggaaaataaaataagtaaaggtgaagaaagcatttaagtaataaaaataaaaatataagtagaagtgaatcatacaaacaggaaagatagaattcataaacctatgtggcagttgcttaataaaactaatgatgccatgatggcaaatttaaataaagtgaaataacctcagatgtggatgaagttaaaatgactagactttgcataaatttatggtaaaagaattgaaattctagatg

SEQ ID NO: 97131 - DNA, 556 bp, Homo sapiens
ccaggatggtctcgatctcctgacctcaggtgatctgcccgcctcggcctcccaaagtgctgggattgcacgtggcctcaaccatattactgtgtattagttcagaaagtgctttcattagattcatttgatttaacaatcaaatcttgaattccttcaactaaaccaggattctaattaaaattgcagcttgcagggaatgcaactgtcagatttaaaccattctaatatcccattttagaactaaagactgtctcctatgcagataatggggctatgacaacacaggacgacacagacaacaggataagacagtgacaacaagggctatatctttttaagcattcccagcttctagtacaaggaatggtcttaataaacatctgttgactagatggagatacaaagtcttggctgacccccaacaccagtctccttacttcaactgttccctatttgctctgacgtacactacctagtgtctctcccacaatccagccctgttggcatggggtgagaattttcactggtatcttcttgacaggcagaatctttt

SEQ ID NO: 97132 - DNA, 181 bp, Homo sapiens
ccccttggccgagaggagggttcattcagtcttttgggggacttagaatattacttttggtctacaccagggaggacatggaagcttcctggctgttttctatacattgccctgtgcatgtcttccatctggctattctagagttctttccttttataataaaccagcaatctagtaagta

SEQ ID NO: 97133 - DNA, 387 bp, Homo sapiens
gtggtgggcgcctgtaatcccagctactcgggaggctgaggcaggagaatcgcttgaatccaggaggcggaggttgcagtgagcgagatggcgccattgcactccagcctgggcgacagtgcgagactctgtctcaaaaaagaaaaagttaatgagcaaaatattaatgatgaaggtagtaaagcaaatcagcttaaccatgactgtcacattattatttctaattggtttattattttgttctccctgcctgccctccaaagctcccttgtgtatttttgtcagcagtcaacctgggaggtagcagctgtttgggttttaggcttagaagtaggagggaattttccccctgtgggtgtggttggtttggtttttattttctttttc

SEQ ID NO: 97134 - DNA, 632 bp, Homo sapiens
aaccaggcctagggggtgggggtgtgcctggatgtgtgttgcgggggtctgaacccttagttaggaccgggggccctcctttccacttcgtgcagtccctggggtctggggcatcctagccatgcgtggggcctccctgctgggattggagaccccctgacagctggggctggtcccagcattttcgctcttcccccagaaggactcagatgcagggtcttctctgctccccgtcacacagagggtggcacccccgatgggaactctcatttatcaccaaaccagaagataatggagaaactgacagagaagggctgcaagcagctaccgcagggcggtgtgtggatgcagatgggatgggcagatggaggcgggggccagcatcgctgccttcttgcccctcccagaggaccccaggtccccagctcgggcgccccaccagactgctttcattaaggttttctatagataagatcatgtcaagacaccctcagaccacagggcggcgccaccagcccggccgagtgcagctggagcgccgacgtccccgaggatacacagtgctgaggcagaacgcagaagtcaatgacaggattctatttgcaaagctgtattatgaagctaaaggaatc

SEQ ID NO: 97135 - DNA, 1354 bp, Homo sapiens
taaaaaaacggcagcgtaatacaatatttggacacgctatactatgggctttgaagaacgcctgtccagaacacccaacaagctccattatgtcaaacgctcccgcgcctctgtgatgtcaccacgacgcgctgggcgctctgcgacttggcagacgtcgtgcgtcattaccaacgaggcgcaggggtcaggacgactctcggcagcgccattgcgcgccctctagtggcagccggttttgaggccggcctccggctttgaagttcctcaccgcgtctccttccctctccccaaagcctggatcaccgcccagcgtcaggcgaggggcgacgtctcgaggtaaaacggaggaggtgcgggacgcggagactgcgcgggcccggtagccctggagaggccgaggctctaggccgcgaggggcgggtgcaatggcggaggaacaggtgaaccgcagcgccggcctggcccccgactgtgaggcctcggcgactgcagaaactacggtttcctcagtggggacctgtgaagccgctgccaagtcaccagagcccaaggactacgacagcacctgcgtgttctgccggatcgcggggcggcaggacccgggcaccgaactcctgcactgcgagaatgaggacctaatttgcttcaaagatatcaaaccagcagcaactcatcattatcttgtggtgccaaagaagcatattggaaactgcagaactctaaggaaagatcaagtagaactggttgagaacatggtaactgttggaaaaaccattcttgaaagaaataatttcactgacttcacgaatgtgaggatgggttttcatatgccaccattctgttccatttcccacttgcaccttcatgttctggcaccagtggatcagcttggcttcttatccaagttggtttatagagtcaattcctattggtttatcacagctgatcacttgattgaaaaactaagaacatgaaaatgtcaagagtggaagatttttctaatcttggttcagcatgaagtggtatttaggtcccttttaagtctaattgcaattttaagatttgttgggttttatgagaggctgttacttagtggccttaaatcttttctgaatgtctgtttcctaagatctgtgatacagttatgtgaatattttgttactgacttgtttcaatggttacttgtataaggattttatatatatgatactatagataaaatcctatttaagacaaattctgttaatcaacaagggctctgtatttttttaagttaaaatattttcatttctcagtaagtagtcagttataatagtgatttatttatgaagaataaactactatagaaagt

SEQ ID NO: 97136 - DNA, 3899 bp, Homo sapiens
taaaaaaacggcagcgtaatacaatatttggacacgctatactatgggctttgaagaacgcctgtccagaacacccaacaagctccattatgtcaaacgctcccgcgcctctgtgatgtcaccacgacgcgctgggcgctctgcgacttggcagacgtcgtgcgtcattaccaacgaggcgcaggggtcaggacgactctcggcagcgccattgcgcgccctctagtggcagccggttttgaggccggcctccggctttgaagttcctcaccgcgtctccttccctctccccaaagcctggatcaccgcccagcgtcaggcgaggggcgacgtctcgaggtaaaacggaggaggtgcgggacgcggagactgcgcgggcccggtagccctggagaggccgaggctctaggccgcgaggggcgggtgcaatggcggaggaacaggtgaaccgcagcgccggcctggcccccgactgtgaggcctcggcgactgcagaaactacggtttcctcagtggggacctgtgaagccgctgccaagtcaccagagcccaaggactacgacagcacctgcgtgttctgccggatcgcggggcggcaggacccgggcaccgaactcctgcactgcgagaatgaggacctaatttgcttcaaagatatcaaaccagcagcaactcatcattatcttgtggtgccaaagaagcatattggaaactgcagaactctaaggaaagatcaagtagaactggttgagaacatggtaactgttggaaaaaccattcttgaaagaaataatttcactgacttcacgaatgtgaggatgggttttcatatgccaccattctgttccatttcccacttgcaccttcatgttctggcaccagtggatcagcttggcttcttatccaagttggtttatagagtcaattcctattggtttatcacagctgatcacttgattgaaaaactaagaacatgaaaatgtcaagagtggaagatttttctaatcttggttcagcatgaagtggtatttaggtcccttttaagtctaattgcaattttaagatttgttgggttttatgagaggctgttacttagtggccttaaatcttttctgaatgtctgtttcctaagatctgtgatacagttatgtgaatattttgttactgacttgtttcaatggttacttgtataaggattttatatatatgatactatagataaaatcctatttaagacaaattctgttaatcaacaagggctctgtatttttttaagttaaaatattttcatttctcagtaagtagtcagttataatagtgatttatttatgaagaataaactactatagaaagtactttgtgggaacctttattactgtgaaggagaaaaatagctatttcttgacagttctatagttttacacataaattttcaaaataaagaataccatactacacaatgatctctgattttgctgagggaaggaattatatatgtgccactttttcctcaaatttcagatgccagttttcactttttgaagcattgcatctttttaataaatctatcctgaaagctatataatatatataatttatatcaatgaatttacaataactatcaaattggctatcagaattcactgtaatggaattttgcctctaataacataaagggggaagaaacataaagtggttctcttaataaaactagcagaaaatgttgctttatggcatgtttttgtatcaaagagaaatcagaggttaaactttgcttttatcatgaaaagggcctgatttgaaggtagagataggcttagatgagaaaaattgataacgcaatgttaatactattgatatttcataggtatattttgttagaaattggttttttggtgctaatctataggcacaatagtgaatatgaatgaagagtaggtgctgcaagttaatcctacattgtgccagtgtatattagtaccatgtaaatgaatatgaataaatgaacatgaggattaacgaactgttgaaaataggctgagatactagttttctttcttttttagagggggcatgatattaaagatagttttaagtaacaaattacttattacaaagttacaacatgtggaatcaatactgttttatttgttcattaatttattcattcagcaaacatttgttgaacatttaatgtgtaccagatattgccaggatcaggaaataaagaactaaaaatggacattcagactgcaattgctagtacaggggtcaaacaaaatcagtgattagaatttagtgcgttaagttccctgatgccttcacagccagaagaggctgtgaagggataaacacttctgagagtgggtggtagtagaactgagtattcaagactgaatgttaggcaggtagacagtgactggttaagctgagaaacttacaagtattttcgttgagttctgcttccactattatttactttacaatggatatgaagttcagatttcatcttatttactgaaggtggagaaaggatgtggaagtaggggttatgggctctcaaaagtagatttagagagatttttttatcactgttttatgatatagttcactgagcacttacatagattaacagttacaagtttccataaatcagttagaatatgactagcttcagggaaggaattttcaacaactgcaatctttgattgttttactgtgggaacttgcagtgatataattgacaacattatttaacaataataggtaaagtaggccgggtgtggtggctcacgcctgtaatcctagcactttgggaggccgaggtgggtggatcacaaggtcaggagttcgagaccagcctggccaatatggtgaaaccccgtctcttctaaaaaaatacaaaaattagccgggtatggtggcgcatgcctgtagtcccagctactggggaggctgaggcaagagaattgcttgaactcgggaggcggaggtcgcagtgagccgagatcgtgccactgcactccagcctgggtgacagagtgagactttgtctcaaagaaaaaaaaacaataataggtaaagtatttaaggaattctcagatgccttatggacctcttcaagaatgtggttagccaattgattcaacttttataggtttatatgctctcatgtaaacctatttgtttccgagatcagacgagatcgggcgcgttcagggtggtatggccgtagacaacctatttgttaaaaacccttggaaacacatcttttagtagaggttcttatttacttataaagattaataatcaaattactacaattaatatccatttagccttttcagtagtctaaatatttggtaactccctagccatctataacactagttcaaaacaaggctaattcataacctgtcttaaaaatgtttgaagtggtatcaagagcattgtttatgcatgttgtgatactatttgtggaactgtttaatgagctatttcaaactgctagaagaaaatgaaataaaaatggaaaaatactgtcaaaaaaaaaaatataaaattcaaatcaatgtcaattggtaaacttatatgcctgttattagctcctgtatagtttagatataccagcgattttcataatattgttatgctacatgtactatcttttatttcctatatttattatgtttacgtgcctttaaattaatcttgattttctttgtactctatatacatgcttcatgtcaatacctacgttatcatctatctcactctcttatgctcactcctgctatcattgttttattctctatattaattttcttcacttttatgtatctcatccttatctatcataatcttctactttcattttgtacaatatcgaccttcatccc

SEQ ID NO: 97137 - DNA, 3547 bp, Homo sapiens
taaaaaaacggcagcgtaatacaatatttggacacgctatactatgggctttgaagaacgcctgtccagaacacccaacaagctccattatgtcaaacgctcccgcgcctctgtgatgtcaccacgacgcgctgggcgctctgcgacttggcagacgtcgtgcgtcattaccaacgaggcgcaggggtcaggacgactctcggcagcgccattgcgcgccctctagtggcagccggttttgaggccggcctccggctttgaagttcctcaccgcgtctccttccctctccccaaagcctggatcaccgcccagcgtcaggcgaggggcgacgtctcgaggtaaaacggaggaggtgcgggacgcggagactgcgcgggcccggtagccctggagaggccgaggctctaggccgcgaggggcgggtgcaatggcggaggaacaggtgaaccgcagcgccggcctggcccccgactgtgaggcctcggcgactgcagaaactacggtttcctcagtggggacctgtgaagccgctgccaagtcaccagagcccaaggactacgacagcacctgcgtgttctgccggatcgcggggcggcaggacccgggcaccgaactcctgcactgcgagaatgaggacctaatttgcttcaaagatatcaaaccagcagcaactcatcattatcttgtggtgccaaagaagcatattggaaactgcagaactctaaggaaagatcaagtagaactggttgagaacatggtaactgttggaaaaaccattcttgaaagaaataatttcactgacttcacgaatgtgaggatgggttttcatatgccaccattctgttccatttcccacttgcaccttcatgttctggcaccagtggatcagcttggcttcttatccaagttggtttatagagtcaattcctattggtttatcacagctgatcacttgattgaaaaactaagaacatgaaaatgtcaagagtggaagatttttctaatcttggttcagcatgaagtggtatttaggtcccttttaagtctaattgcaattttaagatttgttgggttttatgagaggctgttacttagtggccttaaatcttttctgaatgtctgtttcctaagatctgtgatacagttatgtgaatattttgttactgacttgtttcaatggttacttgtataaggattttatatatatgatactatagataaaatcctatttaagacaaattctgttaatcaacaagggctctgtatttttttaagttaaaatattttcatttctcagtaagtagtcagttataatagtgatttatttatgaagaataaactactatagaaagtactttgtgggaacctttattactgtgaaggagaaaaatagctatttcttgacagttctatagttttacacataaattttcaaaataaagaataccatactacacaatgatctctgattttgctgagggaaggaattatatatgtgccactttttcctcaaatttcagatgccagttttcactttttgaagcattgcatctttttaataaatctatcctgaaagctatataatatatataatttatatcaatgaatttacaataactatcaaattggctatcagaattcactgtaatggaattttgcctctaataacataaagggggaagaaacataaagtggttctcttaataaaactagcagaaaatgttgctttatggcatgtttttgtatcaaagagaaatcagaggttaaactttgcttttatcatgaaaagggcctgatttgaaggtagagataggcttagatgagaaaaattgataacgcaatgttaatactattgatatttcataggtatattttgttagaaattggttttttggtgctaatctataggcacaatagtgaatatgaatgaagagtaggtgctgcaagttaatcctacattgtgccagtgtatattagtaccatgtaaatgaatatgaataaatgaacatgaggattaacgaactgttgaaaataggctgagatactagttttctttcttttttagagggggcatgatattaaagatagttttaagtaacaaattacttattacaaagttacaacatgtggaatcaatactgttttatttgttcattaatttattcattcagcaaacatttgttgaacatttaatgtgtaccagatattgccaggatcaggaaataaagaactaaaaatggacattcagactgcaattgctagtacaggggtcaaacaaaatcagtgattagaatttagtgcgttaagttccctgatgccttcacagccagaagaggctgtgaagggataaacacttctgagagtgggtggtagtagaactgagtattcaagactgaatgttaggcaggtagacagtgactggttaagctgagaaacttacaagtattttcgttgagttctgcttccactattatttactttacaatggatatgaagttcagatttcatcttatttactgaaggtggagaaaggatgtggaagtaggggttatgggctctcaaaagtagatttagagagatttttttatcactgttttatgatatagttcactgagcacttacatagattaacagttacaagtttccataaatcagttagaatatgactagcttcagggaaggaattttcaacaactgcaatctttgattgttttactgtgggaacttgcagtgatataattgacaacattatttaacaataataggtaaagtaggccgggtgtggtggctcacgcctgtaatcctagcactttgggaggccgaggtgggtggatcacaaggtcaggagttcgagaccagcctggccaatatggtgaaaccccgtctcttctaaaaaaatacaaaaattagccgggtatggtggcgcatgcctgtagtcccagctactggggaggctgaggcaagagaattgcttgaactcgggaggcggaggtcgcagtgagccgagatcgtgccactgcactccagcctgggtgacagagtgagactttgtctcaaagaaaaaaaaacaataataggtaaagtatttaaggaattctcagatgccttatggacctcttcaagaatgtggttagccaattgattcaacttttataggtttatatgctctcatgtaaacctatttgtttccgagatcagacgagatcgggcgcgttcagggtggtatggccgtagacaacctatttgttaaaaacccttggaaacacatcttttagtagaggttcttatttacttataaagattaataatcaaattactacaattaatatccatttagccttttcagtagtctaaatatttggtaactccctagccatctataacactagttcaaaacaaggctaattcataacctgtcttaaaaatgtttgaagtggtatcaagagcattgtttatgcatgttgtgatactatttgtggaactgtttaatgagctatttcaaactgctagaagaaaatgaaataaaaatggaaaaatactgtcaaa

SEQ ID NO: 97138 - DNA, 3257 bp, Homo sapiens
taaaaaaacggcagcgtaatacaatatttggacacgctatactatgggctttgaagaacgcctgtccagaacacccaacaagctccattatgtcaaacgctcccgcgcctctgtgatgtcaccacgacgcgctgggcgctctgcgacttggcagacgtcgtgcgtcattaccaacgaggcgcaggggtcaggacgactctcggcagcgccattgcgcgccctctagtggcagccggttttgaggccggcctccggctttgaagttcctcaccgcgtctccttccctctccccaaagcctggatcaccgcccagcgtcaggcgaggggcgacgtctcgagaatgaggacctaatttgcttcaaagatatcaaaccagcagcaactcatcattatcttgtggtgccaaagaagcatattggaaactgcagaactctaaggaaagatcaagtagaactggttgagaacatggtaactgttggaaaaaccattcttgaaagaaataatttcactgacttcacgaatgtgaggatgggttttcatatgccaccattctgttccatttcccacttgcaccttcatgttctggcaccagtggatcagcttggcttcttatccaagttggtttatagagtcaattcctattggtttatcacagctgatcacttgattgaaaaactaagaacatgaaaatgtcaagagtggaagatttttctaatcttggttcagcatgaagtggtatttaggtcccttttaagtctaattgcaattttaagatttgttgggttttatgagaggctgttacttagtggccttaaatcttttctgaatgtctgtttcctaagatctgtgatacagttatgtgaatattttgttactgacttgtttcaatggttacttgtataaggattttatatatatgatactatagataaaatcctatttaagacaaattctgttaatcaacaagggctctgtatttttttaagttaaaatattttcatttctcagtaagtagtcagttataatagtgatttatttatgaagaataaactactatagaaagtactttgtgggaacctttattactgtgaaggagaaaaatagctatttcttgacagttctatagttttacacataaattttcaaaataaagaataccatactacacaatgatctctgattttgctgagggaaggaattatatatgtgccactttttcctcaaatttcagatgccagttttcactttttgaagcattgcatctttttaataaatctatcctgaaagctatataatatatataatttatatcaatgaatttacaataactatcaaattggctatcagaattcactgtaatggaattttgcctctaataacataaagggggaagaaacataaagtggttctcttaataaaactagcagaaaatgttgctttatggcatgtttttgtatcaaagagaaatcagaggttaaactttgcttttatcatgaaaagggcctgatttgaaggtagagataggcttagatgagaaaaattgataacgcaatgttaatactattgatatttcataggtatattttgttagaaattggttttttggtgctaatctataggcacaatagtgaatatgaatgaagagtaggtgctgcaagttaatcctacattgtgccagtgtatattagtaccatgtaaatgaatatgaataaatgaacatgaggattaacgaactgttgaaaataggctgagatactagttttctttcttttttagagggggcatgatattaaagatagttttaagtaacaaattacttattacaaagttacaacatgtggaatcaatactgttttatttgttcattaatttattcattcagcaaacatttgttgaacatttaatgtgtaccagatattgccaggatcaggaaataaagaactaaaaatggacattcagactgcaattgctagtacaggggtcaaacaaaatcagtgattagaatttagtgcgttaagttccctgatgccttcacagccagaagaggctgtgaagggataaacacttctgagagtgggtggtagtagaactgagtattcaagactgaatgttaggcaggtagacagtgactggttaagctgagaaacttacaagtattttcgttgagttctgcttccactattatttactttacaatggatatgaagttcagatttcatcttatttactgaaggtggagaaaggatgtggaagtaggggttatgggctctcaaaagtagatttagagagatttttttatcactgttttatgatatagttcactgagcacttacatagattaacagttacaagtttccataaatcagttagaatatgactagcttcagggaaggaattttcaacaactgcaatctttgattgttttactgtgggaacttgcagtgatataattgacaacattatttaacaataataggtaaagtaggccgggtgtggtggctcacgcctgtaatcctagcactttgggaggccgaggtgggtggatcacaaggtcaggagttcgagaccagcctggccaatatggtgaaaccccgtctcttctaaaaaaatacaaaaattagccgggtatggtggcgcatgcctgtagtcccagctactggggaggctgaggcaagagaattgcttgaactcgggaggcggaggtcgcagtgagccgagatcgtgccactgcactccagcctgggtgacagagtgagactttgtctcaaagaaaaaaaaacaataataggtaaagtatttaaggaattctcagatgccttatggacctcttcaagaatgtggttagccaattgattcaacttttataggtttatatgctctcatgtaaacctatttgtttccgagatcagacgagatcgggcgcgttcagggtggtatggccgtagacaacctatttgttaaaaacccttggaaacacatcttttagtagaggttcttatttacttataaagattaataatcaaattactacaattaatatccatttagccttttcagtagtctaaatatttggtaactccctagccatctataacactagttcaaaacaaggctaattcataacctgtcttaaaaatgtttgaagtggtatcaagagcattgtttatgcatgttgtgatactatttgtggaactgtttaatgagctatttcaaactgctagaagaaaatgaaataaaaatggaaaaatactgtcaaa

SEQ ID NO: 97139 - DNA, 557 bp, Homo sapiens
tgttcactctgctcccaaccccttggaggtaaccaacttcattgctttctaattaatctttcttgaactccttttgtaaggataagcaggtaaattcatgctttcttgttttcctctttctttcttacagaaaaggcacatactctgtgtattgttttgtactgtgcttttttcagttaacaatatctcctgaaaattctccatataagttcatattgttctttttctttttcatagctgtgcaatactccatatgtgtatgtatcatagtttttttaaatctcttatgcccaacatttggatagcttccaatattttgccatgatagataatgctgcaataaatagcctcttccacacatgtatttccatatgttggagagctatcttcacagtaaatttctagatgtggagttgctggataaatagctaaatgcatatgtacttttattagatattgaaaaactcccctccatagagactgtattatttcttgtgtccctcctgcaatccatttgagggaatgaaatctctactaccttacaagacaatgtattg

SEQ ID NO: 97140 - DNA, 282 bp, Homo sapiens
taagaaataaaatctcagaagacctgagctctcctgtcagcatgacttgcacttgtacttttcctttttgtagagaagctaaattataatcagaaagttgttttggtgagcttggaatcagaaaataggagtttaagtcatctgttcaacatgcagctttcctcagctgtgatagctttttcctgctgtccagtcttcatgtggagcctggtcaatagcaccagaattctaagtctgctggccaaggtgctgcctcctgcagagagagaaagcccatcaaag

SEQ ID NO: 97141 - DNA, 375 bp, Homo sapiens
gagctgggacaccacctggcactgtggtggcagtgggggtgacactcagacaagggccatcgagggcccctggaccagaaagcgaagagggcgttgggggcaggaggcctgtggggccatgtgtgggggccgtctgggtggcgggagctgttggggcggggctgagcgccctcagcagcccactggagaaagcgctgctggggtcctcgtgtggggcccagggcccgacgtggaagcaatggagggctgcagggggtggcagtggggatgaatgagtaaggacagagtgcagcctgggtctcagacagggggtgggggacaggccacagagattccctatctcagcagagaggagacaggctcaggctgccacgc

SEQ ID NO: 97142 - DNA, 466 bp, Homo sapiens
cataaattatattgtggaaaggagagaaaccagccgcttagtttggactgtggttgatgccaatgtgcagactctcagctgcaaggttactaagcttcttgaaggcaatgaatatactttccgtataatggcagtaaacaaatatggtgttggtgaacctcttgaatctgagccagtagttgccaagaatccatttgtagtaccagatgcaccaaaagctccagaagtcacaacagtgaccaaggactcaatgattgttgtatggaaagaccagcatctgatggtggtagtgaaattcttggatatgttcttgagaaacgggataaagaaggcattagatggacaagatgccataagcgtctgattggagagttgcgcctgagagtaactggactcatagaaaatcacgattatgagttcagagtttctgctgagaatgctgctggacttagtgaaccaagccctc

SEQ ID NO: 97143 - DNA, 211 bp, Homo sapiens
ccccaactgttataaatgcaattcaaatggaaaaaagtgtagaacaactgctgtaggcttaggatcccagaggctgggccaatcattgtgtcaacaaatactcagcaagctcccgctgggaggccattcagggtggctgctgagagcaccaactaccaaggatctggcaccagccaagcctgatgtgactgctggctcagccagttgctgt

SEQ ID NO: 97144 - DNA, 354 bp, Homo sapiens
ttctatttgtgaagtgagcccaggcaggagagtcaaatcaggtatttgacaggggcatatgtcaaaatcacaccttcaaaaaaattcagggatgagattaccaatccctcacatgtcctgtttctaggtctgagagtcaacatgtcttgtatgtttggtgaagtacatgagtcaaaatctcaactgtgaactggatctgtgcagcagcttctcaatgttttttgggcattatgccccttagataagtcataaccagccatgtgtgctaaattttggtttgagggtcaccaaatccatgcataacaaatccatgtatgagagtcaacattgcaactcttgactgcctctagatat

SEQ ID NO: 97145 - DNA, 437 bp, Homo sapiens
ggccctgacctgtgtgctttcagcctctgagccgcccctctcctgactgcttacaaagttatatcgatactgaaatctgaacattgaaagttcactaggagaatgccatttccagggatgttactgtgaaccttccgtaaaggaccttatgtaggataatgaattgccttttaatgcaggtaccaaacaggctccctgggataattcattccatataaactttttaaaaaaatgttcccaactagctatcctataattctctttctgctaagagaggtgctccgttctcctttgcgctttagtgatatgccgtgtttgctttgcatgccccttggcttttcagaagaaaactgcgtttgcagatgcacttggagtacaacgttctttttcctatgagtgtatttatggtgaaggctccattggaggagatatgctca

SEQ ID NO: 97146 - DNA, 480 bp, Homo sapiens
cagtgcattaagcagcctggtcaggtactgctgagtcaacctcgttctgggactctccttgcttgtgaatgcaacatgcaggccttgagatgtcattattccgacgttatgataaggcactcacttatgctgctttacaggagaaagaaccagagtttaaaagccatagccaccgatttatattatgctactgtaacactcttgaacagaatctcattttaaaagacagtgcctgcaagagaaaatcttcactggcttaatccatgattatgaatttggtggtcatttgaaaggtgtctcttctttttttttttctgttattttgttttaccatcaatagtttaattttcattagaaatcacagtcttggtactaagtcagcaccaatttatttgtagcacaaagcgcaaaggtgatcttctttttttttgtttgcttgttgtttgtttgttttttttttgagacggagtctcactctgt

SEQ ID NO: 97147 - DNA, 271 bp, Homo sapiens
aatttaattctataatatataagcagatacttttctctagattcacagaataaacacaggaaatatcacacaaatctgatgactgccaagaaagggcatgattttccctaaactgcccctcacatcattgtagcatttggaaaataacctcagagagcccaggcatttgcaaacacaaaattatacaatgaagataccactacaacccccaagggtcatgtgaaactgctaaggaacataagcttacaaactaaaattatgattattgtgg

SEQ ID NO: 97148 - DNA, 298 bp, Homo sapiens
ggcccggcggcctgcggaagctcggcggcctggcctggcctgctcgcggggaggtgcgcagactgcgcgggggcgtggcctgcgcccctgactgcgctgtcggtccggcctttgatgaggtggccgccgctggctccctgggccccagcctggttcccgcgcgggccgcggctgccttccagacgcagggcatgcgacctgttggagtgtgaaattctatgggccgggttcctccccagagcggttttatttccgactggactgtgctgcgggtctcagaggccctctggtccgttca

SEQ ID NO: 97149 - DNA, 442 bp, Homo sapiens
tttgttacaccattgaaatattaatatgattatcatttcagcaactttgattaattttataaaaataagggaaatataaagattttaccaaatctttcagaaacagataattgccatgtaatatagctattctgagacttagaactgattcactcttcaactcattctataggatggcaaaatgttgctgttgctttcaaaagaagatagcctgcaaatgataactaaaggcaattttcacttatagacaggtatcaaagtcttaaataaaataatagcaaattgaaatggcagtatataagtcatcatacatcatgaccaagtgagttttcttttaggtttgcaagtgtggttcaatattaagtgataatggtttggctctgtgtccccacccaaatctcatgttgaattatgaacttcagtgttgaaggaggggcctggt

SEQ ID NO: 97150 - DNA, 649 bp, Homo sapiens
ggaagctccatgtgcatggctggggcttatgattggtcaggaggcagctttcttctggagaaccctcaaagtatctgtaggtcatctttctggtaccacttagtttctctagagaaaactctttaaacctccttcaggggttgaaggaaagaggggtggagataggataataggcctgacttttgagagtgcagtagtaaagacaggaaggtttttcgactgtgcagtgtgcagcatgcagattctgactgttttcaggacagaattttacccccaccctctattattcctgaagtccctaacagtctctggttctgtttctccaggcaataagcctcccacctcctgtgatggggagcaggctggggctcaggagtgggaagcagaggtggagggcagctaagccctccttattcagtttttcaaccactcttaagttccagcctttggcctctaaggtacctggggtgcccaattcctgagcttcttttggttctggggtaaggatggtctcagtcttcattgcttcttccttcagcaggcacataggtttcagctttctgtactctaccagtccagccactgttcctccgtgtgctgtctttcccgcagaattttgctaatggctctcttccactcttgagagatt

SEQ ID NO: 97151 - DNA, 1299 bp, Homo sapiens
caagaaaatatttcttaatgttagctgtataaaacaaaaatttgttctgataaaatttttaatatgggcctttatttgccaataaaatcctttgtaaatgtgagctttattaaactgtttaaatagacaaagttaaagcttaggatagggaatatatatgtatgtgtatatgaaatgatgtcttcgagttttaacttccagcctgagatggcctagatttggtgtgttagtttgtttcactgaagtcagtgagataggagtctagctgggtacatgcttaaaaagctggaagtgaagtgggtggcaagtggcagctccctctttcatgtagttttccataatgttcatatagtttccttatggtctaagtgttacaactggttttcaagttgttatattgaatattcctttttggaattcagggttgaatcactttgagggggaagggaagcaagggcaagagactttattttaaccagatgcggtcttatgacctcaaagatgtgctctagaaagaaaataacaaaaagtgtacctgtgaacatattttttgtcttggtgatattatgcaacacagtgttcagaattgcaaaaaaatttaaaaattgatagttttatcaatggaacagagagatgtgtttttggctaaaattattttttgtaagttatttggttatttcattttatattccctttcccatagctttgtacacacctcatacttaaaaccaagtgagaggcctcttttcagatctggtttatttttggaatgcctgagtgtgtttccagattggggggggagaggtggtgttttactttttgacatgctcttagcatgttttgctagtcattctggatcttatgtttgcaaattctgttgaacattcagtgatgtatttgaaatgagaaagtcctttataacatagtgtgaatgtttgtggccaattcaattgtggaatcttatggctttgtttttactttgggtagaagtttaacttccattgttcagattttaggtttatctagtgaaattgtgccaggtagttgtctaaatatggaccaattttgggaaatgaagattaataagtgtatatttgattctagataatcctttactcaaaatcataagttaaagattcacatcattaagagttatctaacttttatgttgtcaaatctttaaatgtggatgatattcagcattctatctatgaatttcctttaggaaaagagaaaaattcagtctccaaaccttttcttggagacaaaatttaccacatatcgaaaatgaaaaaaatt

SEQ ID NO: 97152 - DNA, 1252 bp, Homo sapiens
gggccatccagtgaagccctgggtgagtgacctcagccctgacaaaagactgtgccataagtgggtccagtgcatagagtcagcagcgagcagtgcctcactgagctgtcggggactgtctggaaggttcacagatgaagagaaattttgtgagaatgaactgtaccgtgaagctcacctgcatctgatttagtgcctgctcctgctttgccttctgtcatgagtaaaagctccctgaggcctctccagaagaagatgccactgtgcttcctgtacagcctgcaggactaaaaactcaagctggagacggaaatgaacagatgcacatggctggaaagactcagtgctaatctctacaatgttgttttaatagaatggagacaggaccacatactttcttacaataatgaggatcaataaagacaaaactgacactttgtaatgaataatgatctgaacactcacctgagaaagtatctctttgttgcaggtttttggaaatgggctatattttttgaatcataaccgatatgtactgccataaacaagaggatttcaagccagctccatctggtcgaaaattattttatttattactaagagaaaagtgtaagacaagtcctgtggtaaaaacagatttattgcctctgctattcacctgtgttatttcttcatatattaccattgacatatattatccattcttcacagcaatggctttgccgtggcaaattaaatatctcattgtccttctctgtccattttacattataatgtttctgagcagacttttatagctctctcacagaattatagcaagtctttaaataaaaacaaaattgaaacaaaaattttagactcaacttaaaatccctctttattttataatttggatttttaagtaaaatatgctatatcctatttaacgagaactttcatatgtaatgtatcaatggaattatctaaagctcatttggttttgcataaaaacacaattagagtaaaaacattctaaaatagacactggaataaaaacaatgaaagcaaaactattaattttacatttttcattcaagtattttgatttttactatattatattattatattaggtatcagagtaatcattgatcgctttcaaaaccctgctcctttctaggtgcaatgaagaatttttattttattgaaaagttatcttaagatgtaagacttgtgaatgatagtaaagatttagtagacccaatgtattctc

SEQ ID NO: 97153 - DNA, 324 bp, Homo sapiens
gggccatccagtgaagccctgggtgagtgacctcagccctgacaaaagactgtgccataagtgggtccagtgcatagagtcagcagcgagcagtgcctcactgagctgtcggggactgtctggaaggtgagtcatcaagccaaagaggatgcttcttgaaccttagggtttgatggagtttgccctgttaggttttagatttacttgggatccagcattcatatattttatttttttcgaatagtggttctttttggaatgggaatgtttatcctatgcctgtctcaccattgtattttgagagttcatgttgtttgattccac

SEQ ID NO: 97154 - DNA, 659 bp, Homo sapiens
gtccccatgctgctgtaaatagctgcctgaggctggataatttataaagaaaagacgtttaattgactcacagttccgcatggctggggaaggcctcagcaaactcacaatcatggcagaaggcgtctcctcacagggcgacaggagcgagaatgagcactgaacaaaggggagaaccccttataaaaccatcggatctcgtggaattcactatcacgagaacagcatggaggaagctgcccccaagatttaattatctccacctggtcctgctccagacctgtgggattacaattcaagatgagattttgggtgtggatacagaaccaaaccatgtcagaggccaaggatctcaagacaaggccagggtatggcatgtttatgatttagccttggaattcattccacatcagttctattccatgggttgaggcaggtgcaaaaacccacccaggcctatgggaggagagctaggcccactgctggatggatggactggtgttgccaaattcagtgaggacaaaggcagaacagttacctccaccctcctccgcatcagaagaagaataaagatgagacttacgaagttagctgtcctgaggactggtgtggacccatggtggcactgggcaccaagagtgagttcagtaaacagtaag

SEQ ID NO: 97155 - DNA, 423 bp, Homo sapiens
  misc_feature (423)..(423): n is a, c, g, or t
aatatacaaataaggaaatacgacaagagttgagagtttgaaaactctcttgcctttgtaatactgtttactgttgttttcaaaaactcagccatagcattatttaacatctactttatggtaacaaatgcagaccttgaactttctcccacttccaaatataaaaacttttaagtaaacaaatgtctcaagtaccattattgggatatcaggtattcaggccaggtgcagtggcttatttatttagacttttcactccagaattttaggcaattctaacaaactcaggtgagaagcaacacattagaagcaggtaccctgactgcatgaagatgtgatggagaatataccactattaatagagacaaacacaattaaaagcagacaaaatcttaaagagcacagcggtctattatagcgacn

SEQ ID NO: 97156 - DNA, 931 bp, Homo sapiens
gatgctgtgtctcactcttgtaatcccagctacttgggtggcttgaggagagaggattgcttgagtctaggaatctgacactgtggtgagctatgatcacgccactgcactccagcatgggtgacagagtgagaccctatctctaaggaaaaaaagcaaggaaagtgaaagtctgtgttatttgaaccaagacctgttctccctctcttctcttggctaagtgagatagaactcttctccaaactggtgcagggaagaatatacggttccctttccctctagtcccagttggagtgctgtcttcacaggagtgatggaatgtcagcatttctcatcctgcccccagctacctgttgctgaaactaaattctggataagtgtagctgagaggtgggtcttacctccttccattctgcccttcctcatgggatagcagctgtaccttggatgtgacactgctgagaataccggggccacagtcatcctggtggcggaacatggttccaccccaggaaaagcaaaccaaggagatcaagggttgctgtacctttacttcagttgagctgtcagccctaaagtgagggtgtcacacagaagcataccattgtctctgcccccagcatcagcaccagggctcagaaattttgtccaggggaagaagcaagccttataaaagagagtgctgaatgtctcctcaaaggaactgacttcatttgcacagaatatggagaagttcatgcctaagggtgcaggttgtgatgaaaggcacttggggtgacattaacacagtcattggagatataggttaacccaaaggccagctactttgctaggaggaatgggataactgagctagattgctagagtgaaaggaggaaagtggtagctgggaggaactatcccttcaaaagatggatctgtttgtggagca

SEQ ID NO: 97157 - DNA, 387 bp, Homo sapiens
tctgccctcatgaatggattaatgttctcttgggagtaggctggttttcacagagtgggctcctgataaaaagatgaaattcagtccccattccctctctgtcttgtgtgcttgtttgcctttccaccagatgccagcaccatgctctgtggcttcccaaccactagaacagtgaaccaaataaatttctgttcaccataaattatgaagtctttggtaattctattgtagcagcaggaacaagactataagataaggtaaaggaaggtcacgttttatttttatttttgaaaataaaatcaaactcggctctaagcctcactagctacggttaggggaagaattctaatattcatttttattggggctttttcctctctactgaat

SEQ ID NO: 97158 - DNA, 360 bp, Homo sapiens
attctttgtaaatgaactggtcacttccatccatgcctctgaaccattactcacctttccccacccttctccactctgctctgtgtcttaggtggctgcagggcctgaatatatagtaattgatggatatcattttccttaggctttcattgggtttagctaatgagaggcactgacagatgaaggatgggaagggaataaagccagggtatctggttccctcctgacaggtcatccaggtcacttcatggtggctggttgaggacaccacagttccttgtaggtggccctctcaaaacagctcttttggggttcagaaactgttccccctctttacctcttcaggcctcagggttcaat

SEQ ID NO: 97159 - DNA, 400 bp, Homo sapiens
gtcagttcctccagagcacctccagatccctgcccattctatttagaatcggaggtttaagtctattgccactggctgtcctctggggcccagaaacctatatggggtttgtccagcctctcatcccagcaccatcgtccaaaccccacagtcattaccaatctaacagcttgaaagttgatacaaagatgaggcagaagccagtttggctttctcccagttctctgtgcccctccggagttaatcaacaacgacctatctttgtgtcaataacataagcctctctaactagaacacctggtgaaaagccggaggaaagcttaaaatgaagcaaattttgcagtgattattctgaccctcactgtttaagctggactcaggatctccagacaaaaactgc

SEQ ID NO: 97160 - DNA, 303 bp, Homo sapiens
tagcattgcaacaatagcacatttttattaaaaaagaaaaaaactcattgtgcctacctcattctacactagtatgaaattccaaatatttacctacttgtcttacccaaatatttgaagagttgacatagctagtatcatttacagaaagaagaagttacaaagtatacacgtaattagaattttgactttgaaaatagaacatgtatcgactgcagtattctttcaaagtatctcccataatgaaacattgcaattccaggaaaatttagagatgcttgtctggaaacacacatgcattat

SEQ ID NO: 97161 - DNA, 215 bp, Homo sapiens
gtaggattacctttagccctctaagtgatcagatccgcctcactgtcactcatgggagcccttgatctggacaacgtggaccttgagtagctgagttcaaacaactgaggtggcaagagggatctcccccttggttcttttttttttttttttttttttttttttttttgagacagagtcttgctctgttgcccagtctggggtgcagtggtgcg

SEQ ID NO: 97162 - DNA, 445 bp, Homo sapiens
ggcctctactggtccctggaatggaatcttctccagtgacttgggatctctggccaaggcctggcccacagtgttcaggtatgactttaagtgtttctaaattcctccaggggaaaggttacacctgctcgaggagggaaaaatccccagctgctctacccaggtgacttcaggaagacggctccttttttccctcttctggtggtatcatcccaagaacttgagttagggctttagggagtgttgtgaccaaacactaggaaaggagaaggtcaaggaacagcttggtcgcagtgctttgtacagggtgtgcaatgaacagttattggtagaaattgatcaaagggatggtctgacttggatttggctgtgtcatgccctacagatagtgggatattgaagggactgttctctttccataatggttagactcaaaaacctagaa

SEQ ID NO: 97163 - DNA, 534 bp, Homo sapiens
aattattatatgtcaattaaaaagaaaaaaatttaaatgttgaatgaggtaaagaatgaacaggccaatgaaggaagagcttggaatttaggggaaatcaggaaatggaaaaaatgagagtcttatttaggatagatgatgaaaacatatgtgtgtaatatatgctatctttttttttttttgctattctgtgtgttccagagaggcaattttgatatgatttaacaattccatgatatggagataaatggaaaaaaaatctgaaggaaaataagaagcagattatgctgctgaattctgaatttggggaactgacacatgatggtaatagataattgacgtatagtgaatggaagaatattaaagctgatgttttcaagggtacaaggaaatgggcataaatgaaaagataaatggtgtgatctcatttcatattgtttccttggttttaaattgcaccttaaggtcctttgaatagggctatagtaacaacgggaagcccagagatgcaaatgctgggaagacagagaatgg

SEQ ID NO: 97164 - DNA, 715 bp, Homo sapiens
accatgtgctgccccagctgcatcctcatgaagcacatccgggagcacatggtgggaagggccatgtgagagactttagtatgtgaactgatttatcctctgaacaagcatctttgattatctgttctactccagatacaactcacaagtgaatgaaccagaacacacaaaaagtatgtatggagatcaatagagtgtggtttaagaataaacaagatcagtggaaatgaagagattccaaatgggccaggcgtggtgactcatgcctataatcccaccactttgggaagccaaggcaggcagatcccttgaggtcaggagttcaagaccagcctggccaacatggtgaaaccccgtctctactaaaaatacaaaaattagctgggcatggtggcgtgtgcctgtaattccagctactagggaggctgagccaagagaattgcttgagccccagaggcagaggttgcagtgagctgagatcatgccactgcactccagcctgggcaacagagtgagactccagaggctgaggcatgagaatcgctttaatctgggagccaagatggcaccactgcactccagtctgggtgacagagtgagactccatctcagaaaagagaaatagatccctgcatgtatgaaaatctaacgtacagtagtaactggtattaaaattcagtttatagtcaagatttcgtggggttagaagaaaaag

SEQ ID NO: 97165 - DNA, 388 bp, Homo sapiens
gaaaggaggattttattgtctctgaacagaggctcaggcacaaataaaaaataacaaatccaacattcacattattgtaatctggaaagaagaggacaaagtggtctttgtgggataaaactttgaacaattaatagctgaaaatggttcaaatttgtcaaaagatataaaccagatttttaaagttcagtaaatgtcaatcaggataaacccaaagaaacccatagcaaggcatatcataatcaaactgctgaaaactaagaaaatacaaaacaattttgaaagcagccaaagggaaatgaaagagaaactaccaaatgaatgattgtagatttcgcatcaggaaccataggggccagaaaaaatgtcataacattcggtaagtaac

SEQ ID NO: 97166 - DNA, 249 bp, Homo sapiens
  misc_feature (70)..(70): n is a, c, g, or t
taaacagagacggattttcttatctctagttaattagaggtatgagaaaaacaagacgctcggcacgctncaggctttattcattgatgaaatgtagtcaccacagggagaaatgtagcaacaacttagcatccagaaataatacagaacactgtgctgcattaaatgaaaaatacctgcaagaggaagtgagttaataaaaattcaattactcaaatgggaacttttccaagaccccagggttaacac

SEQ ID NO: 97167 - DNA, 375 bp, Homo sapiens
ctccgtgaccctcctaactggggacgagcgaaccctaaggcctgtcttatataccctctataggagaacgataacattccgcccctcccccagtttcttcagcttcctctcctggagggggaagagcagaagaaagcaaggaaggcacaggttttcttactttctgctccatcgtctcatcctgccccgagagcttcaagtgcacactcactgcacatctttgtgatgccctacaacgtcgtcccccatatcctgatgacacagactgccttttttttttattgccgtttgcagtggaaaccgtggttctgaaataccttccccttccttgataattgcagtctcttccccccccccttttttttttgccagcgg

SEQ ID NO: 97168 - DNA, 950 bp, Homo sapiens
agcggagaaaaagaatcttagtttcccaaagtgggaaaatgaattgatagattcctaaagcgataaagtcaagaacagcagcataatatgttatttagaaataaggaagttggctaggcgcgatggctcatgcctgtattcccagcactttgggaggccaaggtaggcagatcgcttaagctcaggagtttgagaacagcctggccaacatggcaaaaccccatctacaaaaaatacaaaaattagctgggtgtggtggcacacacctatagtctcagctacttgggaggttgaggtgggaggaccacctaagcctccgaggttgaggctgcagtgtgctgtgaattatgccactgtgctccaccctgggagacagaccctgtctcaaaaaaaaaagaaacatcaataaagtaaatagttttaaaaaaaaaaagctgatgagaaagaggaccgaagtaagtcatatgcaacaaaatgttaacagagatagtttgggatggaaagatatgggttagtaataagtttttctctatttttcccactttctacaatcatattattatgatttaggaaactacattttctgtaattagagattactctggattttataaataagaatgtggttcctgtaccagatcttggagaagagtacgcctctggaagtcacgggatatccaaagctgtctgtcagatgtcaggtcagatggagcagagaaccccagagacaagaagggaggggagaatcaggaattggcttttttccctttcctgcttctcaggtcagataaattcagaactcttattcttatacccgcctccgcctcaagctagcctaaaacccacaatccaactcccttgatgaggatgatcattaacaacaatcactaaataagtacttactaagtgccaggcacagtactagataaataaaattgtctttttatcta

SEQ ID NO: 97169 - DNA, 293 bp, Homo sapiens
ggcgcgcgccgcggccggtccgcaccctggactggagcccgggccggggagccccctccccagaaagggccggcagaccccgcgggggcgggcgcgggggtcgccgagcctcagggaccctctttccccgactccgccgtctcccgagttgccttcgcccggggccacccctgcccctgggggagctaacgtggctcccaagccccggaggtggggcaggaggaccccgtcccccgtctcccggcggggagggtttttaaagtcttcgccacgaactcccgtccctgcccggc

SEQ ID NO: 97170 - DNA, 444 bp, Homo sapiens
gtagatacccagtggtggagttgctggacagatagagccaattgatgatcagtaatggtggccaatgatcaactagaaacaaaatacttagcagggcctgaaaacaccaaaactctgagacaactgaccttcaaaaacgtcaaccgccatgagtgaaatatccaaacacatttatccaccattcaaagaccctttattgcctgtcctctgtgcatctcagaattctctttttaccacactgtctatatactgcattagccatttatatgaaactccaaggcatcttatactacatattcaaccatgtatccctagtacctagcacagtcctggcatatagtttgctactaaacatttgcagaattaagtaattatcttgtatccagtttccaagttttaaggtgatttctcactaacaataaagcattggcctcgttggcctca

SEQ ID NO: 97171 - DNA, 542 bp, Homo sapiens
tccccacccccatctctttggagcacccctccaatatctaattgttaacattctgtgtgtgagagatgtattatgtattaactgtttaaataaagtcctgtgaattccttggacagtgtattatgaatttacaagggagttcactatatctttaggtatttgtgttatatgcattatcttacccattaatacattattctgaacttttgtaaggaaatagttttctactattcatctgtggttttggttacagtttttaaaatgcagagacaaatttcagttccatttctggtggcccacttgtgggaccaaatctatctttctaaacgtcagatttttagaagctctaccagcaatcctcgaggcttacagttttcccgggtttctgttggcaagtaacttcagcttttcgtactttgagatcacaagtggcagacgctcttaagtgcgtcacagttaggttgttaagatttgagggggacaatctcctttggtgtcgagttcatcatccacagcagtaggaacaacaaaaactcaagaat

SEQ ID NO: 97172 - DNA, 333 bp, Homo sapiens
tccatggcgcttgggagtttccatggaacttgggggcttctttagaactgtatcctagaataaccccaggcacttaccaagtgcttggtaaatactctttactacatgcagtgaatttttgtgataaagaagcagttagtttgtatcctgtgcattaggctctgtttcattttcaaccttctcctggtgcctctactatccctactgtcttccacatcatccacatcatggggtctcttggctgctcatcttggttcttgccattcaagcccccacctctttcctcgggtccctccctcatccaccctccaaccatttatacccttcttctct

SEQ ID NO: 97173 - DNA, 297 bp, Homo sapiens
cagtgtcccaggcatggctgctgtcagatgagacaacttacttttaaatgtatcttattttgtaaatgtattttttaaaaatagtctcgggctgggcacggtgtatatgtgccatattttctttatccagtctatggttgatgggcatttgtgttggtttcaagtctttgctattgtgaatagtgctgcaatgaacatacatgtgcatgtgtctttatagtagaatatttataatcttttgggtatgtaacccagtaatgggattgttgggtcaaatggtatttccggttctagatc

SEQ ID NO: 97174 - DNA, 277 bp, Homo sapiens
gctatgaaaagaagagctggacctgtatctataaacctgaagagatgtttctgtgacatgaagtgaaaaaaggcaagatactgaggaaagtatttagtatgtgaatagttttacaaggaaaaaaaaaacccccgcataggtgcttatctgtgagcatccttatgtgaccattgatggagggaatgctaaaaggaatcacaccaaatagttgaccttgttgcctccagaagcaggggaggagagggaagaaagcaggagacagattgttgtttatctt

SEQ ID NO: 97175 - DNA, 293 bp, Homo sapiens
gatcgtctctgtcttgttagagtgtgactgagatctctggaaaaaagaaaaagatatccctgatatcttgagtggcctgggatgagcagggaagcctctaggagagcagagagaaaggtgaagaaggcaacttgcttcacgattttacctacacctggagctgcctggaacagtctccttgctcagatgcaattatgccgtgcatctcctgtccggtgccgagtcttccaaactctgctctccaaaatgtctaagtgtgttttgcccacactagcgctgtgcccatgttgcaa

SEQ ID NO: 97176 - DNA, 447 bp, Homo sapiens
atttggagagaaatttttgcctgggaaccttggctcacacctgtaatccagcattttgggaggctgaggcaggaggatcacttgaggccaaaagttttgagaccagcctgggcagcatagcaatgctctgtccatacaacaagtttaaaaattagctgggtatggtggtgtgtgcctgtaggcccagctaatcagaaggctgaggcgggaggatcgcgtgaacccaggaggttgaagctgcaataagccatggttgtgccactgcattccagcctaggcaacagagcaagaccccatctctaaaacaaatgggagtagagttctaatggcatccaaaggtaaaggcccatattccctggtgttccccaaatcattgcaacaaaaaagcaaagccatttaccctctaagtaatgtcagtaaacaatgaaggaaaacctgaagccttcc

SEQ ID NO: 97177 - DNA, 353 bp, Homo sapiens
aatgggattacatcaagctaaaaagcttccgcacaagggaagagtcagtagagtgaagaaaatgaaatgggagaaaatatttgccaactatctttctgacaagggattaataactagaatatgtaaggaattcaactcaaaagcaaaaacaccaaattatccaattaaaatgggctaattatctgaacattttcagaagacatacaggtatgtgaaaatatgttcaacattagtaatcatcaggaaaatgtaaatcgcaaccacgatgagatgttatacaccccagttaaatgaccattatcaaaaagacaagccaggcattggctactctgcctggccctagttttgttctt

SEQ ID NO: 97178 - DNA, 329 bp, Homo sapiens
agagagcaacagatcccataaatagtctgaaagggaagcaggatccatgcgacagcacagatgaatcttccaacattacgctgagagaaagaagtcatacgcaagtacaagtgaagtttaagaacaggcaagaacttatctatggtggcagaaatcagaactcgagttgcttctgggataaagagagaattaactggaaaaaaaagcatgagggaattttctgggataagagaaagattctaccacttaattggaatgttggttacatgggagcataccattgtcacaactctttacacggtaaacttcatatttgtgcttttcttttc

SEQ ID NO: 97179 - DNA, 644 bp, Homo sapiens
tgcataccattttttcactgaacacaatctatcatgaacatctttccataacttaaaagaagctgcatgccagaacagtccatcatgttctgttttctttcagaaatctttagagatggatcattttccttacaagaatagataccaggtaagagaagcagcctttaaagcagcgaatagcagctcatgcatgctaattatttgcttacttatctggctcccctattgatggcatcttgagggccggtatgaacatgtcatgcagtctccaagcaacccacagtaggcccaccataaacagatgttgtggccagcatgggaggtgcaatggtgagttgctctgtttcctccctcccgtccccctccccacccctcccctccccctcccctccccctcccctcccttccccttcccttcccttcctctctcacaaaacagtcacagagagaggacagcagcgtacatggtgaggtgctgacgattctggtccactggatcccaccatccctaggacagtaaataccgtcctagtcactacccagcaagttaccaccgcatcatttcctgcatgttccaaaatgaataaaggtaattaagcataagtgcaaataaaaagtcatttctcatgtttttaatctaaact

SEQ ID NO: 97180 - DNA, 220 bp, Homo sapiens
agacagggtttggctaatgccgcccaggctagtcttgaactcctggatgcaagcaatcctcccacctcggcctcccaaaatgctgggattacaggcatgagccactgcactggaccatgaaagtttgaaagaagtcgtcttatagatggttatgaagagttggaagtttctgaggaaagagagccttgttgctgaaggtaagaggacattgctactggat

SEQ ID NO: 97181 - DNA, 314 bp, Homo sapiens
tttgatgtttgaagtcctgatgcaacattctgagcagggttttcctgacctgctgtgcccaagggactgataaaggaaaaagttctatttattctttgtgatttgacgcacagatgaaaaacttaacacacaataacggaagctggtcgttaataaatcacaccctagtctttcagagcttccgtaaacagacaacatcttcagctttctaactcttgtagttttaacactgcaacatcaatgatgcatatgtccagaatcagctaaaaagagtgtcagattctttttctcttagttcatctatttttcactgt

SEQ ID NO: 97182 - DNA, 371 bp, Homo sapiens
tcacttaagagttgaggaaaataaagctcagagaggttaaataagcagcataaggccatagagcaagttaactttggggctagaatcgatacacctactttggtgtttctctagctgatgccatatcactgcatccccgtctcttctgccttccgaaacagtctggcaatgctgtgccttctgtgaaggacgggaatgttctaaagctgcaccagccaattttaggtactcatcacgtgtggctattgaggacttgaaatgaggctagcgcaactgaagaaacaaagctttacttttatttaattttagttaatttagatgtaaatggacactcacttagctagtcaatactgtattagacagcgtgactc

SEQ ID NO: 97183 - DNA, 285 bp, Homo sapiens
aaatgtattcctcaatgttatcagtttcttctgaatcataatgctgcctcttaagatggcagttgctaagatggcagttgctaagatgcctgcatattataagaggattctttttttttttttttccctgagacggagtcttgctctgtcacccaggctggagtgtagtggctcagatctctcagctcattgcaacctctgcctcctgggttgaagcaattctcctgcctcagcctcccgagtagctgggattacaggcgcccgccaccaagcccagctaatttt

SEQ ID NO: 97184 - DNA, 776 bp, Homo sapiens
agtgacagttctttgttatagtccttcagctagattgaagtttagaaactaggtcattttccttgtatcctatagaaaatgttatggggtagttttacagttactgttgtagaatgaaggacattctttggctagctcattcagtatttgccccctgtacactgaaaagctcacatgatttccttctcttctgttttcccagttggtttcttaagcattgcttcatgtaatttttggactttggagagggaatcagtaatgcaaattaatgtaattggattccagcctgtttggagtaatgctgtcagtggtggcagggtgatttcctgctggtgaaatattcctagtatgtctactgggaacactggtatgtctgaagagttgcttaatcttctgtaaagattaattccttctctcaacccctaaatttggtaatatatgttactactgtaatacatttttatcagttctgctttttatacaaaaagcaccattcttccaagacattgttgttccctgttatatggacacctgcatttttcttaacgctagagatatgcatcactcatttgtattcttctctgttttctgaaaatattgtagtatgttccagagcgtctgcttagtgaggtccttatatcagttagaaccgtctgagaaatgcagatgtgggtagtatgctttatgggaaactggtcataaaatatgtttacgcagttgaaagattcacttatatttactcattttaatttgctcttgtagtggtttagagtata

SEQ ID NO: 97185 - DNA, 290 bp, Homo sapiens
ttctagtgcacgggccaacctaaaatcacttgcaaatttccaactaagaagaaggtactttcatacaaagtcaagattaaataattttagtagagtatgttaatttccaaaaaactcatatgtgtttttgtatgtatcaaaaaatgtacatgcagccaggcactctgactcttgcctgcagtcccagctacccaggaggcagaggcaggaggaagacttgagcacaggagttcgaggctgcaatgaactatgatcatgctaccatgccccagcaccccagtctggatgag

SEQ ID NO: 97186 - DNA, 151 bp, Homo sapiens
tccagggaggggtgtgtcctctgtgcccgagtccttccgctacccagaaaggaggaagtgaaacttgcccttggccaggtcggctccctgaggcaaggttagattttgtggtgataaagtgaaactggttttgcagtgtccccacccgccc

SEQ ID NO: 97187 - DNA, 116 bp, Homo sapiens
ccacctccagagttcaagcgattctcctgtctcagcctcccaagtagcggggattacagtccccctaggtccgtgcaggttacacagtggcaccccaaacagcgacaggatcggaa

SEQ ID NO: 97188 - DNA, 731 bp, Homo sapiens
acatcaaagagggctatttacaaaggattaattacaaaagtgtgtgtgcaatgtcagggaccgacacacagttgtgcagaaacccgtgttagcatcagcagagctatttccacttgtgggcccaaaaggccaggagaagtcactaggacctggaagcagagtcctgtagagcaggtccccaaccccccgggccacagactggataccttagcctgtggggaaccgttaggaaccgggctgcacagcaggaggtgagcagcaggcaagcaagcattactgcctgagctccacctcctgtcagatcagcagtggcgttagattctcataggagcatgaaccctattgtgaactgcatatgtgaaggatctaggttgcgcactccttatgataatctaatgtctgatgatctgagatggaagagtttcatccccaaaccattccctggccccagtccatggaaatattgtcttccacgaaactggttcctggtgccaaaaaggttggagactgctgctgtagagcaggctacctcaagaagagctgtgacttccttcaaagcacacagtgggccttaagccctcccagaaagaagctagggaatgaatgaataccctgatctcatttgcttcactgggctctctgtttgccgactccaagtggaagcctgcaaatatgggagctgttgattataatctatcaatgtaagtcagctttctggctgggagcttggt

SEQ ID NO: 97189 - DNA, 317 bp, Homo sapiens
gcccgggagatactgttgggggagggggtaggtgaacggccgggagtaccagtacccagagatcttcagatacttgggggcgggtggaaggccaggagccccagtacccagggactcttcacttgtctctttctccagtctgagtccatgagaaaaatttggtaagtaaaggtttggaaaggagcctgaacgtcctcctcatgtgtcccaccccttccacaagcccttgccacattcccgcctgcccagcgctcagctctgtctcggctctggtgtccatctggtgtgactgggccgtttcacccgtttcaccccag

SEQ ID NO: 97190 - DNA, 375 bp, Homo sapiens
tttttaatttctctatttggtgaactacagtgcttgatttttaaaatttttattttattgtggtaagaatataacatgagatctactctcttatgagatttttcagtatacaataaaatattgttaactataggcacagtattacacagcagatctctaaagctaattcatcttgcattaatgaaattttatacccattgataagcaactcctcacttccctttcactcccatcctggcaaccaccattccactctttgattctatgaattgtactgttaatattttcactatctaaaataagcaaattatacgggatttgtctttctgtgattggcttatttcacttggaataatatcctcaaggtttattcat

SEQ ID NO: 97191 - DNA, 214 bp, Homo sapiens
agacttacttaaaacatatgtgaaagggctttgaaactattaaaagctaccaaatggaagatatttataggaggcatatactttctatcatcatttaattttatactttattaataaaaattattaaaattcaatttgttatattttcagtaactaatgacaatgaatatattactaatcttttcacttgtcttttcttgctttcctttttcct

SEQ ID NO: 97192 - DNA, 908 bp, Homo sapiens
catagttacaattaatagattagcatatatttggaaattaagatgttttgggagatgtgaatagttagcgttagctactttaagagtatagatcttacaaaggcagcaagtatatcccctttcatgtggtattcttaaagtaaatacatacttggtgtggaaactacagcagcatttcacatgaatgctctgatactttttagaatgactaaagcaaagggataaaaaagtttttataatctggatatctgcttttacttaattcctaatgtttttgaatctaccacttcataaacactgtagctttagagtaccatatctagacatctttgttttttcagcaggtacggggagtatactgtataaaacaaatagaaattggggtagtaggtttaaaaatgctaaatagtaatgcaaaagtgccttgtttccagtagtgttagtagaagaggaggatggatttgtctaatgaggatttaagtgatagtagaattttaatatagctccacataccctgctgaatagacttctatatgattgctatatccaaagtcttaagaaattgttttatttttaagttacacttaagatttggtacagggcagtttataggtttgctttgctgttggttgtttggtttggcttttgtgggggtttgttttctgaatgtctttagagtctgtgcccctgtttacatgatcactatgtttagtcgttttatggatcattctttagtttgacacttaaatgattttaagtttgtttttctacaaaagcatctgtgtaagtttacctgttgatttaaaaatgtactatatagtaacagccatattacacgttacagttccatgactaaaaggaatttttttgtgtgtgacaaggtctcactctgtcacctaggctagagt

SEQ ID NO: 97193 - DNA, 499 bp, Homo sapiens
aattaagctaatcacagttctcatgcaaagttattctttcactgaaataataagctagcattctggcctaaatccagtttcttaatgtcaagctgcctttgagccctcacaaaactcccttccctctaactgcctagtattccttcgaagaacactggtgaatttcagttccaaaatttttttctgccctgtctgttcccctcatatctggttcttacctatctgcacacttggccttgacttgacacttaatactgtgccttgttttctagattgttcttgcctggggtagtgtccatggctccccttttctccctgccctgaagccacagcccacagtaccatccaagtccaggccaggttctgtatttctagtcataacctagacacagactgaggctcccattcctcccaaatctgcatttgctctggaaggaatttagtagcactcgtgagtttcatagcatgaattagtttcctggtatttagtcaccatggg

SEQ ID NO: 97194 - DNA, 323 bp, Homo sapiens
ctttgaacgtcatgctggtgttcaaaaagcatcagattttggattttagatttttggatttgagatactcaacctgtatatattttgagagtaatagtgtgtactctgccaactacatagggttattgcaagggtaaagcaaagataagccatgggacagcactttgcaaactgttaagaattctattatcagggtcaagatggcaatcagggacactatgacatggactacagtcaaaagatccaggaatgcctgccttggacagctagatcttctccccaggaggtgcctgagggagacatacacacaggtgacagtcaca

SEQ ID NO: 97195 - DNA, 525 bp, Homo sapiens
gtgacagctgagaggccagtctgagagtgacatcactaggcgggagtcacgggtgtgtcccagtgggagaggccgtcacagacagcccaacccaaacaccctggttctcaagacttttagtcaagccaggccaaggctcatgcctgtggtctcaactactccagaggctgaggcaagagaatcgcctgaggccaggagttcaagaccagcctggacaacacagtaagatctcacctcttaaggaaaaagaaagacttccagtcaaagggtgtcttaagtcaggtttcttctccaggcaaaggcctctggtgcatggtaacaaacaacgaccaaagccaggcagcccggggccttgggtgacctgtccagcgggcacccaactgtccccatgtcctgtctccacgcctcacacggcaccttactccaccacttcccagagggtcccgccagctgcccccacaatcgcgacactgcaggccccccgtgagcacagagacagcagctttagtaaggtcagacctagcg

SEQ ID NO: 97196 - DNA, 467 bp, Homo sapiens
  misc_feature (461)..(461): n is a, c, g, or t
  misc_feature (466)..(466): n is a, c, g, or t
attcaaagtacgtgaaggaaaaaaaaacaaaaaacctgctaaccaagaatgctttacctggcaaagctgtccttcagaaatgagggagaaatgaaagctttctcagacaaacaaaaacaaaggaaacatgtaaaagtgaaaaaataaatggtataagtaatatatagtcccactcagaattctctaatactgttaaggtggtgtgtgaagcaatcttattactactaggagggttaagagacaaaactattaaaaacaactgcagctacagtatattgttaaaggacacaaattttaagtttacatcaaaatcagaaaacatgggaaggaaggaatgaaagtgcagagtttttgtatgtgattaaaggcaaattgttatcagtttaaagcctgttttaaggataaaatattttatgtaagcctcatggtaaccacaaagcaaaaacctatagaagttaaanaaaana

SEQ ID NO: 97197 - DNA, 146 bp, Homo sapiens
tgctgtgcccactccttccctttgcctgcctgcctatgtcctattccctgtgtcctgcaagaccccctttggtttggttttcttttcttttctttttttcttttttgagactgcgtcttgctctgtctcccaggctcgagtgcagt

SEQ ID NO: 97198 - DNA, 558 bp, Homo sapiens
gtgctgtaagatcactcagagttctatttagttaatgttacagcaatgttcgtgagcaacttggctttctttctgaaagaatcaaggttgtatttgacagggcctctgttaatgcattttaggaaatgtaaagacatattgattatctttcatcatgctaaaagaaaagaagtagtgtcgtaaaggcaatcagaaaaagtcagtatgttccacattaactcatgtaccgatttattcataggctcaggtatttttaaagacagagaagttctaagaaaataataaacattgacaatgatgagaaaacttattgcttaaacagtaatcagtagtgttaatgtgcacaaaaagtgctttgaatagtgaactattctaaaggaggagtaagaggtactatactacagatgacacggttgtggtatggtatgtggtgtcttattatttaacacggccagtataaaattatataacatcattaagataatgttcttcaggatttcaacatacatatgtctccagctttgtaaggtttttaaataagtgtagtgcaaaaaaaaa

SEQ ID NO: 97199 - DNA, 551 bp, Homo sapiens
gtgctgtaagatcactcagagttctatttagttaatgttacagcaatgttcgtgagcaacttggctttctttctgaaagaatcaaggttgtatttgacagggcctctgttaatgcattttaggaaatgtaaagacatattgattatctttcatcatgctaaaagaaaagaagtagtgtcgtaaaggcaatcagaaaaagtcagtatgttccacattaactcatgtaccgatttattcataggctcaggtatttttaaagacagagaagttctaagaaaataataaacattgacaatgatgacacccctcatagctcccccacatcccccatgtgtgtaacgtctcagaaatttcatccagaagtcaaatattattaagaataagtcatagcgaatcaaatacagaatgcccccccccccaaatgttgtcctgtccctgtctgggagctgggtcagttaaagatattctgtatgctgtatcttttgcatgtagcttccttaatggagaaaaagtatcctaattagtttccagtttcattatcctcagaacaa

SEQ ID NO: 97200 - DNA, 617 bp, Homo sapiens
tctatatttctggtatctcagacccactgcctagctggcagctacagaggacaggctcctggccccaagaaacagacttggggaagcgcagttacagctgtgaggtcttaggtaactcctgctctctgcctcttagggttagaagtacaggttgagtattccttatctgaaatgcttgggactagaagtgtttcagatttgggagtttcggcagtaccagctgagcatccctaatccaaaaatccaaaatcccaaatgctccagtgagcatttcctttgaacatcacgtcggcactcagtttcagatttgggggcatttcagatttcagattttcagattagggatatgcaacctgcattaaatgtgataagctaggtaaagtgcttaatccaatgcatgggacagaatgagggctcacataatatattagctactacttttattagactgtgccctgcatataataaattctataaatatttgtttaataaatgaacacaattaaaatgtttagcacaacagaactggagtcatctaagtacatggccttttaaaaacaattctgacaacaagtctctaagaagaaactgagtctctaagaagactctgaagtgag

SEQ ID NO: 97201 - DNA, 727 bp, Homo sapiens
ggctcactttggacaccaccaagcaatgctctcatccaacagacagggccactgtgctgcgctttggggttaattgctgaggccaacctctcttctttctcccccagtctaagagatgcttttcatgcccaacctagggaccaagctcgcagttacaagagcatctccaggtctccgtgctccaattatggcactactgttataatagagccgagaggtaactatggcaacattatttcaaggataaataccacaataccgccttcaactttttccccccatgaagaaagtgaagaatcgagaacatgtaggattaatagcatcatttgttaaaaagccaatggatggcagagttcagaagaaacgctaattagtggagtctttcctggctcaatttaacatttgctctgtgcccccacacatatgggtggtcagcctcagaattctgtatcacccaacttgggtcccgtcaggcttccaaccccaggttgctgcaagttccacagatgtttttctgggaagctcagtgccacaggcagaggtgatggctgaccagtacagaacttcacagtgagtcagggtcagctacagtggtgatgaccagcgagagtagtgaaggggaaagatttattgtcagagcttctcattgcttgagacccaagagaagtagtctagcacagtagtagaagcatgagcccagaaatcagacagatgacaagctgaagaa

SEQ ID NO: 97202 - DNA, 851 bp, Homo sapiens
tagctgcacagtcaatgaacctcccaataagaagacacccctttccacagcccttttttgtcaatgatacacaagacaccatgctttcctgccaggccctacaaacaagtgaaaatgataatacgtgtcatcccgactttagagaatggttttaagaatcaaatatgataatatatgtgaataaatgttctttaaacctgtaagactgtatatagcagtgaaggataggggttaatttacacctacaagatttctgatctatctgctagggtgcttcattagccttttctgataatggattcatgacagttgtacattagaagctatgtggatcactaacccatgacactgacatcttagttataaaagtgagcaattttatagaacacatattagcgagacactgtttctttcaaaaaaaaaaaaaaaaaaaaaaaaaaaaaaaaaaacaaaaacaaaacaaaaaaaaaacaacaaacagcaagcacaaaacaataccaaaaagaacaacaagccaaagagacagaccaacgaagcggggcgcgctcaaaacaacacacgcgagggcgacacgaatacaaaaggaaagcagagaaaaacaacacgagagcaaacaaagaaagaataaagaagaacaacagcaagaaacaaaaacacacaaagaagaaagaacgacgcagagagagagaaagagacgacagcacaacagagagagaaacaacaaaaaagaacaacaaaagaaaagagaaaaatgacggcaccgaagaagaaaaaccacaagaaaagaagaaagagagagaacccgacaaatggcgaggacgagacataagagaaaaaaaagacaaaaaaac

SEQ ID NO: 97203 - DNA, 740 bp, Homo sapiens
tgaaggtggatggctttattcctgggatgcattggtctatgtgtctatttcagtacataactcacagaccctataaaacaacaacacagtagaaaatacaaagtaagcagctaacaacttcatgataggatcaaaactacacatatcaatatcaaccttgaatgtaaatggtctaaacatcccacttaaaatgcacagagttgcaagttggatttaaaaaaaagacccattcatctgctctcttcaagagccccatttcacacataaagacacccatagcttaaagggttgtacagagatctagcatggaaatgaactcttaattttggatggaaagaaacctaggaataaaaatgaaatagaagacaggcccttctggcagggtgtggtgattcatgcctctaatcccagcactttgggaggccgaggcaggtggatcacctgagatcaggagttcgagaccagtctgaccaacatggtgaaaccccgtgtctactaaaaatacaaaattagccaggcgtggtgatgcatgcttgtaatcccagctacttgggaggctgaggcaggagaatcacttgaacccgggaggcggaggttgcagtgagccaagatcgtgccattgcactccagcctgggcaactgagcaagactatgtcacaaaaaaaaaaaaaaaaagaaaagaaaaagaagacaggcccttgtaagagagtatagctcaatgcaaatgggatgaggagatc

SEQ ID NO: 97204 - DNA, 224 bp, Homo sapiens
tatctcacatactcactatcatgagaacaacactgaagggatggtgctaagccattcatgagaacaccaaccacattatccaatcacctcccaccaggccccacctccaacattgaggatcacaactgaacataagacttgggtggggacacagatccaaaccatatccaactctgctttttacctctgagattcacatgttcatagcctcatgtcacagagta

SEQ ID NO: 97205 - DNA, 402 bp, Homo sapiens
cctcagttccctgagtcgcatccttatgaagcccctaagagctcttgcagggtatggcatcctccttttaaggtgacctagagccatacccaaggtcacagggcgcctagcacagtgctcggcacgtggaaagagcttagtaaatttttggtgaatgaacatagtaatttaagaactagagtccaagactcagggctccgaattaccagtcctccattgtatcacccctattacaaccgtcagccaaatcatctactttcttgaatgcaacattagagatggaattttttttcccagaatgattgcagatattaaacttaatgacccaacaatttaacaccaaaatgtacaggacacactcttcctctatttattatctattatttctttaccattaagtac

SEQ ID NO: 97206 - DNA, 2249 bp, Homo sapiens
gatctgtatattatccataataagtggcctcatttagaaataaaggtttttataaggcttctgtaaattttacatcatggaaatttagtacaagtgaaactttttttttttccaaaggctttatactgttggtgtaatcttataaataggtcatagttaagcctttgaaaatgaagtatgtggtgttgacactatcctggtgttatataaactgactttcaagttaaccaattggattgtaatcatcatctatcccctttataaatgaactacactgttgtttttctgacttcgatgtgctttgaagtacagtgtagcatatcattctaccttgaatcctatgataatacagttgacatcttgctgtagtggacttgtgcatatagcacacatgatatagtatattgtattacagtaaactttagacaatgctacttaatcattttacttcatgaagataaactaacattttaaatatgaataatattaatggtctacaaaaaatttgagcacattttaaaatcatatttataaaaaactggccaaattggtcttatttaatgtataattcagaaccactgtgtagtatgtattcttttctctaaatgatgaaatgctaaagaatcatttcacgttgttgaagaaaataccgttgctacaacaacagcagcagctactactgctactactactactactactactactactactactactgacagaaagaattcatgaatgtaaactggaggatatcacagttttctttagtgaatataagtgaactacttgtgcgtgttaggtgtactatttgctatgtattttattttgctttattcagagagaaagttgattactgagtgctgaattatacaatttaggctaggaaactcgtaactttggtatttaataaaagaaactatacatattctgtttgtaatgtaaataatctataccccatgcacaaatatctgtttcctgggtgtgatatattaaagtatgtattcttattttgaggtatcttttggaaataattgaaagagattaaataacaatttatgccacatgaaaaataattacttagaagtagttaggtatcatgtcttatggctttttatgttccattttggctttttttctcatttgctttattactatatgtacttgcatgtaacagtttgtaagcatatattctgacttattttccttctgtcattatctagtgctgttatgccttcctatcagaatcgataagtcaaactcagaggtgtgattttggtgttgaagttttcaggacagagatactatttccatggatgcattttaagtaataaaattaggggaagtgaaatcagaaaatgaaaaatgattacaaaataactttcaggttttctataatcaatggctttaaaaagtagacagtcttaattaattttaaattagcttgctcagaaaggtcatgccatacagtcctatcataaaaggaacactataagaattaagcaatgaacagcatgatttctgatcacccagtgaggactgacagtgtataaaagatacaggtatgctactggatgtacccgataattgtttgagagttttctagtgaaaaactcaaatatgctagcttaaccacagtagtagggggcaaccttattatatgggagagcttcaaaacatactgtcattttgtagaaggagcccaggtaaggatgcctaatcctgtccagtttggctagaactccatagccaaaaatgcagatttggattgaacatttttttgatgggacttctatcaatgcttaactagtaaaaacacatcttttctataagactttagaatactgtggtttctaatgggttcttgaataatgattttgcattgtgtttttctagttaatggtttttggtagtatttaatgatagcacagtttggggttttattgttcttgaagggggaggatattgaatttgtttttcttagagaaaacatcaggtttgctcaaatagactaacaacctgttgtccttaagcacatactaccatgaataaactcaggaaacaattttcaagaaaattcgaatgcagtgctggtgatggggatttttgtgggaaaaaacaatggtttcaagtcctttcacaaagatcaaacttcagcctattttgttagactcagcaatgtctaaaacattgttttttgtaatttattgtcattggtaattcaatataataaaacaattttgatagca

SEQ ID NO: 97207 - DNA, 3615 bp, Homo sapiens
gatctgtatattatccataataagtggcctcatttagaaataaaggtttttataaggcttctgtaaattttacatcatggaaatttagtacaagtgaaactttttttttttccaaaggctttatactgttggtgtaatcttataaataggtcatagttaagcctttgaaaatgaagtatgtggtgttgacactatcctggtgttatataaactgactttcaagttaaccaattggattgtaatcatcatctatcccctttataaatgaactacactgttgtttttctgacttcgatgtgctttgaagtacagtgtagcatatcattctaccttgaatcctatgataatacagttgacatcttgctgtagtggacttgtgcatatagcacacatgatatagtatattgtattacagtaaactttagacaatgctacttaatcattttacttcatgaagataaactaacattttaaatatgaataatattaatggtctacaaaaaatttgagcacattttaaaatcatatttataaaaaactggccaaattggtcttatttaatgtataattcagaaccactgtgtagtatgtattcttttctctaaatgatgaaatgctaaagaatcatttcacgttgttgaagaaaataccgttgctacaacaacagcagcagctactactgctactactactactactactactactactactactactgacagaaagaattcatgaatgtaaactggaggatatcacagttttctttagtgaatataagtgaactacttgtgcgtgttaggtgtactatttgctatgtattttattttgctttattcagagagaaagttgattactgagtgctgaattatacaatttaggctaggaaactcgtaactttggtatttaataaaagaaactatacatattctgtttgtaatgtaaataatctataccccatgcacaaatatctgtttcctgggtgtgatatattaaagtatgtattcttattttgaggtatcttttggaaataattgaaagagattaaataacaatttatgccacatgaaaaataattacttagaagtagttaggtatcatgtcttatggctttttatgttccattttggctttttttctcatttgctttattactatatgtacttgcatgtaacagtttgtaagcatatattctgacttattttccttctgtcattatctagtgctgttatgccttcctatcagaatcgataagtcaaactcagaggtgtgattttggtgttgaagttttcaggacagagatactatttccatggatgcattttaagtaataaaattaggggaagtgaaatcagaaaatgaaaaatgattacaaaataactttcaggttttctataatcaatggctttaaaaagtagacagtcttaattaattttaaattagcttgctcagaaaggtcatgccatacagtcctatcataaaaggaacactataagaattaagcaatgaacagcatgatttctgatcacccagtgaggactgacagtgtataaaagatacaggtatgctactggatgtacccgataattgtttgagagttttctagtgaaaaactcaaatatgctagcttaaccacagtagtagggggcaaccttattatatgggagagcttcaaaacatactgtcattttgtagaaggagcccaggtaaggatgcctaatcctgtccagtttggctagaactccatagccaaaaatgcagatttggattgaacatttttttgatgggacttctatcaatgcttaactagtaaaaacacatcttttctataagactttagaatactgtggtttctaatgggttcttgaataatgattttgcattgtgtttttctagttaatggtttttggtagtatttaatgatagcacagtttggggttttattgttcttgaagggggaggatattgaatttgtttttcttagagaaaacatcaggtttgctcaaatagactaacaacctgttgtccttaagcacatactaccatgaataaactcaggaaacaattttcaagaaaattcgaatgcagtgctggtgatggggatttttgtgggaaaaaacaatggtttcaagtcctttcacaaagatcaaacttcagcctattttgttagactcagcaatgtctaaaacattgttttttgtaatttattgtcattggtaattcaatataataaaacaattttgatagcacctctgtttggctcaaagggattccatatgtttaggcaacccacaaccttaagaacagatgcttggtatttataatgtctgcccattggaacaacatgttaaaatagtactgcccagagaaacttccatacagattgactagtattttctagatagaggtctttcatatatgaagaaggaaaacaaccatttatcttggccctaaggcccacaagaaaacttaggctttaaagtgggcaaagcatatttgtggtattctgtacattctctttctcctggctttccagccccttcatgctatctatcttatttgagcacctcacagcaatactccatcaacgaaatttaccctatccccagaaggattctgtgtgatccttactccttgttccttcctcttcctcttccccaaatcaggatatccattctatcagaacagacatttccagctaaaaaggtgaaaggaaagctatcttattaaattaatttacatttttctgtcagtggctaatagttaattggcattttttaaggaagttgtgcattaatcaagtttttagttgctggatcttcaggcaatctaacaaggtgataattttaaattcagttcctatcacggaaaatattttgggggaaaggaacagtgtgtcccagggtcagagtatctaataaactgtttctttttttgcacaatttccttcctacttcctttctacttctcaatctaccttttctcttaaaaacttttaaactttttaatcacaatgaacttctatgacaaaatgatgtggaggtagacagagattggcgattatttctgtatatgttgtttttaaacccatagttttgtattcttgtttctcacagtacatgacctatatagcataagaagttttattccccccaccccccatcccattcctgttataaagaaaaaaaaaagcacagagagattgaatccaaactactcatggagtccaaatttttccagatcccttttccagattttaggacctagaaatcctttaagtcacaatgttatttcaaaaaaaaaaaaaaaaaaatgcaagccatattaagtatatattggccaactgcaattaaacttctttaaaacatttttgttttacatttcaaagcttattcaggcatttttggcatgtacctcaagatcaatgattgttgaaattagcagaataaatcaatagtgggctatttgcctttttatgtgggaatatagtggcattgatagtgattattcacaacatacattatactcatggatgcactgttcctggttttagtcttacagtgtagtgaattccatcatatactttcaataaaatgttatgcttgatcacctaaa

SEQ ID NO: 97208 - DNA, 737 bp, Homo sapiens
tcaagtctcactgtgtgcacactctcacacatacacacacaattatactaattctagaaaggaaccaaaggtaaataaccagtgtttccattatcactaaatggaaaaattgactggaagttagagttgtgccaattaatcattttgttcatcaactgttctggtaacttatttttttttattggaatcttaaattggaacaactgttacagaatgtatattgctccagttctaaagccagttaaccctgtgccctctaacttatgaaccttcatttcaaaacagtatgtgggaagtcctgtagtttgataagagtaaaattattttaaagaggataatttaccattttactactataaaataagttgatatcagttgaccattttattttttgatggactctttttgttgggagaaagaaatgaatggaagaaaaaaatatgttgcttttatttgaatattgattactaacaacttataaactacattgcaggaaatgaagaaatattttgaaattagcaaaatagcaacagtattcaagtatctgaaattttaatatggtgagtcttagagctttagactttcctataagtgacagtatctaagttattcttaatagtcacacttgataattctgctgaccataagcagctaacctacagttgaagatatttatgtgacatgaatagcctgtgttttaaaaattaaatattttatataaaattgaaactgtgttt

SEQ ID NO: 97209 - DNA, 707 bp, Homo sapiens
ggagggaggatcaacttgagtctgggaactcagccaggaattcaagaccagcctgggcaacacagtgaggccccctacccacatcctctccgtccccgcaatctccttccatcccagggtgttgctgaaaatgtcagatgcaaatttggatagcagcaagaagaatttcttggagggggaagtagatgatgaggaaagtgtgattttgacactggtgccagttaaagatgacgcaaatatggaacaaatggaaccaagcgtttcttcaacttctgatgtcaaactggagaagcctaagaaatacaatccaggtcatctacttcaaacaaatgagcaatttacagctccacaaaaagctagatgcaaaataccagcccttcccttgccgaccattttgcctcccattaataaggtgtgtcgggacactttgcgggactggtgtcaacaactcggtttgagtactaatggcaagaaaatcgaagtttatctgaggcttcataggcatgcttaccctgaacaacggcaagatatgcctgaaatgtcacaagagaccagattacagcgatgttcgaggaaacgcaaggcagtgaccaagagagcaaggcttcagagaagttatgagatgaatgagagagcagaagagaccaatacagttgaagtgataacttcagcaccgggagccatgttggcatcatgggcaagaattg

SEQ ID NO: 97210 - DNA, 1329 bp, Homo sapiens
agatgtggaacaccaagacaagtggctagaaaccttgtacatgaaaacagcggcccacccaaagtttgtcttttcctaggaagttatagagaaatgaggaggtaacagaagagcagtcaataaaagaaaaatttctttaaaagacatatgggtgggatgagaacgaatgattcttactttatctgtagaaattgaattttgctgcaactaagagagacctcgaaaatagtgatttacacaaataaaattttgttccatcaagaaaactgatattcagcagtccaggctgatgcagtggcttcaagagctcttcagcaacccaggcaccttccaggtcttctttcccaattctagtgctagtaactccttcatctcatcacccaacatggctaccagagctccagacatcacgtgtacatctgagttccaggaaaccagacagagggagaaaagaagggcatgcacgctcactttaaagaagacttctaagaagaaccacctaaaattccccaacctagtcccaaagctcacttggctgctttcaagcctggaaaatgcagtctttaagctgaaaaatgctatgacaaaatcagagattgatcatgcctacaatgacaactggaaaacagaaatgaaaccatataagccaagcactcacgcaatctttgtcctcccagttgacttaagaacacttgtgaagaaaatgtggcgtctttagatctcagatcccttgtttccaactggttcaaataaatagacaactcttcattccgatggtacttcttagagataaaccacatgcatgtatcagagaaaacaactctcagcctggtaaatgaacaggaaaaacttgggttagaattctatttctttcaaggtagagagcaaattttcataatctcacatggacatacagaccaagccatgcatggcactatctacataatcaaggcggagaacacaaaaacttggatatgaatgttcacagcagcattattcataatagtcaaaaaatggaaacaaccgaaatgcccaccaactgatgcatgaataaacaaaatgcagtgcatccattcaatggaatattattcagccattaaaaaggataaattactgatacatgctacaacatgtatgaacttcaaaaacatatgctaagtgaaagaagccagccatcaaggaccacaaattgtattattcaatttatatgaaattctaaagtaggcaaatctgcaaagacaaaatagtttagtggttgtatagggctggggtcaggagaggagaataggagtgactgccagtgagcaagaggtttctggtgaaaacatg

SEQ ID NO: 97211 - DNA, 781 bp, Homo sapiens
ccccgacccgggatctctacccaaaaggaggcggttagaacacagagattgatcatgcctacaatgacaactggaaaacagaaatgaaaccatataagccaagcactcacgcaatctttgtcctcccagttgacttaagaacacttgtgaagaaaatgtggcgtctttagatctcagatcccttgtttccaactggttcaaataaatagacaactcttcattccgatggtacttcttagagataaaccacatgcatgtatcagagaaaacaactctcagcctggtaaatgaacaggaaaaacttgggttagaattctatttctttcaaggtagagagcaaattttcataatctcacatggacatacagaccaagccatgcatggcactatctacataatcaaggcggagaacacaaaaacttggatatgaatgttcacagcagcattattcataatagtcaaaaaatggaaacaaccgaaatgcccaccaactgatgcatgaataaacaaaatgcagtgcatccattcaatggaatattattcagccattaaaaaggataaattactgatacatgctacaacatgtatgaacttcaaaaacatatgctaagtgaaagaagccagccatcaaggaccacaaattgtattattcaatttatatgaaattctaaagtaggcaaatctgcaaagacaaaatagtttagtggttgtatagggctggggtcaggagaggagaataggagtgactgccagtgagcaagaggtttctggtgaaaacatg

SEQ ID NO: 97212 - DNA, 521 bp, Homo sapiens
tttgagtgatgtctgatcgtcaaatagcatttggaaagacaagctggtggtagtatgtagaatggattggaggcagaaacagtatttagagttgctggaccattaggcaacagctcagtgctaggccctgtggtaggtgtgggagatacaaaggtgactagggcacagttgctgaactcaagggactcactagttaggagactataggaatatgttaagtgtgaggtgatgaagacctgaaaaacacctttggaaggaaaggaataacaaagtactgctattcttccccactaagtactgctgtgcggaagaacagcagtacttagtaactctctgaattgggggttaagaaaaaaggaggaaccaaagttgactccgtcatgaacagaaatagggtctcaggaggatagctttgatactgagtttgaggaaatggtgggacatccaggagctaggagtacagtttttagtttaaacgtttaattaaaacttaggaaaggtgttcaagctggagaagttga

SEQ ID NO: 97213 - DNA, 580 bp, Homo sapiens
tttgggaggccaggcgggtggatacaaggtcaggagatcgagaccatcctggctaacaaggacattcaaaggatctccttacattttcatgagtacagttttaaaatcattgcatagactacctcttaagactcaaacaacccgcattcacagagcattttgtatagatatatggataagtccacaggagaagctgccttttaaaacctatgcacatcctgactgcttccaggtggccccaatactactgtgtaccttcagcatggacccttcaacatgaagccatctctgccatatgcccaacatgctcaaagtactccccctaaacctgaaatagataaagttgcaaaaggaatatttaaaagtgcagttaatgatgtttctaggtgataagtgcaccaaatgaatgtgtctacttttatatctaaaagagtgttgaaattatcttactgagttatttcatgaaacactgatctagataatctatttaaagccccaattgaatttagtggcttaatcccttgaatgatattgcaatctacccatagcttcatgatttgattgaattaaacttgaataa

SEQ ID NO: 97214 - DNA, 486 bp, Homo sapiens
tagtcactcttcccagtgcagggagcacagtacatgaaattccgtaactgagtaaccctttgcaggcactcactcactcaattctttcctaaaacacaaatgcctctggagggaaaccagaagatgctcttaatgacagaaaagatcaagagggttagtatcaggaaggagagaagcactgagaagacaataagatgaagaaatgaaaagcagtaggacagggatgcttcatctagtcgctgaaggttcaaatcttgttgggataaatgcagccccaaaaaaggacaacagaaagacacattcttgccccacttctgtatcctaaatcacccagggcacaaaaaagtgttatttcctagcatgcaggtccagcctaaaatttgtacaagatgcaatgctttgtcaattcctgtccaaaggaccaccaagacggccaggtgctgtggctcatgcttataatcctagcacattgggaggcccaggtgg

SEQ ID NO: 97215 - DNA, 1471 bp, Homo sapiens
agcggagctcagtgtagggggcaagctctgcaagaccttggccgagtgacttctgctgctttttgctgtggggactctactggatggaccagcacatgagagagatggagtttggaaacaaaacaagtggttcagaaacatgggattgctttcatatctactggcatttagaaggagcttggtaaatttaatcaagaaacaaggaaatgaaaatacccaaggaacaccaggggaagaataatggttggattttcatttaatttgccagacacaatccctgaagtaagaaaataccgtttctcatgaaattccggcacccgaggctcaaacggccaaccctacggttaacagccgaacgcgctaaccaattgtgccacagaaatgaatgtggtggaatatctccattccaacaaggttattttactttttttcagtctaaacaatacattagaaaggaggctacttctccgtgtattggaaaacatgttttccctttttttgactctcattgttgctatgttaatgtgttttaaaaacggaggtttataggcttgccgccgtggctcacactgtaatcccagcactgtgggaggccgaggcgggcggatcacgaagtcaggagttccagatcagcctggccaacatggtgaaacccatctctactaaaaatacaaaaattaaccgggcgtgatggcgggcgcctgtaatcccagctagttgggaggctgaggcaggagaattgcttgaacccaggaagcagaggttgcagtaggccgagatcgcgccactgcactccagcgtgggtggcagagcaagactccgtttcaaacaacaacaacaacaacaacaacaacaaaacacagaggtttgtaataatacagatattattcttaggaacataagagtgttaattgggtggagagcaggacgcgggactggtgcgttttgcaaaataagtatgagtagaatcaaaggaaagaatttattttcggttcaataaggaagttttcactgatagttcagttgagagagaaaccactggaaggctgttgcatagaaggaaatatattaaatgagaaagacaccagcaagagcagaggggaaaaccatttaatggaaaatctgatacaaatattaagggaaagtaaggggccaaacaccaggacatgaaaccagaaactcctatacattagtgcttgtccaccaaactgcgagcctgaaattgcgatcatactttatatttgtgttttaaagagtaagttggtgacagattttatttcttttctgcctgtcttcctgcttcctctttttctttctgccttcctctcattctccagtatgtataccttctaatcattttcttctgggttttattctgaatattaggattttctaaatttgttcctgtttttctcattttcttaagcatatgtgggttgacctttgaagtacgatgatgggtagggggtgg

SEQ ID NO: 97216 - DNA, 160 bp, Homo sapiens
tgttaagctcttacggggtaacttactatttaaagcaaactcatgacaatgtatgaaaggattataatgcaaatagaagtaaaacatgtgacagcataatggacaaggaagtaataaatgtcaggttcttatattttacgtgagatagtataatattaat

SEQ ID NO: 97217 - DNA, 186 bp, Homo sapiens
aggtctccacaggggtctacacatcaggacacccggtgtgaattaagtaggtctccacaggggtctacacgtcagaatacccggtgtgaattaagtaggtctccacaggggtctacatgtcagaatacccggtgtgaattaagtaggtctccacaggggtctacgcgtcaggacaccggtgtgaat

SEQ ID NO: 97218 - DNA, 183 bp, Homo sapiens
aggccgaatcatcagaagccaagccagtgacaataaacacaaaggtcccgccctctcccaaggagacatgtgtctactacatgggaagaattgatcaagccctttgtatttcatagagtgtcacttgttactcagaataacaaaggatgaagcagaattattttatagccctgtttttacttg

SEQ ID NO: 97219 - DNA, 249 bp, Homo sapiens
attttcacatggttatatacttggattcttttagtatagtcactgaagacttttaaaaacagaaatactgggccgggtgcggtggctcatgcctgtaatcccagcactttgggaggccaagatgggtggatcactaggttaggagttcaagaccagcctgggaaacagtgagatcctgtctctacaaaaaatacagaaattagctgggtgtagtggtgcctatacctgtagtcccagctacttaggagg

SEQ ID NO: 97220 - DNA, 708 bp, Homo sapiens
aggcaccaaaggccacacattccagcattccactccaatgacatacagacagatggtaactcagtggctgccaaggcctgaggggaatggggagtggctactcagtggttcagggtcttttgggggtgatgaaaatgttgtggaactggatagaggtggtggtcatacaacactgtgaatgtactgaagaccactaaatcgtacgctttaacgcggcttaaaaattgaggacgaagtatcagtttgggaagatgaacaagttctgcggctggatggtggtgatggctgcacagaaccgtgaatgtgcttatgcccctggaccgcacacttaaaaatggtgaacatgatacaatttaggtgatgtgtattttaccataattttttaattaaaaaaaaaaaaaagcagcagcgagctcccacagggcctgttaggaaattgtttttcatgactgacatggcagattttacgtaaagtgcactttgccacaatgccaatgtggaaatataaagcaagcgcagtgctcccacggctgggcagaatgtatggggcaggtgctcgcaggctctgagaagcgaatgtcagcaggtgggtcagggaggaacaccaggattccgagttctcctgcagactggcagggagctggccgtgccaccaccatcacggaagtgggtggtttatgtctggaggacaggaaaagggagccccag

SEQ ID NO: 97221 - DNA, 237 bp, Homo sapiens
agtgtgttgagttaggacatcgcaccttctcatgagcaacagattttttgcctcaggaaaatggaaaggagaaaaggaaaaatataaaacaattataatgttcacttattaggtaatcatgtcagtctttctattgtgaaacgaatagcatagggtcttagtattatgtaaggaaatttgagttcgtgtaacttgaataataaatatctctaaagaattttcaccacatgtaaagca

SEQ ID NO: 97222 - DNA, 362 bp, Homo sapiens
acattggtcctgcgcgaggcctggccgccggcgacggcgggacgctctgggaggccggcggtgctcgggcgtagagggagacagctgcccgggggcacggacgagcggctctgggggtcccggatccgagccccgctgccccggggtggcggtgacgcctggagccgggcggacgtggctgggccgggctgtcggggcgggcaggcgccgctgccggtgtctaggccacaccaccctgagcgcgccccagctcctctgagctcgtgaagctaagcagggtccggcctggttagtacttggatggattccgcctgggaatagcgggtaccgtaggcttttggcttcccgctccctccctcttt

SEQ ID NO: 97223 - DNA, 303 bp, Homo sapiens
aaatcataatataaagcatgccctgccttcagagaatttataagctagttggaaaagatgtaaggtaatagaaattataattcatggtctggtgcagaactgtaataaatttacatctataatctacctatatgctatcatataagtggcataacttgttgctttatataattattacaacgaacttataaaatacatatgcattttcagataagggaggtgagcctttaagagacgtattagtgcagaataccgggaatctggtctcaaatccatatttgttactctattttatatgttgtt

SEQ ID NO: 97224 - DNA, 220 bp, Homo sapiens
cagccccacacgaggcccatcccgtctcagcataggcttccttctttccactgttcctggagacccagcaggctgtcatgggcctttggtcctacacagtccactccagtgccaccaggcttctgcagccatcatttcccatgtgcacgtgggaaagaactaggccaggcttctaagttatctagaccttcctttttttttttttttttttttttttttg

SEQ ID NO: 97225 - DNA, 583 bp, Homo sapiens
  misc_feature (573)..(573): n is a, c, g, or t
tcaccgcttataccttcaaaactggaggaaagtattatctacattttacacaagcagacataaaaaacagataatataaaggtagaaggaaaatatgctagtacacggtgttttaggaggtcaaaaataactatattaaaaggcaaatataagtcaatgtaagacttaggctacctctaaaattggaaagagattgcttttatttggaaagcaaaggagtttggtcataagtggtggcttttgaagttcagctggatttttcatatgggaattgaaacaggaagcatattatgaagggggaacccctgtgaaaaattaattggtttaggtgttccctacttaagtgtacttgattacaaaatttggttttattattggattagagcagaagttgaaaatatgttgtgatacagtggaaataacagataatataaaggtagaaggaaaatatgctagtacacggggtctcaggaggtcaaacataactccattaaaagcaagggcccttggtacagaattttggtctgcaaattccacaaaagcaaacggagttggctgagtctcatcacctgncatccgcaca

SEQ ID NO: 97226 - DNA, 675 bp, Homo sapiens
  misc_feature (665)..(665): n is a, c, g, or t
tcattgctatcaaatatcactcaataattgcatgaggagctgtgggaaatgttgtagattcctggcatctttggagaaaacaatttttttctatgtgtttgcaagattagactgatatagcttaattacttgtggcatccacactccttagataaaaaacagataatataaaggtagaaggaaaatatgctagtacacggtgttttaggaggtcaaaaataactatattaaaaggcaaatataagtcaatgtaagacttaggctacctctaaaattggaaagagattgcttttatttggaaagcaaaggagtttggtcataagtggtggcttttgaagttcagctggatttttcatatgggaattgaaacaggaagcatattatgaagggggaacccctgtgaaaaattaattggtttaggtgttccctacttaagtgtacttgattacaaaatttggttttattattggattagagcagaagttgaaaatatgttgtgatacagtggaaataacagataatataaaggtagaaggaaaatatgctagtacacggggtctcaggaggtcaaacataactccattaaaagcaagggcccttggtacagaattttggtctgcaaattccacaaaagcaaacggagttggctgagtctcatcacctgncatccgcaca

SEQ ID NO: 97227 - DNA, 385 bp, Homo sapiens
acaagtacatgccctaatgtgaaagccaggatacgggttacttttgggaaaacagaagcgaccgtgattgggagaggcataggagggactcgggaagctggcagcgttctatttcctcatggccagtggtcatgtaagtgtttcattggcaataaatcagtgaactgttcattttcatcttatgtattttctgtatgtttattagattttacaattaaaactgttaaagctaatctaaagctaatttgcattttaaacaagactgatagaaatttaccacagaataagttagtcatttctcttaaatgtttcctcacccactaaattctagatgggtcttgctagaggaacagtattgtaactagtcctaaaacaatgaatgaaa

SEQ ID NO: 97228 - DNA, 411 bp, Homo sapiens
aaggcaggagcgtgggcgtcactgaaggaaggcagcaccgcagggtgcacggagccaacatccggcctgagatcaggtgctatcaaggctttgcttttacatggggatgtctcttgcacagctgggccactcagaaggaccgcagaaagatgtggttcttagaatcactgattggaatgattcagaaattcctttatgaggatcctgcttatgatgagctccatgaagacttagaggaaaattgaaagagttttgttcatgactcaaggttcagcctgacttcgaaattagtgcagaagcttctggactttggtttggaggacgaccgatggatgaacaaagatgaaacatcaaggaacacaggtccctctgtccctctgttcagtgtttaaaatgtgactgaaggtcaga

SEQ ID NO: 97229 - DNA, 650 bp, Homo sapiens
tttagtacgggtaaaagactcagtgaaggtgaagccagtaggcatacaacttttgggttatgggaagaagaggtgccaactccaagaccaaagtttcaggctcaggcagaatctgttctagacctttcttccctacttactctccctggacaatttcatggcttccatttatatattgatgactcccaaagctaaacatccacctcacccctctctcctgagatccagtcctagcctatgtagcaaacctgctggatatctcatgggcctctcaaactgttcttttagctatcctcaagctttccacagcaaaaggagctatattctctcataatagttgttcaaaggctctcacatataaaactctggtcccagaccttcatggctttgccttcctttaactacattgtatcctgaggcctagaataggactatgagctgggactgtgtgattttttttccatggcactgatgttggtaattatgggcttagacacttatttaagtagatgcttataaatgtctaagcccgtaattaccaacatgagtgccatgaaattgaatctaagacacttaagttcaattcaagaaacctttcctaggcaccctttctgtgcaagacctatgcatgatgctgggcagacagaaga

SEQ ID NO: 97230 - DNA, 509 bp, Homo sapiens
cagcgttcagggtaatagatggcccccaaaaatctaagtctgctcatgccacaagttcaacgtagctgtcagccaagctgctaaagtacccaccatctctaccaattacatgcaatgtagcagaaaaaaggaggggaatggtgccctggaaaatgaagagtagaggttctgaagaatcacattagattaggttgggggaggatggcaaaagaaaagggagtgaaaatgttattagaaagaggagaaagaaaagtgaaatgttagatagggaggaatccactacatgcccctgtgctccaggagtaataatgtgttcctttgagctcaagattgaaaaaaaaaaaaaaattgacctctgctatagcttaatgcctaaaacaatgcctggcacatggtaagcattcagtaaaatgttgaatgaaacgtaatggatggatgggagggttgaatctgtttagtctgtttaaaagatgttttaaaaacatcttggttcattctgcttctgggcc

SEQ ID NO: 97231 - DNA, 111 bp, Homo sapiens
agaattgatgagaacacaaagtccaaggacatgatgatatttaccaaggaaagagcagcttctgctgggtgtagtagctcacgctggtaatctcacaactttgaaaggctg

SEQ ID NO: 97232 - DNA, 199 bp, Homo sapiens
gcacttatctttaatccactgatgaaaacaaattttagaacaccaaatgttatggaaaacttgttggtcatgagtgttactatgggtatgctatgttccagcttttcagttttaggaagcttgggtaaatgtctgctattcccttgtgctgcagccctcccttctcccatttcctttttgggtactatggatagtttgc

SEQ ID NO: 97233 - DNA, 226 bp, Homo sapiens
aaagttggctggaagtaccagacagtgacagccaccctggaggagaagaggaaggagaaggccaagatccactaccagaataagaaacagctcatgggatggccgggcgcggtggctcacgcctgtaatcctagcactttgggaggcggaggcgggcagatcaggaggtcaggagattgagaccatcctggctaacatggtgaaacccagtctctactaaaaaaat

SEQ ID NO: 97234 - DNA, 454 bp, Homo sapiens
ggacactggagattacattttccacggaaaatgtcagccactgccgaaaataggactttggagaaaatgctagaaagtgtatttttaggctatatatttccctcctggattcctacagtccagtgggctgcttgatactccccagggttcagctgccaggtgcagaccccaaagcttccaaacaggtggtccggggagagggctcccgtaggaaaaaaaaatgcctgtaggccaaaaacaggtggaccaatgcaaggacctgtttccagtgtcaggaagaaggaggtggaagagagccagccatggccggggcctcagattccgcatggctaacgagcttcggggagatgccacagatgtccggagactgtcctttgagtggcaagagacaagaggaggcagggctcagttagactgcggcctgggaagggggagcttctccaagcccaccctg

SEQ ID NO: 97235 - DNA, 861 bp, Homo sapiens
  misc_feature (861)..(861): n is a, c, g, or t
tcagtcaatggctcgctgcccatcaattacactttctttgaaaaccatgttgccatatcaccagctatttccaagtatgacagggagcctgctgaatttaacttaaccaagaagaatcctggagaagaggaagagtataggtgtgaagctaaaaacagattgcctaactatgcaacatacagtcaccctgtcaccatgccctcaacaggcggagacagctgtcctttctgtctgaagctactacttccagggttattactgttgctggtggtgataatcctaattctggctttttgggtactgcccaaatacaaaacaagaaaagctatgagaaataatgtgcccagggaccgtggagacacagccatggaagttggaatctatgcaaatatccttgaaaaacaagcaaaggaggaatctgtgccagaagtgggatccaggccgtgtgtttccacagcccaagatgaggccaaacactcccaggagctacagtatgccacccccgtgttccaggaggtggcaccaagagagcaagaagcctgtgattcttataaatctggatatgtctattctgaactcaacttctgaaatttacagaaacaaactacatctcaggatggagtctcactctgttgcccaggctggggttcagtggcgcgatcttggctcacttcaatctccatcttcccagttcaggcgattctcatgcctcgacctgtaatcccagctacttgggaggctgaggcaggagaatggcgtgaacccaggaggcggagcttgcagtgagcagagatcgcaccactgcactccagcctgggcaaaagagcgagatctgtctcgagaagaagaagaaaaaattcn

SEQ ID NO: 97236 - DNA, 708 bp, Homo sapiens
tcagtcaatggctcgctgcccatcaattacactttctttgaaaaccatgttgccatatcaccagctatttccaagtatgacagggagcctgctgaatttaacttaaccaagaagaatcctggagaagaggaagagtataggtgtgaagctaaaaacagattgcctaactatgcaacatacagtcaccctgtcaccatgccctcaacaggcggagacagctgtcctttctgtctgaagctactacttccagggttattactgttgctggtggtgataatcctaattctggctttttgggtactgcccaaatacaaaacaagaaaagctatgagaaataatgtgcccagggaccgtggagacacagccatggaagttggaatctatgcaaatatccttgaaaaacaagcaaaggaggaatctgtgccagaagtgggatccaggccgtgtgtttccacagcccaagatgaggccaaacactcccaggagctacagtatgccacccccgtgttccaggaggtggcaccaagagagcaagaagcctgtgattcttataaatctggatatgtctattctgaactcctgacctcagatgatctgcctgcctcggcctcccaaagtgctggaactacaagcctgagccaacgtgcccggccctgaatcgctttagtaaataaagggtctccaagaataaattcatccgaacatgca

SEQ ID NO: 97237 - DNA, 805 bp, Homo sapiens
  misc_feature (738)..(738): n is a, c, g, or t
  misc_feature (755)..(755): n is a, c, g, or t
tcagtcaatggctcgctgcccatcaattacactttctttgaaaaccatgttgccatatcaccagctatttccaagtatgacagggagcctgctgaatttaacttaaccaagaagaatcctggagaagaggaagagtataggtgtgaagctaaaaacagattgcctaactatgcaacatacagtcaccctgtcaccatgccctcaacaggcggagacagctgtcctttctgtctgaagctactacttccagggttattactgttgctggtggtgataatcctaattctggctttttgggtactgcccaaatacaaaacaagaaaagctatgagaaataatgtgcccagggaccgtggagacacagccatggaagttggaatctatgcaaatatccttgaaaaacaagcaaaggaggaatctgtgccagaagtgggatccaggccgtgtgtttccacagcccaagatgaggccaaacactcccaggagctacagtatgccacccccgtgttccaggaggtggcaccaagagagcaagaagcctgtgattcttataaatctggatatgtctattctgaactcaacttctgaaatttacagaaacaaactacatctcagggtaagatgctttttatgaagctgatttccatgaacaaaaagcaaacttgaggctgaggcaggtggattacttgaggtcaggagttcgagaccagcctggccagcatggaaaaaccccatctntactgaaagtacaaggnttagccgggtgtggtggtgtgtgtgtgtggtcccagctactcgggaggct

SEQ ID NO: 97238 - DNA, 252 bp, Homo sapiens
atccatttacttcctgcataccaccccaccatccacctagtaagccattctagaactattaggaatcaacatcaatgtccccttctccagtctgactcttccataccagctaaccctgtcctatcatccctcagctggattagtacagtagcttgataattcatcttcatgctgcagtcctgatctcctaaaattcattctccattccagggtattctagaaggacttggaggaaaaaatcccctaagtaga

SEQ ID NO: 97239 - DNA, 877 bp, Homo sapiens
ggctccggacctggcgacgcacgaccgagctggtcacttgctgccacctcgcaaaggcgcatctctagtccagtggtgagctgcggccgggtcgctgcaactcgctccaggccttcggactcgtggcctcggtgtccctcgcggagccctcggtgtgtcgcttgcaggctctttttttgaagaaagcagggagggaatggccttgtgagagactccaggagcaaagagcgaccctcacaaggcccaagtcctcccagagctcagggaagctgtcgcttctgacagaagaagggagagaaagctccctcctgtgtgtccctggtggtctagtggctaggattcggcgctttcaccgccgcggcccgggttcgattcccggtcagggaattgttttacactggccgccctcccgcaggaatcttccttcactacgctgtcagccggcctgctccaagggccagaagcagaacagtctccgcagcggggttaaagccgggcgaaggagggcaagtgcttgtggaccacctctcacgacacaccgttcctatttgtctccgtgtccgtcatccgcgggagcagctttagagagcgactgagcttctcgctcaggtgtacacagcccggcagagatgccagcccccgtggagctgcacccaataagcccaccttctttcccgtcgccaccccggagacgcccatcgggctgagctgcgaataactaagagagaggccaagccaagtcgtggcgtttgtggcagccccggacacgggcaccagccagtcagcggagcctcctcacctccgttgccagcgaaggcgctcgttaggccttgggaagaggcgaccggaggcgatgcccgcgaatttgttagggggg

SEQ ID NO: 97240 - DNA, 251 bp, Homo sapiens
ggtttcagtcctaaccagctcagcaccctaatggcttccctgagactggtgataggggctctgtaaaggacctcttgtcctgtatgtactcctttacaggactaatgacaggctccacaccttaaacataatagcttggcctggtctgttccttctggctgatgcttaagaccatcttcgctccacctgcaccttggagtgcatttttgggattttccctttcatccataccccttacttgagaatgctgt

SEQ ID NO: 97241 - DNA, 403 bp, Homo sapiens
ttcatttctttcaagtctggtggtttgtcactgcatgtacacttcattacacagacagcaaagcatgtagttgtgttgtagtgctaaacccaccatgacattttacaagaatacataatcaaaagagggaattgaccaacagagaagaaagtacacaaagaaacaaaagtatatggagttatagaagcagcagctacctctgggaatgttgaccctgcagtcactcaagagactctagatattggaagctgatccaaacttagaaaggagtatgacagtttgccacaggacaggaaaaatgtcactctatattataagctatgcaatgagaagaaaccaagccctgcttaaacgactctttatatgtaatttacaaagacagaaaacattttaattctcaaag

SEQ ID NO: 97242 - DNA, 371 bp, Homo sapiens
agatcatcaggaattagattctcataaggaacacacaacctagacccctcagaggtgcagttcacagtagggttcatgctcctatgagaacctaatgttgcagctgatctgacaggaggcagagctcagctggtaatgctcactcacctgctgctcacctctttctgtgtagctcggctcctaatagacctgtatgtgtccatggtctgcgagttggggacccctgcaggaagtcttgtaaatgcatgtcaggaaacttactgtttacagccacatagtttgtagtagtaagaaactagaacaattcaaatattcatcaagagaaaactggataaattgtggtcaattcatatgttcatacagaaaaaaag

SEQ ID NO: 97243 - DNA, 355 bp, Homo sapiens
cgtccctggccttcagtcagggttctgtctgttgactctccaacctcgaaagcagcagcggtattgtttctgagaaagtttgtttgcattgcttaggaaccgtaacaagcctctcttcataaggataggaagaagcccaagggcattagtgggaggcggataagggagcctaacttcccagtttggctatcattctttgcaaaatcacttctaatctccaaagaggagggggtttctcctctttcaagttgcttagaagggcacccacagatctgcttatttctcacagcatctctctgcccttgcaatctttcctctccacctcaccatccacttttagtgcaattagtgaatt

SEQ ID NO: 97244 - DNA, 744 bp, Homo sapiens
atgcctggctaatttaaaaaaatttttttgtagagacagggtctcactatgttgcccaggctggggtctgaaattcctggcctcaagtgatcctcctgcctcagcctctcaaagtgcatttggatattcttatactaatatgattattcttaccccctccttcatctacacctatttttgccttataataaggttttatagatttatttagcacaagaatgagctgatggttaactagataaagttattcaacaaaccattttccctaggtatttcatcctgaggaggctttaactccatcttccagtacgctttaactccatcttccaatatgctttaactccatcttccaatacacttgatcgtcaatatcagatcatgaaacttatttacatgaggtagtttagtcttaccaacaatgccagtattacatctttttgtgttgtgaccatggtataattcaatttcataaaaaagcaagaatttcaaaggtatttgctcttcctttcccacagaatctactcttgctcacacaagggcaaatgtcagtacaattagacaggacagttatttctgtaaattaattgggaacaaagccagtcagcccatcttatctctcaggtttgtactgaggctgagttccattgtgtgttattacacagcagggcccacctcacacctatggggaggacacagtaatatttacaagacctcctatccttattaactgtctcgtgggatata

SEQ ID NO: 97245 - DNA, 295 bp, Homo sapiens
cttttaagtccttgaatgcagaagggctcctttggaagattttatgcaagagaatgccatggaaagattatattatagtggatcactctggaagtgtcatgcggaatgaatggagaggtaggaagcggggttgggagagcaaacgtaaatctaaggtccaattgggaggctctgttggaatgagctggcgagagatgatgagggcctgatttaaggaacgattgtattgaaggcactaaggtattggcattcagcgaatgtacatgagtctcaactttctggtttacatctgaat

SEQ ID NO: 97246 - DNA, 645 bp, Homo sapiens
  misc_feature (604)..(605): n is a, c, g, or t
  misc_feature (638)..(638): n is a, c, g, or t
aagtagtattcctccatatgtctacatgttccaaatctatacaggtttttcaacacggttctcttcctctgctgctgctggctgtcttgaccattacacatcttttcttaatccttttctttgccaataacttttttcaataactcagttaaaatttatgactttttagcctaaatgcaaaatacttaatctttgatgacaaatttaaaagagcataagtcatctcatgactcatgagagtactatagtacttacagatatattaatgccggcagttccaagagctacggatcttcaacagctgtcagaggattgtgattgagaattctgataaaaatgcaatgaaattaaaattacctgcattttcaatgtgtgaaactgcatcaaaagcttatattcattttttgttatggaacttttaggttaaaaaaatcattttctgtttttacctaataaatcaccattagaatctgtaaagcactattcctttgggaactacctaggtctctagaagatagaggagagaaagaggggaagaaatagaaaaaaaaaaaacaagcggatagcaaagaaaaaatatgctgcagtgagctgaggtcacgcnnctgcactgcagcctgggtgacagtgagactccntcttata

SEQ ID NO: 97247 - DNA, 848 bp, Homo sapiens
aagtagtattcctccatatgtctacatgttccaaatctatacaggtttttcaacacggttctcttcctctgctgctgctggctgtcttgaccattacacatcttttcttaatccttttctttgccaataacttttttcaataactcagttaaaatttatgactttttagcctaaatgcaaaatacttaatctttgatgacaaatttaaaagagcataagtcatctcatgactcatgagagtactatagtacttacagatatattaatgccggcagttccaagagctacggatcttcaacagctgtcagaggattgtgattgagaattctgataaaaatgcaatgaaattaaaattacctgcattttcaatgtgtgaaactgcatcaaaagcttatattcattttttgttatggaacttttaggttaaaaaaatcattttctgtttttacctaataaatcaccattagaatctgtaaagcactattcctttgggaactacctaggtctctagaagatagaggagagaaagaggggaagaaatagaaaaaaaaaaaacaagcggatagcaaagaaaaaatatgctgcagaacttttcaggtcaaaaaccctagaagtgactatgttggtaggaagccctgactctgcaggaaacactatatctagtgtcctccataattcaagttgctcgggttttttttgtttttgttttttgagatggagtcttgctctgtcgcccaggctggagagcaatggctctatctcggctcactgcaacctccacctcctgggttcaagcgattctcctgcctcagcctcctgagtagctgggattacaggtgcctgccacc

SEQ ID NO: 97248 - DNA, 413 bp, Homo sapiens
aattataaacttttttctactctaagtgtaatgcacttatataaggctaagaaaagcatattttggcataaaaacaaaatccaagaagaaatttacttttgtaattccactatctccaatattaaaaatagaaaatgagttggaattctgttgtttttccctgaaaatttatagcttgttttctgatgttgttatgagaaggcattgtctgaaatttgaggatttagttcttatttttgaaatgtagtaaactaaaaccaattactttgcaactaattttcatgaccactttatggttattgttcatgaatctgagtctaaaagcagttgtttctacttaggaatagggcatagtagggtatggggcttggatactaataaaggacatgtgctgtgtgcacctaccgtcccat

SEQ ID NO: 97249 - DNA, 351 bp, Homo sapiens
agttgtctaggaagaaatatattgcttggagcctgaaactaaataattttgcacatgaaacaattgattctatgagtgtaggaaggtttgatttagtttgcatgtttaaattgtctatggtaataagttgttctttaagctttccttaaagaaatcaatttccctggattgtatcatgatgtgtaagagtgagtgtggcattttttagtaagcttattatgaaataatgaccaacacctccaggagatattcatagaggatttttttttttaattacaaagattatgtaacctctcctttcttacttgaaatcttaatctagtaaatcatagaggccatggtgttataaaa

SEQ ID NO: 97250 - DNA, 496 bp, Homo sapiens
aggtaggtaattagacatgtacaactaatactatacccaaactggttttacaatgctgaaatgcaaatttacatcctgagaatatgaagagagggtttacacacctcaaaaatcaaatgctgtttatacctgagctatatgacagctataggactcaagttataagcaataagagccaataaattaatactggtgaaaagggacttttctgaaaatactttgaatactagactatgcaagaaacccagcaggaatgtaggaaaaaaaaaacaggaaatctaagtccattatttgttttccttattatctaaacaacaatattaaaaagaaacaaataatggtttctaaataccattctccactaaaaggaactagagctctttggacaagtggatgattctaggacctaggcagaaaaatataaagatgagtttggaacatcttgttgcatcagaaagcaagaaatgatcacagaatgatgcagatacgtcaaaag

SEQ ID NO: 97251 - DNA, 199 bp, Homo sapiens
tgcccaggctggggtgcagtggtgcaatcatagttcaaggtaactttgaactcctaagctcaagccatactcctgccttggcctcccaaagtgctgagattcaggtgttagccaccatgtgctgcctctactttctttttaaagggggcaaagagtgaaggaaatactgtgattagggaagtggcaacgaggtgggagg

SEQ ID NO: 97252 - DNA, 119 bp, Homo sapiens
acgagaaagagatagaaaagtgaaaggtgtatgtgagattcccactcttgattcacctctttggctgaaatgcaatgtttgagtgagttttgttccacttgtttgttaggtattttctt

SEQ ID NO: 97253 - DNA, 284 bp, Homo sapiens
tatgatttgtatgacgttccataaaaggcaaatctatctatagtaacagaacagatcagtggttgcctcgggttgtgatagtagtgagatgagtcagcaacaaaagagaaaataaactgaagtaaccaaaaattataagtgttatgaaggaaacaaagcaggtggcagtatgtataaaggccctaagttggaaaagaagactgttgatggagtatagtgaacaaaggagtgagtggtgggagagctaaataagctaccaggtcatgcggaaagagtccttaaaa

SEQ ID NO: 97254 - DNA, 358 bp, Homo sapiens
cccttttattgacccagcacagtacacagtaaaatgtcatgccatttgcatgtaagtatgtttgataaacactataatgatgtaaatagccccagaattctgaatgccttattttatgatatatttataaacagccttattgaggttatgattgatatataataaactacacatcttgaaatatgtgatgttttgacatatgtataacctaagaaacatcacaaccaagacaatctatcaccaccatcacaaccaagacaatctatcaccaccaaaagtttattcatgcccctttaatccttcctcccactctgtcccaccattctccatccccaggcaatcactgctctgatctctt

SEQ ID NO: 97255 - DNA, 596 bp, Homo sapiens
tcttacaggaaatgcagggaagaaacataccctgggcctgctgcctacggacataaggcacagatctgaatttgtatacacaaacatcttcatcctctgaagaggacaaaaataccaacattcttgtattttccaacatttttcaaaataaggtaccaaaggcttaagaaactgaagaaagctgaaagaatccatgtcagaactcaatgatcgctattatttcaaggacccagagtggaaagaagagccaatgcatgaagaaccagacgccagacaggctagtggtcctacccaaagacacagctctctactggcaagggaagaacaagtgtcttttaatttctgggcctctgaagtgccattatcaatagtgcactaatcttttataggtagtagtaatgaatactttaaagggattaggccattcacaaaagaatcaaacaactgtaattattttttaaaatcctcactcatttatcgtcctctaaactcccaaatacaatactttaaatccactggggcttcacatgtacctagttgatacaaagttcccaatctaagcttgcaacctcatcaaaatacattattatagtacc

SEQ ID NO: 97256 - DNA, 401 bp, Homo sapiens
aattgaagggttattctctttggtgaaaaaattaggagtgggttgttacgacatgaaatacagagggcccttcccttttttgttttgaaacttagccattattattgtgtgacttacaatatgtattttaaaatttatattattttacagatctcacaaatctatgaggttgagagggcagatatactctatggatgagaaaacttaggctctactcgttcagggtcacactggtgacagctaagtcttttcagttacagcctgtgccctttgacatgttgcttttttcctctccccttattgtacatgccctagttccaggcctttgccattctggtgtttgaccatggctcacaaatctcttgctaatatctatccactccaggtaaaaagtctgcctg

SEQ ID NO: 97257 - DNA, 715 bp, Homo sapiens
aagggggtcaaagaaatattaaaaactttgtagtaatcatagctaacacttttattcagtacacttaaagcttttaacatttctgtgaggcaagttatgttatatataaaaaaaattgagtcttggatgtatgacattgaaggagttttagttttggttttggtttagtttttgctaactagcagtctaggtttcaaccaggcagccgggctctaaagttcttagaacatgtttgcatgctgtactatgcttctcccacaggatactaacttaaactgtggtggagcatgtcattatttaatgttttgaaatctgtaaatttatttctaaaatctggattgtgggaacactgaaagaatatcctcgctaaagaatgaaaatgggccaggcatattggctcacgcttgtaatcccgactacttgggaggctgagatgggaggattccctgagcccaaggaggccaaggctgcagtgagccatgatcaggccagtaaactccagcttgggcaagagagtgaggccctgtctcagaaaaaaaaaagaaagaaaatggaggagaggaggtctaaatcaacaattacagatgaagtcagattaagtacaaatctgtaagggatgtaaagcatgtgaattaactagaaagatggtattaaactgaggatacttttttttataagtgagacggagtttcactcttataaaaagtaaaggttg

SEQ ID NO: 97258 - DNA, 328 bp, Homo sapiens
tggttccagtgaccatggacctggggttcagggccagggttggggatgggcattccagggccagggttctgaggattcggaaatcagggctggggctgggtttggtgcgcacagacccggtttctggggtttgggttccaggaactgttaacaggggttctgacagggttttaatattggagtttcgaggtcaggatttgcagacaggagttcagaggcagggtcccagggtcaacggtcagctgctggagtctggaggatggggttcggggattcagggcccaggtcttcaggtctcgggcttggggatcaagacaggggtctgggc

SEQ ID NO: 97259 - DNA, 523 bp, Homo sapiens
gctccctctggttgctggtggagatgagactacggagggggggcagtgaagatcccagagaggaggctgctgtaatggtccaagcagaaggtgatagtgatttggatcagggtaacagagccgaggtggtgagaggttgacaggtcatgcatctatttcgaaggaaaggccatgtccaggctccttagctcggcattcaaggcttctctccaccactggacacacttactctctagcttctcagaccctgttgcagatagaatcatgatccccaatgatgtccacatcttaatcccctgaacctgtgaacaggtgaccttccatggcaaaagggactttgcagataggatgaagttaaagatctttagatgggggagcgattatcctggattgggtctgggtgggctcagtggaatcacaagagtccttatatgaggaagatagaaatttgagacatacggtagaggaggaggtgatgagaccacagaggcagggacgggcgtggtgcaaccacaagccaagg

SEQ ID NO: 97260 - DNA, 569 bp, Homo sapiens
ttattaactgtagtcctcatactgtacatcgtatctccaggcttagttatcttacataatggaaacttctgactctttgacctccatcttctcatcccctctccttccagtaaccaccttcctactttctgtttctatgtatgatgcatcttttccttgaaaattgttttaaagtttgcaactacaagaacagttatttagacttgaccattgcatttgacatttggtttttagcatctgttctttttttcagagatctttgcccgaattcattgatggtgtgtcttaatcatcttgagtaatttttttccctcagaattgctagtgatatgccctctgattccctgcatttttgaaaatgattttctttggcccataccaaggaaggataatttgactgtgaattgaattctctatatagaattatagcttaattttgttttcaaaatttaatcttcattctattatttacttattattatggatgaacagctgtaagtctgtctttcctttgtggataatttgttatttatctacccctatccatatacaggctcacacttattcac

SEQ ID NO: 97261 - DNA, 162 bp, Homo sapiens
cgttgctgtaggtaggggatgggcacatatgatttcatgatcttatatgcttctacctttctataagtttgaaaattcccatactaaaaagttaaagacaaaagaaaaaaaaattatatccactcattactcagggtctggtaaaacaaatgatcagaaact

SEQ ID NO: 97262 - DNA, 777 bp, Homo sapiens
actctcagagcatgtcagcctcaagtcagctagctcagcctccctcctcagccactctgcaggagttcagggagcaggaactctggtatcagagagactcaggccaagactctgccactcacccaggcatgtcacctctcagagacttcatttcctcccttctaataggggaagaatggtgcctactcatagggctactgtgaggatacatcaggcagcgtaagtaaagtactcccttctctacaatggtagcacaaccagctgactaaaaatcagttcgttcattcattcaactggaatgtgagtaaacaacaaagaccttgggaaatgtcgactgtcacggtccttgattttcctcactctctatggtgctacagtggcaaaacagtgggtacccccactgcccatcatcctggagcagaaatgagggggcccttggaaacggaccacacagaggcttcctctggggacctggctggtgcagtgtggcgagaccaggaggtcagttctcatggtggaggttgtcaagcactgatgatgagtggtacgggggggttttggctaatcaatcacatggttttgctccctgagatctgagccacttgacaaatagacacaaggtcaaaaaacaccaggttttcaaggtgagctggactgaagaatgcaatgtggacctgcctgtttccccccacccaacaaagtacaccctaaccctgatcatgacactaattgcaaccctaaccctaatcctagcccaccctggcaccccatgcaggg

SEQ ID NO: 97263 - DNA, 200 bp, Homo sapiens
gctgaggcaggaagatcgcttgagcccaggagatggaggctgcagtgagccatgtttgcgccactgcactccagcctgggcgacagagatgacatgtggatagacaaagcagggattgagacctcaagaaggtcagtgtcctgacaggcagacaggtgccctgggcttctgggggacctggtcctggggaaggcagcact

SEQ ID NO: 97264 - DNA, 4985 bp, Homo sapiens
agcggggcagcgaccgtgcccgccgctgggcggggccgcccttctccgagagcgtcagcccgctaggtccttgtccgcgcgggcggcacctcctctgcaggtaaatggaagagctggagaccagtttattccagacacggaaagcacatagaatagaacaaatggtggcaagatggcttcggcgctcccgggacagctcggcccgggctaaagttgctgcagctgatgggcccgccaggaacccaactcagaccctcatccctgtgcgacacacagtaaagatagacaaagacaccctcctccaggactatggatttcacatttctgagagccttccccttacagtggtggctgtcacagcaggaggctctgctcacggcaagcttttccctggtgatcagatcctccaaatgaacaatgagcctgctgaagacctttcctgggaacgagcagtcgatattctcagggaagcagaagattctctttcaatcacagttgttcgctgcacgtcgggagtccctaaatcgtccttcctgaccgaggagaagagagccagactgaagaccaaccccgtgaaggtgcactttgctgaagaagtgctcatcagtggacacagccagggtaattctctgctgtgtatgcccaacgtgctcaagctatacttggagaatggacagaccaaagctttcaagtttgaggcaaacacaaccgtgaaggacatcatcctcaccgtgaaggagaagctgtccatccgaagtatcgagtactttgcactggccctggaagagcagtacagcatctcccggctgcacctgctgcacgaagaggaactcatccagcaggtggtagaaagggaggagtcacatgactaccgctgcctcttcagggtctgttttgttcccaaggaccccctggacctcctgaaagaagaccccgtggcctttgaatacctctatctgcagagctgcagcgatgtgctccaggagcgctttgctgtagaaatgaaatgtagctctgcactccgactcgcggctctgcacatccaggaacggatctacgcctgtgcccagccacagaagatctctttaaagtatatagagaaagactggggaatagagaactttatatctccaactttactccgaaacatgaaaggcaaagacatcaagaaagccattagcttccacatgaagaggaaccagaatttgctggaaccccgacagaagcaacttatttctgctgcccagctacgtttaaattatctacagatcctcggagaactcaagacatatggtggaagaatctttaatgctactttaatgttacaggatagagaatcctacattgcccttctagttggagccaagtatgggattagccaggttatcaatagcaaactcaacatcatgtccacattggcagagtttgcaaacatcagccgtgtagagctaacggaagagtctgagaaagtgagcgtcgtcaaagtgtatcttcaggacgtcaaggttctgactttgctgctggaatccaacagtgcaaaagacctagcctgcctgattgctgggtactacaggctgttggttgacccagttacctccattttcctctggcctggaaacaaacaacaagcgcaccgggtatctgcagaagaaggctatgaatccagggcctgcagtgactcagaggagtcctctgaggtggactgcgtactcgaacctctctctgacaggcgcctggtgaaactggcaccctgcagatcactcataaaggaggagcagcctcctgggaacagccccacacctgaggtggctaggaggggccccagcacctgcggggccagcagcacgacagacagtgccgagtccgaggcgtccgactcagccaacactgagagccgcggctacaggaccagtggctcgagtgagtccatggacgctctggaagaggatgacttagacacctgctcctccagcaggtccaccttcttccactttggctcgccaggcctcgcagagagcattgactctgacagccaggaggagagaagcgggattgaaaccagtggcttcctctgtctcctggacctggcccagagagccaacccccagtgccagaagacagagttttccgagagtgctgctttggagacatttggctgggcaccagaactgagcacagtcaggctggaccccaggctgtatgaaggcagccacgccgactactacagcctgtgttccagtgtctccccggccagctacctgagtgacagttccgagagtacagcttcccggcaagggggagccccgccagcctggggtcagcagggctggactgaggcccagcccagttccatgctggaacccctggccctgcacccaccactggcctttgaggatggcagctcagatgaggaatactatgacgcggctgataagctcactcccccaggccccccgtcagggcccagagatgtttctactgcagaacccagtgccacaagcttgcagaataaggccagcacttctagccctgagaacagcctgccttgtgggccagatggaagacagccaagcaggaggggaggggtgaagaaatatgccaagaccctgaggaaaagaaggtctttcctacagaccgactacacctctcaggtctcatttcccctggtgccatcagcctccctggagagtgtagacgacgtgtgctactatgacagggagccctacctggcccttggtgcaccctccccaactgtgtcctctctgcaggacatgcagggtgagcctggccttctggagaccaaggccttggggctgctggctcctctgagggagaccaagagcacaaacccagcctccagggtcatggagatggagcccgagaccatggaaaccaaatcagtcatcgactctcgagtgtcttctatttctgccattcgcttccggattgaccccaacaataaagagaattctggtgttgtccctgctgccagctcctcagcaagcactcctcactgttctaacccaggttcatctggcccagatactgctcaggcaaggccttcccaaatcttacctctatctcaagacctggatgggattgcccccaaagaaccaaccatagagcatggagacagctccttctccctctccagtggtgaccctaacccagacagagcctgcctggccagcaacccaggactaaataatgtctctcaaggagacacactagagctccagttggagccccatgtccagttggaaatgggattggaatctttttgtacaaatcatatacaagaaactgcccccaaatacacagagcctttgttgtctcctagagatgagcctagaagtgatgaatgtggaataaatccaggagagaagatagcttctatccctacaaaggaagagccacaaggacaactatctctggaaagagacagagaagttacaaacaaaaatggcaccaacgtatttcaggaggagtctaggaaggattcaggtgactccccgggtgatgtgtcaaataatgtttcacagactcttgatattagctctccagctggtaaaatagtaacctccctttctttagatgctcctgtaacagggaccgagcagatcccaccacatccccctagagaccctcaaggacagagcagagaacccccagggcaaggctgccaggctcaagaacaaaaactattcgtagagttggatttagaccctgatttctttcttgggaagcagacagtttcaccagccgtccctccagaggggatcaaggcagaggcacctaaccatgtgacagggcaagatatagcccctagggacagccctgagtgggtctgttttaatcctgagccttccctgccagaaccactaccatgtccacaagaggatcctcacttagaaacttcaaaccattgcttactctcagaaggcaaaagtgacagctctagcatctgcctttctgctgagaagtcttttctgtgctttgccccagaaagccatcctgaagtctctgccagtctcagggtggccacatctttgggttttgcaggcatgaatgagatggtggctcccaggatagggatggaccagtgcagctgtcagttctcctatgccacatgcttccgtggcccgcagcctgagacagaggaagaagacagggacttggaagcacaccccatggcccccctcacctcaccgccctctgcgggaagcccggtggttctgccctggaggcctgcccgagcccacagctgcaccaccgcacccctgtcgaggaaaagccacatctggccagagtactgctccagggcactgagacagctgaaagccacccctgccagcacccctgagggcttcatccaactcatggagagcttgctggagctacaagacattttagaaacttcctggggggttggaaacaaacatcccccagagaagtgcacctggcactttaccgaaagccggagccgcctctgcatgggctcccagaagctcctgtcgagctgtcggcatgtgatcagaatggaccagtcccccgaagagatgcagggggccgtgcgtgacaccttccagcacctggtccagctggccggcctgtgctttcagttcacagactgtagccgctgctccgcccggcacagggaggcagcggggaacctgagggatgtggtgtacacctaccatcagtttatagaggctgctaaatcgacctgcgagagaggctaccacgacctgagtgtgaaactcctggcccgtcagtgcacggccctcacggccgccgtgttctgtttgacccagaagttccgggcatccacggccctgtaaacaggtcaacggcccaagggcctcctgccctgtcctgccttggacacttccctgagaagccccttccactctcccacccaccctcttcaaatgtttactatatagagtattcaaataaactgctgcttaatcttgaaagagtca

SEQ ID NO: 97265 - DNA, 468 bp, Homo sapiens
gtgctttttaatgtattttttctttcctgactcccagggcccagagatgtttctactgcagaacccagtgccacaagcttgcagaataaggccagcacttctagccctgagaacagcctgccttgtgggccagatggaagacagccaagcaggaggggaggggtgaagaaatatgccaagaccctgaggaaaagaaggtctttcctacagaccgactacacctctcaggtctcatttcccctggtgccatcagcctccctggagagtgtagacgacgtgtgctactatgacagggagccctacctggcccttggtgcaccctccccaactgtgtcctctctgcaggacatgcagggtgagcctggccttctggagaccaaggccttggggctgctggctcctctgagggagaccaagagcacaaacccagcctccagggtcatggagatggagcccgagaccatggaa

SEQ ID NO: 97266 - DNA, 169 bp, Homo sapiens
tataaaaagaatgtgtttaacactgcaacctagtaaacactgtatcctacaaaacacagattttatgaagtaatatttatcttcattacctgtgagatcctctaatagttttcctcttttctcttcacatttttctcctctatgccattcccttgtattctttctacta

SEQ ID NO: 97267 - DNA, 939 bp, Homo sapiens
gcacgaggaaggaacggttggatcgcacactgtctgcatccattattgccctcagatcttcaggcaggtgcactattgacaaccgggtcacccgggtggcctggctaaaccgcagcaccatcctctatgctgggaatgacaagtggtgcctggatcctcgcgtggtccttctgagcaacacccaaacgcagtacagcatcgagatccagaacgtggatgtgtatgacgagggcccttacacctgctcggtgcagacagacaaccacccaaagacctctagggtccacctcattgtgcaagtatctcccaaaattgtagagatttcttcagatatctccattaatgaagggaacaatattagcctcacctgcatagcaactggtagaccagagcctacggttacttggagacacatctctcccaaagcggttggctttgtgagtgaagacgaatacttggaaattcagggcatcacccgggagcagtcaggggactacgagtgcagtgcctccaatgacgtggccgcgcccgtggtacggagagtaaaggtcaccgtgaactatccaccatacatttcagaagccaagggtacaggtgtccccgtgggacaaaaggggacactgcagtgtgaagcctcagcagtcccctcagcagaattccagtggtacaaggatgacaaaagactgattgaaggaaagaaaggggtgaaagtggaaaacagacctttcctctcaaaactcatcttcttcaatgtctctgaacatgactatgggaactacacttgcgtggcctccaacaagctgggccacaccaatgccagcatcatgctatttgacgtaaaatagagagcagtagaaaagtggctaacagctgaggagccaagatggccgaataggaacagctccagtctacagctcccagtgtgagtgacgcaaaaga

SEQ ID NO: 97268 - DNA, 601 bp, Homo sapiens
ggctgctcccgggaggaaggcggcgcggaggccgggggcggccgctgagcttggcgtccgcgcggctccggtgcgggctgcgccgcgccttccccagcgagctaccgagcttggggccgccgcggtccgctcccgccgcccggcctctccctcctcggccaccgccgcagcccctgccccgccgagccccgccggacagcggcggccgcagcgcgcatttgggctccgaggaagttgaccgaggcggctgccgcaggataggatcccgggcccggatcgcacgaagcccgcgcggccgtctcctccgcgcgccacccctgcgcctcccgcgagctccacttcccatctgctattgtttccgattgttttccggtggcgagcccggctccgaaacttacaaagtgttggatgtcccccgttcgaactgagggactgcagaccgcctctgggtagctggatgaagcccaccccgtccccttctggagtgcccgtgcgcagcggagatgccaccttccccaaagctatggacaacgtgacggtccggcagggggagagcgccaccctcaggtggagaaactttcaagagaggtctgagggtgca

SEQ ID NO: 97269 - DNA, 385 bp, Homo sapiens
ttacgactagttctagcccacgcgtacgacacaaaagaactctgaggggcgtagcaaggagaccaaacacaggcacccagggagagcgcctggcatagccacagggccattgagatctgccacagggggtgtttgcccgctctcagtcgtctcccgagctgcagagtccccagcctggaaacaaggtttcagcattcccttacatggtaactacgccaggcccctgctgggctgaacacctggctgtggcattctcctccctggaggcttccactggcaggtcaggctgcaaggagggagttcagaagagaggagagaacacctcagtgcagggaagcggcacttgttttccatctcttacccagggcatcttcttagtcacagg

SEQ ID NO: 97270 - DNA, 3602 bp, Homo sapiens
ggctgctcccgggaggaaggcggcgcggaggccgggggcggccgctgagcttggcgtccgcgcggctccggtgcgggctgcgccgcgccttccccagcgagctaccgagcttggggccgccgcggtccgctcccgccgcccggcctctccctcctcggccaccgccgcagcccctgccccgccgagccccgccggacagcggcggccgcagcgcgcatttgggctccgaggaagttgaccgaggcggctgccgcaggataggatcccgggcccggatcgcacgaagcccgcgcggccgtctcctccgcgcgccacccctgcgcctcccgcgagctccacttcccatctgctattgtttccgattgttttccggtggcgagcccggctccgaaacttacaaagtgttggatgtcccccgttcgaactgagggactgcagaccgcctctgggtagctggatgaagcccaccccgtccccttctggtaccaaagtgcttactcctctccaaagtgccgtgtctgaactgccgctgggaagaagcggctcctgagacgcgcccacacctttcacctgccgcgcgcttccccctcctcggccaccttcccggcggaagcagcgaggagggagccccctttggccgtcctccgtggaaccggttttccgaggctggcaaaagccgaggctggatttgggggaggaatattagactcggaggagtctgcgcgcttttctcctccccgcgcctcccggtcgccgcgggttcaccgctcagtccccgcgctcgctccgcaccccacccacttcctgtgctcgcccggggggcgtgtgccgtgcggctgccggagttcggggaagttgtggctgtcgagaatgggggtctgtgggtacctgttcctgccctggaagtgcctcgtggtcgtgtctctcaggctgctgttccttgtacccacaggagtgcccgtgcgcagcggagatgccaccttccccaaagctatggacaacgtgacggtccggcagggggagagcgccaccctcaggtgcactattgacaaccgggtcacccgggtggcctggctaaaccgcagcaccatcctctatgctgggaatgacaagtggtgcctggatcctcgcgtggtccttctgagcaacacccaaacgcagtacagcatcgagatccagaacgtggatgtgtatgacgagggcccttacacctgctcggtgcagacagacaaccacccaaagacctctagggtccacctcattgtgcaagtatctcccaaaattgtagagatttcttcagatatctccattaatgaagggaacaatattagcctcacctgcatagcaactggtagaccagagcctacggttacttggagacacatctctcccaaagcggttggctttgtgagtgaagacgaatacttggaaattcagggcatcacccgggagcagtcaggggactacgagtgcagtgcctccaatgacgtggccgcgcccgtggtacggagagtaaaggtcaccgtgaactatccaccatacatttcagaagccaagggtacaggtgtccccgtgggacaaaaggggacactgcagtgtgaagcctcagcagtcccctcagcagaattccagtggtacaaggatgacaaaagactgattgaaggaaagaaaggggtgaaagtggaaaacagacctttcctctcaaaactcatcttcttcaatgtctctgaacatgactatgggaactacacttgcgtggcctccaacaagctgggccacaccaatgccagcatcatgctatttggtccaggcgccgtcagcgaggtgagcaacggcacgtcgaggagggcaggctgcgtctggctgctgcctcttctggtcttgcacctgcttctcaaattttgatgtgagtgccacttccccacccgggaaaggctgccgccaccaccaccaccaacacaacagcaatggcaacaccgacagcaaccaatcagatatatacaaatgaaattagaagaaacacagcctcatgggacagaaatttgagggaggggaacaaagaatactttggggggaaaagagttttaaaaaagaaattgaaaattgccttgcagatatttaggtacaatggagttttcttttcccaaacgggaagaacacagcacacccggcttggacccactgcaagctgcatcgtgcaacctctttggtgccagtgtgggcaagggctcagcctctctgcccacagagtgcccccacgtggaacattctggagctggccatcccaaattcaatcagtccatagagacgaacagaatgagaccttccggcccaagcgtggcgcttccggcccaagcgtggcgctgcgggcactttggtagactgtgccaccacggcgtgtgttgtgaaacgtgaaataaaaagagcaagaaagaaaaaggaaacaaaataagaccgtctgacagcaacaacggtcccacaaacaagtcacaaaagataccgttaaactttttttttttttttatcattttactacatgaacatcatggataacaagggattctgattcattattaatttcattaattatattttctgatatgagtctagaacttactgcaaaaacaagacaaaactaaaaaaatacaactgagaagggtgaagagaagtatgtttgttaaacagtaaaaatgaatagtatacttcttaactaggtttacaactggtggaccacacaccaggcactaatcacctggtgaggatttggcatatccaccaaaaaatgcatccgatttaaccaacatctccaccagcgctacggactcctcccaattctgacatctcttgcagacaatactatgctctctacacactgtttagaaatggaaaggtgatctgcactgtatcttgggtttgttggctatgcttcctttgatgacatatattatacagtatatatatacatatattttttttgttagagttctagccattttatttctccgcagggtcctttctcagacattactgcatgctgtatatggcgttagctgtgtgttgatcttctaaaagatgatagagtttactggtaattgtgtaatcagctcctgcctttttattttcttgggttatttacatgtcagagacatttataaaaagtgaaaggataaaaaaaaaaaaaaacaactaataccgggcgcagcatctttccaggtgtggctctgcgctaggccaccccaggtggccccgctttctccattctgccctgtggcgttaacagacagcaagcagctgaacaagcagtaccgtcagtacccacttgctttagcccattatgggaatctctgatgcctttgtgaccactggagagtttaatcctcttggtttattttatttcccacctttgtgtgagtgtgtatgaaagagaagaaaatgcaatttttaggtaatcttttttttttttcccctcccctgaaagtctgggaacctgagagtcctcggggaggggtcctggatgtgatgagggaaagggggattgggggatccgggagggtggggttgtctctgacttgacattaaaaagtgttccatgtccctcttca

SEQ ID NO: 97271 - DNA, 3185 bp, Homo sapiens
tttctgatactcagaagactcagagactgtcagtttaaaaaatgaaagtaatatagaaggggcaaagtggcatttatcattctatctctccaggctcctgtctctttaatcagctagcctgatttgcccagtaaatgattcctgagagtgtgtgtgcgtgtgtgtgtgtgtgtgtgcccgcgcgcgtgtgttgtagctctgtcaatccttggattagaaccaatgattgcagcttgtaggagggctgtccagggccagattgtacaatgtgtctcagtgccagagtatgagtggagataattacggagaagtcatactctctcacaccctcggctttcttgttgtgtccttcagcaaaacagtggatttaaatctccttgcacaagcttgagagcaacacaatctatcaggaaagaaagaaagaaaaaaaccgaacctgacaaaaaagaagaaaaagaagaagaaaaaaaatcatgaaaaccatccagccaaaaatgcacaattctatctcttgggcaatcttcacggggctggctgctctgtgtctcttccaaggagtgcccgtgcgcagcggagatgccaccttccccaaagctatggacaacgtgacggtccggcagggggagagcgccaccctcaggtgcactattgacaaccgggtcacccgggtggcctggctaaaccgcagcaccatcctctatgctgggaatgacaagtggtgcctggatcctcgcgtggtccttctgagcaacacccaaacgcagtacagcatcgagatccagaacgtggatgtgtatgacgagggcccttacacctgctcggtgcagacagacaaccacccaaagacctctagggtccacctcattgtgcaagtatctcccaaaattgtagagatttcttcagatatctccattaatgaagggaacaatattagcctcacctgcatagcaactggtagaccagagcctacggttacttggagacacatctctcccaaagcggttggctttgtgagtgaagacgaatacttggaaattcagggcatcacccgggagcagtcaggggactacgagtgcagtgcctccaatgacgtggccgcgcccgtggtacggagagtaaaggtcaccgtgaactatccaccatacatttcagaagccaagggtacaggtgtccccgtgggacaaaaggggacactgcagtgtgaagcctcagcagtcccctcagcagaattccagtggtacaaggatgacaaaagactgattgaaggaaagaaaggggtgaaagtggaaaacagacctttcctctcaaaactcatcttcttcaatgtctctgaacatgactatgggaactacacttgcgtggcctccaacaagctgggccacaccaatgccagcatcatgctatttggtccaggcgccgtcagcgaggtgagcaacggcacgtcgaggagggcaggctgcgtctggctgctgcctcttctggtcttgcacctgcttctcaaattttgatgtgagtgccacttccccacccgggaaaggctgccgccaccaccaccaccaacacaacagcaatggcaacaccgacagcaaccaatcagatatatacaaatgaaattagaagaaacacagcctcatgggacagaaatttgagggaggggaacaaagaatactttggggggaaaagagttttaaaaaagaaattgaaaattgccttgcagatatttaggtacaatggagttttcttttcccaaacgggaagaacacagcacacccggcttggacccactgcaagctgcatcgtgcaacctctttggtgccagtgtgggcaagggctcagcctctctgcccacagagtgcccccacgtggaacattctggagctggccatcccaaattcaatcagtccatagagacgaacagaatgagaccttccggcccaagcgtggcgctgcgggcactttggtagactgtgccaccacggcgtgtgttgtgaaacgtgaaataaaaagagcaagaaagaaaaaggaaacaaaataagaccgtctgacagcaacaacggtcccacaaacaagtcacaaaagataccgttaaactttttttttttttttatcattttactacatgaacatcatggataacaagggattctgattcattattaatttcattaattatattttctgatatgagtctagaacttactgcaaaaacaagacaaaactaaaaaaatacaactgagaagggtgaagagaagtatgtttgttaaacagtaaaaatgaatagtatacttcttaactaggtttacaactggtggaccacacaccaggcactaatcacctggtgaggatttggcatatccaccaaaaaatgcatccgatttaaccaacatctccaccagcgctacggactcctcccaattctgacatctcttgcagacaatactatgctctctacacactgtttagaaatggaaaggtgatctgcactgtatcttgggtttgttggctatgcttcctttgatgacatatattatacagtatatatatacatatattttttttgttagagttctagccattttatttctccgcagggtcctttctcagacattactgcatgctgtatatggcgttagctgtgtgttgatcttctaaaagatgatagagtttactggtaattgtgtaatcagctcctgcctttttattttcttgggttatttacatgtcagagacatttataaaaagtgaaaggataaaaaaaaaaaaaaacaactaataccgggcgcagcatctttccaggtgtggctctgcgctaggccaccccaggtggccccgctttctccattctgccctgtggcgttaacagacagcaagcagctgaacaagcagtaccgtcagtacccacttgctttagcccattatgggaatctctgatgcctttgtgaccactggagagtttaatcctcttggtttattttatttcccacctttgtgtgagtgtgtatgaaagagaagaaaatgcaatttttaggtaatcttttttttttttcccctcccctgaaagtctgggaacctgagagtcctcggggaggggtcctggatgtgatgagggaaagggggattgggggatccgggagggtggggttgtctctgacttgacattaaaaagtgttccatgtccctcttca

SEQ ID NO: 97272 - DNA, 3102 bp, Homo sapiens
ggctgctcccgggaggaaggcggcgcggaggccgggggcggccgctgagcttggcgtccgcgcggctccggtgcgggctgcgccgcgccttccccagcgagctaccgagcttggggccgccgcggtccgctcccgccgcccggcctctccctcctcggccaccgccgcagcccctgccccgccgagccccgccggacagcggcggccgcagcgcgcatttgggctccgaggaagttgaccgaggcggctgccgcaggataggatcccgggcccggatcgcacgaagcccgcgcggccgtctcctccgcgcgccacccctgcgcctcccgcgagctccacttcccatctgctattggctgccggagttcggggaagttgtggctgtcgagaatgggggtctgtgggtacctgttcctgccctggaagtgcctcgtggtcgtgtctctcaggctgctgttccttgtacccacaggagtgcccgtgcgcagcggagatgccaccttccccaaagctatggacaacgtgacggtccggcagggggagagcgccaccctcaggtgcactattgacaaccgggtcacccgggtggcctggctaaaccgcagcaccatcctctatgctgggaatgacaagtggtgcctggatcctcgcgtggtccttctgagcaacacccaaacgcagtacagcatcgagatccagaacgtggatgtgtatgacgagggcccttacacctgctcggtgcagacagacaaccacccaaagacctctagggtccacctcattgtgcaagtatctcccaaaattgtagagatttcttcagatatctccattaatgaagggaacaatattagcctcacctgcatagcaactggtagaccagagcctacggttacttggagacacatctctcccaaagcggttggctttgtgagtgaagacgaatacttggaaattcagggcatcacccgggagcagtcaggggactacgagtgcagtgcctccaatgacgtggccgcgcccgtggtacggagagtaaaggtcaccgtgaactatccaccatacatttcagaagccaagggtacaggtgtccccgtgggacaaaaggggacactgcagtgtgaagcctcagcagtcccctcagcagaattccagtggtacaaggatgacaaaagactgattgaaggaaagaaaggggtgaaagtggaaaacagacctttcctctcaaaactcatcttcttcaatgtctctgaacatgactatgggaactacacttgcgtggcctccaacaagctgggccacaccaatgccagcatcatgctatttggtccaggcgccgtcagcgaggtgagcaacggcacgtcgaggagggcaggctgcgtctggctgctgcctcttctggtcttgcacctgcttctcaaattttgatgtgagtgccacttccccacccgggaaaggctgccgccaccaccaccaccaacacaacagcaatggcaacaccgacagcaaccaatcagatatatacaaatgaaattagaagaaacacagcctcatgggacagaaatttgagggaggggaacaaagaatactttggggggaaaagagttttaaaaaagaaattgaaaattgccttgcagatatttaggtacaatggagttttcttttcccaaacgggaagaacacagcacacccggcttggacccactgcaagctgcatcgtgcaacctctttggtgccagtgtgggcaagggctcagcctctctgcccacagagtgcccccacgtggaacattctggagctggccatcccaaattcaatcagtccatagagacgaacagaatgagaccttccggcccaagcgtggcgctgcgggcactttggtagactgtgccaccacggcgtgtgttgtgaaacgtgaaataaaaagagcaagaaagaaaaaggaaacaaaataagaccgtctgacagcaacaacggtcccacaaacaagtcacaaaagataccgttaaactttttttttttttttatcattttactacatgaacatcatggataacaagggattctgattcattattaatttcattaattatattttctgatatgagtctagaacttactgcaaaaacaagacaaaactaaaaaaatacaactgagaagggtgaagagaagtatgtttgttaaacagtaaaaatgaatagtatacttcttaactaggtttacaactggtggaccacacaccaggcactaatcacctggtgaggatttggcatatccaccaaaaaatgcatccgatttaaccaacatctccaccagcgctacggactcctcccaattctgacatctcttgcagacaatactatgctctctacacactgtttagaaatggaaaggtgatctgcactgtatcttgggtttgttggctatgcttcctttgatgacatatattatacagtatatatatacatatattttttttgttagagttctagccattttatttctccgcagggtcctttctcagacattactgcatgctgtatatggcgttagctgtgtgttgatcttctaaaagatgatagagtttactggtaattgtgtaatcagctcctgcctttttattttcttgggttatttacatgtcagagacatttataaaaagtgaaaggataaaaaaaaaaaaaaacaactaataccgggcgcagcatctttccaggtgtggctctgcgctaggccaccccaggtggccccgctttctccattctgccctgtggcgttaacagacagcaagcagctgaacaagcagtaccgtcagtacccacttgctttagcccattatgggaatctctgatgcctttgtgaccactggagagtttaatcctcttggtttattttatttcccacctttgtgtgagtgtgtatgaaagagaagaaaatgcaatttttaggtaatcttttttttttttcccctcccctgaaagtctgggaacctgagagtcctcggggaggggtcctggatgtgatgagggaaagggggattgggggatccgggagggtggggttgtctctgacttgacattaaaaagtgttccatgtccctcttca

SEQ ID NO: 97273 - DNA, 2395 bp, Homo sapiens
tgggaattgaaagatgagatggtgcagagtgtctcctttgggaggatgtctcatttgagagaatgcccctgcctcggggctacccctgtttccttctccttctgtccaacttggtccaggtctggtgtcctggatgtgctgctgaagagacaggttccgggggtggtgagcgcatgtacctgtggggtgggctgcgcagactggatatggtcacatagtgccagccactcaccagcctgagatggagatgatgatgatggagagcttcagaggggctgctcaggcttttcccagatatactacaagcaagagaatggctggcaggcacttggtggcctttttctgtcttccataggaagaattttctaacacaacaaacaggtgaggacacgactcgtctttacaagctctctgtggtgcttcccagcatggagcagatccacaaaagaactctgaggggcgtagcaaggagaccaaacacaggcacccagggagagcgcctggcatagccacagggccattgagatctgccacagggggtgtttgcccgctctcagtcgtctcccgagctgcagagtccccagcctggaaacaaggtttcagcattcccttacatggtccaggcgccgtcagcgaggtgagcaacggcacgtcgaggagggcaggctgcgtctggctgctgcctcttctggtcttgcacctgcttctcaaattttgatgtgagtgccacttccccacccgggaaaggctgccgccaccaccaccaccaacacaacagcaatggcaacaccgacagcaaccaatcagatatatacaaatgaaattagaagaaacacagcctcatgggacagaaatttgagggaggggaacaaagaatactttggggggaaaagagttttaaaaaagaaattgaaaattgccttgcagatatttaggtacaatggagttttcttttcccaaacgggaagaacacagcacacccggcttggacccactgcaagctgcatcgtgcaacctctttggtgccagtgtgggcaagggctcagcctctctgcccacagagtgcccccacgtggaacattctggagctggccatcccaaattcaatcagtccatagagacgaacagaatgagaccttccggcccaagcgtggcgctgcgggcactttggtagactgtgccaccacggcgtgtgttgtgaaacgtgaaataaaaagagcaagaaagaaaaaggaaacaaaataagaccgtctgacagcaacaacggtcccacaaacaagtcacaaaagataccgttaaactttttttttttttttatcattttactacatgaacatcatggataacaagggattctgattcattattaatttcattaattatattttctgatatgagtctagaacttactgcaaaaacaagacaaaactaaaaaaatacaactgagaagggtgaagagaagtatgtttgttaaacagtaaaaatgaatagtatacttcttaactaggtttacaactggtggaccacacaccaggcactaatcacctggtgaggatttggcatatccaccaaaaaatgcatccgatttaaccaacatctccaccagcgctacggactcctcccaattctgacatctcttgcagacaatactatgctctctacacactgtttagaaatggaaaggtgatctgcactgtatcttgggtttgttggctatgcttcctttgatgacatatattatacagtatatatatacatatattttttttgttagagttctagccattttatttctccgcagggtcctttctcagacattactgcatgctgtatatggcgttagctgtgtgttgatcttctaaaagatgatagagtttactggtaattgtgtaatcagctcctgcctttttattttcttgggttatttacatgtcagagacatttataaaaagtgaaaggataaaaaaaaaaaaaaacaactaataccgggcgcagcatctttccaggtgtggctctgcgctaggccaccccaggtggccccgctttctccattctgccctgtggcgttaacagacagcaagcagctgaacaagcagtaccgtcagtacccacttgctttagcccattatgggaatctctgatgcctttgtgaccactggagagtttaatcctcttggtttattttatttcccacctttgtgtgagtgtgtatgaaagagaagaaaatgcaatttttaggtaatcttttttttttttcccctcccctgaaagtctgggaacctgagagtcctcggggaggggtcctggatgtgatgagggaaagggggattgggggatccgggagggtggggttgtctctgacttgacattaaaaagtgttccatgtccctcttca

SEQ ID NO: 97274 - DNA, 1443 bp, Homo sapiens
tttctgatactcagaagactcagagactgtcagtttaaaaaatgaaagtaatatagaaggggcaaagtggcatttatcattctatctctccaggctcctgtctctttaatcagctagcctgatttgcccagtaaatgattcctgagagtgtgtgtgcgtgtgtgtgtgtgtgtgtgcccgcgcgcgtgtgttgtagctctgtcaatccttggattagaaccaatgattgcagcttgtaggagggctgtccagggccagattgtacaatgtgtctcagtgccagagtatgagtggagataattacggagaagtcatactctctcacaccctcggctttcttgttgtgtccttcagcaaaacagtggatttaaatctccttgcacaagcttgagagcaacacaatctatcaggaaagaaagaaagaaaaaaaccgaacctgacaaaaaagaagaaaaagaagaagaaaaaaaatcatgaaaaccatccagccaaaaatgcacaattctatctcttgggcaatcttcacggggctggctgctctgtgtctcttccaaggagtgcccgtgcgcagcggagatgccaccttccccaaagctatggacaacgtgacggtccggcagggggagagcgccaccctcaggtgcactattgacaaccgggtcacccgggtggcctggctaaaccgcagcaccatcctctatgctgggaatgacaagtggtgcctggatcctcgcgtggtccttctgagcaacacccaaacgcagtacagcatcgagatccagaacgtggatgtgtatgacgagggcccttacacctgctcggtgcagacagacaaccacccaaagacctctagggtccacctcattgtgcaagtatctcccaaaattgtagagatttcttcagatatctccattaatgaagggaacaatattagcctcacctgcatagcaactggtagaccagagcctacggttacttggagacacatctctcccaaagcggttggctttgtgagtgaagacgaatacttggaaattcagggcatcacccgggagcagtcaggggactacgagtgcagtgcctccaatgacgtggccgcgcccgtggtacggagagtaaaggtcaccgtgaactatccaccatacatttcagaagccaagggtacaggtgtccccgtgggacaaaaggggacactgcagtgtgaagcctcagcagtcccctcagcagaattccagtggtacaaggatgacaaaagactgattgaaggaaagaaaggggtgaaagtggaaaacagacctttcctctcaaaactcatcttcttcaatgtctctgaacatgactatgggaactacacttgcgtggcctccaacaagctgggccacaccaatgccagcatcatgctatttgaagtgaaaactacagccctgaccccttggaaaggtt

SEQ ID NO: 97275 - DNA, 3535 bp, Homo sapiens
ggctgctcccgggaggaaggcggcgcggaggccgggggcggccgctgagcttggcgtccgcgcggctccggtgcgggctgcgccgcgccttccccagcgagctaccgagcttggggccgccgcggtccgctcccgccgcccggcctctccctcctcggccaccgccgcagcccctgccccgccgagccccgccggacagcggcggccgcagcgcgcatttgggctccgaggaagttgaccgaggcggctgccgcaggatccgcgagctccacttcccatctgctattgtttccgattgttttccggtggcgagcccggctccgaaacttacaaagtgttggatgtcccccgttcgaactgagggactgcagaccgcctctgggtagctggatgaagcccaccccgtccccttctggtaccaaagtgcttactcctctccaaagtgccgtgtctgaactgccgctgggaagaagcggctcctgagacgcgcccacacctttcacctgccgcgcgcttccccctcctcggccaccttcccggcggaagcagcgaggagggagccccctttggccgtcctccgtggaaccggttttccgaggctggcaaaagccgaggctggatttgggggaggaatattagactcggaggagtctgcgcgcttttctcctccccgcgcctcccggtcgccgcgggttcaccgctcagtccccgcgctcgctccgcaccccacccacttcctgtgctcgcccggggggcgtgtgccgtgcggctgccggagttcggggaagttgtggctgtcgagaatgggggtctgtgggtacctgttcctgccctggaagtgcctcgtggtcgtgtctctcaggctgctgttccttgtacccacaggagtgcccgtgcgcagcggagatgccaccttccccaaagctatggacaacgtgacggtccggcagggggagagcgccaccctcaggtgcactattgacaaccgggtcacccgggtggcctggctaaaccgcagcaccatcctctatgctgggaatgacaagtggtgcctggatcctcgcgtggtccttctgagcaacacccaaacgcagtacagcatcgagatccagaacgtggatgtgtatgacgagggcccttacacctgctcggtgcagacagacaaccacccaaagacctctagggtccacctcattgtgcaagtatctcccaaaattgtagagatttcttcagatatctccattaatgaagggaacaatattagcctcacctgcatagcaactggtagaccagagcctacggttacttggagacacatctctcccaaagcggttggctttgtgagtgaagacgaatacttggaaattcagggcatcacccgggagcagtcaggggactacgagtgcagtgcctccaatgacgtggccgcgcccgtggtacggagagtaaaggtcaccgtgaactatccaccatacatttcagaagccaagggtacaggtgtccccgtgggacaaaaggggacactgcagtgtgaagcctcagcagtcccctcagcagaattccagtggtacaaggatgacaaaagactgattgaaggaaagaaaggggtgaaagtggaaaacagacctttcctctcaaaactcatcttcttcaatgtctctgaacatgactatgggaactacacttgcgtggcctccaacaagctgggccacaccaatgccagcatcatgctatttggtccaggcgccgtcagcgaggtgagcaacggcacgtcgaggagggcaggctgcgtctggctgctgcctcttctggtcttgcacctgcttctcaaattttgatgtgagtgccacttccccacccgggaaaggctgccgccaccaccaccaccaacacaacagcaatggcaacaccgacagcaaccaatcagatatatacaaatgaaattagaagaaacacagcctcatgggacagaaatttgagggaggggaacaaagaatactttggggggaaaagagttttaaaaaagaaattgaaaattgccttgcagatatttaggtacaatggagttttcttttcccaaacgggaagaacacagcacacccggcttggacccactgcaagctgcatcgtgcaacctctttggtgccagtgtgggcaagggctcagcctctctgcccacagagtgcccccacgtggaacattctggagctggccatcccaaattcaatcagtccatagagacgaacagaatgagaccttccggcccaagcgtggcgcttccggcccaagcgtggcgctgcgggcactttggtagactgtgccaccacggcgtgtgttgtgaaacgtgaaataaaaagagcaagaaagaaaaaggaaacaaaataagaccgtctgacagcaacaacggtcccacaaacaagtcacaaaagataccgttaaactttttttttttttttatcattttactacatgaacatcatggataacaagggattctgattcattattaatttcattaattatattttctgatatgagtctagaacttactgcaaaaacaagacaaaactaaaaaaatacaactgagaagggtgaagagaagtatgtttgttaaacagtaaaaatgaatagtatacttcttaactaggtttacaactggtggaccacacaccaggcactaatcacctggtgaggatttggcatatccaccaaaaaatgcatccgatttaaccaacatctccaccagcgctacggactcctcccaattctgacatctcttgcagacaatactatgctctctacacactgtttagaaatggaaaggtgatctgcactgtatcttgggtttgttggctatgcttcctttgatgacatatattatacagtatatatatacatatattttttttgttagagttctagccattttatttctccgcagggtcctttctcagacattactgcatgctgtatatggcgttagctgtgtgttgatcttctaaaagatgatagagtttactggtaattgtgtaatcagctcctgcctttttattttcttgggttatttacatgtcagagacatttataaaaagtgaaaggataaaaaaaaaaaaaaacaactaataccgggcgcagcatctttccaggtgtggctctgcgctaggccaccccaggtggccccgctttctccattctgccctgtggcgttaacagacagcaagcagctgaacaagcagtaccgtcagtacccacttgctttagcccattatgggaatctctgatgcctttgtgaccactggagagtttaatcctcttggtttattttatttcccacctttgtgtgagtgtgtatgaaagagaagaaaatgcaatttttaggtaatcttttttttttttcccctcccctgaaagtctgggaacctgagagtcctcggggaggggtcctggatgtgatgagggaaagggggattgggggatccgggagggtggggttgtctctgacttgacattaaaaagtgttccatgtccctcttca

SEQ ID NO: 97276 - DNA, 3303 bp, Homo sapiens
tttctgatactcagaagactcagagactgtcagtttaaaaaatgaaagtaatatagaaggggcaaagtggcatttatcattctatctctccaggctcctgtctctttaatcagctagcctgatttgcccagtaaatgattcctgagagtgtgtgtgcgtgtgtgtgtgtgtgtgtgcccgcgcgcgtgtgttgtagctctgtcaatccttggattagaaccaatgattgcagcttgtaggagggctgtccagggccagattgtacaatgtgtctcagtgccagagtatgagtggagataattacggagaagtcatactctctcacaccctcggctttcttgttgtgtccttcagcaaaacagtggatttaaatctccttgcacaagcttgagagcaacacaatctatcaggaaagaaagaaagaaaaaaaccgaacctgacaaaaaagaagaaaaagaagaagaaaaaaaatcatgaaaaccatccagccaaaaatgcacaattctatctcttgggcaatcttcacggggctggctgctctgtgtctcttccaaggagtgcccgtgcgcagcggagatgccaccttccccaaagctatggacaacgtgacggtccggcagggggagagcgccaccctcaggtgcactattgacaaccgggtcacccgggtggcctggctaaaccgcagcaccatcctctatgctgggaatgacaagtggtgcctggatcctcgcgtggtccttctgagcaacacccaaacgcagtacagcatcgagatccagaacgtggatgtgtatgacgagggcccttacacctgctcggtgcagacagacaaccacccaaagacctctagggtccacctcattgtgcaagtatctcccaaaattgtagagatttcttcagatatctccattaatgaagggaacaatattagcctcacctgcatagcaactggtagaccagagcctacggttacttggagacacatctctcccaaagcggttggctttgtgagtgaagacgaatacttggaaattcagggcatcacccgggagcagtcaggggactacgagtgcagtgcctccaatgacgtggccgcgcccgtggtacggagagtaaaggtcaccgtgaactatccaccatacatttcagaagccaagggtacaggtgtccccgtgggacaaaaggggacactgcagtgtgaagcctcagcagtcccctcagcagaattccagtggtacaaggatgacaaaagagctgaaatctcattcacagtttggttatgatgggaaagcttcctccccatggtggacgaatggtgtcaaaacggccagtgggatcaatcagcctgacttgctcgcagaatcctcccgactgattgaaggaaagaaaggggtgaaagtggaaaacagacctttcctctcaaaactcatcttcttcaatgtctctgaacatgactatgggaactacacttgcgtggcctccaacaagctgggccacaccaatgccagcatcatgctatttggtccaggcgccgtcagcgaggtgagcaacggcacgtcgaggagggcaggctgcgtctggctgctgcctcttctggtcttgcacctgcttctcaaattttgatgtgagtgccacttccccacccgggaaaggctgccgccaccaccaccaccaacacaacagcaatggcaacaccgacagcaaccaatcagatatatacaaatgaaattagaagaaacacagcctcatgggacagaaatttgagggaggggaacaaagaatactttggggggaaaagagttttaaaaaagaaattgaaaattgccttgcagatatttaggtacaatggagttttcttttcccaaacgggaagaacacagcacacccggcttggacccactgcaagctgcatcgtgcaacctctttggtgccagtgtgggcaagggctcagcctctctgcccacagagtgcccccacgtggaacattctggagctggccatcccaaattcaatcagtccatagagacgaacagaatgagaccttccggcccaagcgtggcgctgcgggcactttggtagactgtgccaccacggcgtgtgttgtgaaacgtgaaataaaaagagcaagaaagaaaaaggaaacaaaataagaccgtctgacagcaacaacggtcccacaaacaagtcacaaaagataccgttaaactttttttttttttttatcattttactacatgaacatcatggataacaagggattctgattcattattaatttcattaattatattttctgatatgagtctagaacttactgcaaaaacaagacaaaactaaaaaaatacaactgagaagggtgaagagaagtatgtttgttaaacagtaaaaatgaatagtatacttcttaactaggtttacaactggtggaccacacaccaggcactaatcacctggtgaggatttggcatatccaccaaaaaatgcatccgatttaaccaacatctccaccagcgctacggactcctcccaattctgacatctcttgcagacaatactatgctctctacacactgtttagaaatggaaaggtgatctgcactgtatcttgggtttgttggctatgcttcctttgatgacatatattatacagtatatatatacatatattttttttgttagagttctagccattttatttctccgcagggtcctttctcagacattactgcatgctgtatatggcgttagctgtgtgttgatcttctaaaagatgatagagtttactggtaattgtgtaatcagctcctgcctttttattttcttgggttatttacatgtcagagacatttataaaaagtgaaaggataaaaaaaaaaaaaaacaactaataccgggcgcagcatctttccaggtgtggctctgcgctaggccaccccaggtggccccgctttctccattctgccctgtggcgttaacagacagcaagcagctgaacaagcagtaccgtcagtacccacttgctttagcccattatgggaatctctgatgcctttgtgaccactggagagtttaatcctcttggtttattttatttcccacctttgtgtgagtgtgtatgaaagagaagaaaatgcaatttttaggtaatcttttttttttttcccctcccctgaaagtctgggaacctgagagtcctcggggaggggtcctggatgtgatgagggaaagggggattgggggatccgggagggtggggttgtctctgacttgacattaaaaagtgttccatgtccctcttca

SEQ ID NO: 97277 - DNA, 2524 bp, Homo sapiens
gaacagctattccagtgttgcagtagaatttattcccattcggactccctgactttgtgtttaaataggaggaaatcaaagctaaattaaagagtatctcccaaaattgtagagatttcttcagatatctccattaatgaagggaacaatattagcctcacctgcatagcaactggtagaccagagcctacggttacttggagacacatctctcccaaagcggttggctttgtgagtgaagacgaatacttggaaattcagggcatcacccgggagcagtcaggggactacgagtgcagtgcctccaatgacgtggccgcgcccgtggtacggagagtaaaggtcaccgtgaactatccaccatacatttcagaagccaagggtacaggtgtccccgtgggacaaaaggggacactgcagtgtgaagcctcagcagtcccctcagcagaattccagtggtacaaggatgacaaaagagctgaaatctcattcacagtttggttatgatgggaaagcttcctccccatggtggacgaatggtgtcaaaacggccagtgggatcaatcagcctgacttgctcgcagaatcctcccgactgattgaaggaaagaaaggggtgaaagtggaaaacagacctttcctctcaaaactcatcttcttcaatgtctctgaacatgactatgggaactacacttgcgtggcctccaacaagctgggccacaccaatgccagcatcatgctatttggtccaggcgccgtcagcgaggtgagcaacggcacgtcgaggagggcaggctgcgtctggctgctgcctcttctggtcttgcacctgcttctcaaattttgatgtgagtgccacttccccacccgggaaaggctgccgccaccaccaccaccaacacaacagcaatggcaacaccgacagcaaccaatcagatatatacaaatgaaattagaagaaacacagcctcatgggacagaaatttgagggaggggaacaaagaatactttggggggaaaagagttttaaaaaagaaattgaaaattgccttgcagatatttaggtacaatggagttttcttttcccaaacgggaagaacacagcacacccggcttggacccactgcaagctgcatcgtgcaacctctttggtgccagtgtgggcaagggctcagcctctctgcccacagagtgcccccacgtggaacattctggagctggccatcccaaattcaatcagtccatagagacgaacagaatgagaccttccggcccaagcgtggcgctgcgggcactttggtagactgtgccaccacggcgtgtgttgtgaaacgtgaaataaaaagagcaagaaagaaaaaggaaacaaaataagaccgtctgacagcaacaacggtcccacaaacaagtcacaaaagataccgttaaactttttttttttttttatcattttactacatgaacatcatggataacaagggattctgattcattattaatttcattaattatattttctgatatgagtctagaacttactgcaaaaacaagacaaaactaaaaaaatacaactgagaagggtgaagagaagtatgtttgttaaacagtaaaaatgaatagtatacttcttaactaggtttacaactggtggaccacacaccaggcactaatcacctggtgaggatttggcatatccaccaaaaaatgcatccgatttaaccaacatctccaccagcgctacggactcctcccaattctgacatctcttgcagacaatactatgctctctacacactgtttagaaatggaaaggtgatctgcactgtatcttgggtttgttggctatgcttcctttgatgacatatattatacagtatatatatacatatattttttttgttagagttctagccattttatttctccgcagggtcctttctcagacattactgcatgctgtatatggcgttagctgtgtgttgatcttctaaaagatgatagagtttactggtaattgtgtaatcagctcctgcctttttattttcttgggttatttacatgtcagagacatttataaaaagtgaaaggataaaaaaaaaaaaaaacaactaataccgggcgcagcatctttccaggtgtggctctgcgctaggccaccccaggtggccccgctttctccattctgccctgtggcgttaacagacagcaagcagctgaacaagcagtaccgtcagtacccacttgctttagcccattatgggaatctctgatgcctttgtgaccactggagagtttaatcctcttggtttattttatttcccacctttgtgtgagtgtgtatgaaagagaagaaaatgcaatttttaggtaatcttttttttttttcccctcccctgaaagtctgggaacctgagagtcctcggggaggggtcctggatgtgatgagggaaagggggattgggggatccgggagggtggggttgtctctgacttgacattaaaaagtgttccatgtccctcttca

SEQ ID NO: 97278 - DNA, 371 bp, Homo sapiens
aaaatacgagcaaaccaaatctagcagcacatcaaaaaattaattcaccatgatcaagcaggctttctgcctgagatgcaaggctgattcaagatacgcaaataaataaatgtgatacatcatataaacagaattaaaaacaaaaaacatatgatcatttcagtaaacacagaaaaaaactttcaataaaatccaacatcctttcatgatgaaaatcctcaacaaactaggcattgagggaacatactccaaaataataagagccatttatgacaaacccacagccaacatactgaacaagcaaaagctgagatcatttcctttaagaacagaaacaagacaaggatgcccactcacactactcctattca

SEQ ID NO: 97279 - DNA, 757 bp, Homo sapiens
aagtgcctgtcgcttggagacggagtgactccaaacgggctcacacggttttctgagaaacataaagggaaaccgaatccaccaatatatatatatattttcttgagacggcgtctcgctctgtcacccaggctggagtgcagtggcgtgatctcggctcactgcaaactccgcctcccgggttgacgccattcttctgcctcagcctcccgagtagctgggactacaggcgcccgccgccacgcccggctaatttttttgtattttagtagagacggggagtcaccgtgttgcccaggctggtcgcgaactcctgagctcaggcaatccgcccgccttggcctcccaaagtgctaggattacaggcgtgagccaccgcgcccggcccaccaatactcaattggtttgacttcagttgaggaaaccagaaaaaatttaaatatatttatggaaagaagctattgggagagtggctgagtactgagtctatcactacttggatgatacagcttctgtcttcaagataagcagaattgttcagaatccactggaatccaaattcaacttgggcctcaatttctgcagatggacacctctggactccaaaaaatccaaggacataaaaaacttaagcagcctttattacatttagttcaacaagtttaaagtgtaggtcactttccacttttgtttacttgatgcttaattttactggaatcgttaaaagaaatatacttgcaatttttttaaaaaggta

SEQ ID NO: 97280 - DNA, 341 bp, Homo sapiens
taggttgtggcatagaatctggagaagggctaatatatgcacatatacctattctaacagcaatagagttataattttaaatcattttgtatcacatttgtcagagttgcaaatgacattaatattgaatgagtaatttttagtgaagtttatgtggaacataaaataacttttccagagagataacttaatccttgagttatacatgttttaaatagattttcatactatattaacaaaactggaatgtgacactgggggtttcctgctgcattttttatgtgggctcataaagctgtgggtttctacagaggttctcctagagcttcctaacagtgagg

SEQ ID NO: 97281 - DNA, 317 bp, Homo sapiens
  misc_feature (55)..(55): n is a, c, g, or t
tccattccctacggctcctgggtcgttctggagcttggcttttttaggatggggnttttcgttctgtgggtggcagggaaggtggcaagtgggctagcccctcagtgtagggctgcagggagaggagtggggaggcagggaggaagggaggctcccatgtttacctgcctggggaagaaactccttgttggaggattgcactgtgggctcggcagctggggtcctttgccaggccagtggggccagctcagcagagtaccaaaggctctggagtggcctagattcctacctgctcaggccttttccccaaaatactg

SEQ ID NO: 97282 - DNA, 283 bp, Homo sapiens
tcacactgagcctggccaaagctggactacttgtaagcttttgtctggaacctgatttgggagccagtggcccgaggacgatgaaaactatcagaggtggctgggcacagtggttcatgcctataatcccagcactttgggaggcggaggtggatggatcacttgaggtcaggagtttgagaccaacctggccaacatggcaaaaccagtctttactaaatatacaaaaactggccaggcatggtggctcacgcctctaatcccagcactttgggaggccgag

SEQ ID NO: 97283 - DNA, 182 bp, Homo sapiens
tgggtacagccacgtgatttgataagattgctgggaggcctaagtgaattatgtacataggagcatttaatgcagtgcctggcacatagtaggtattcagtaactattgtctattattattattatttttgagacagagtctcgctcttttgcctaggctggagtgcagtggcacgatcttg

SEQ ID NO: 97284 - DNA, 397 bp, Homo sapiens
ccttctctaacttaggtgtcagcacttcaatctctaaagcctcatcaagatgcttccatctgccttacttcacatcaaataaggcaccaagcctatcaattttatctgtatttcttaaatctattctcttttatcctactatactgcctctgctctaagattttaggatttattctttcctagattcttgcaataacctaattgggttcccatcttctggtgttactatctgtacagttagcttcctcattgtatcacactaatttatttaaaacacgaatttgatcaaatgactcccctcttaaaagtcttcaaatggctctcttcaagtacggaaaaaggtcaaactctttgcattacccacaaggttttataaaattcactgcttatctacatc

SEQ ID NO: 97285 - DNA, 448 bp, Homo sapiens
gtgatttatacgggagtatgtattcaatgggtgtacattattatcacgtgtatactagcatatgctcgggcacagggaggaactagatagagacccaaactatgaacacttatttagtatcctttgggttgaagtttgggcagaaaaagggtgaaaggagatactgtcttttgatacaaatgcttctgtttgcttgaatctcttgcgtgcaaatgtagccatgtatcatttcagtaattaaacatagaaaaagcaaaacaagccgaactggtgctttgttttttgaacctggagttaagaaggtaagaaagaagcattgtcagtatctgcattccaagctgttaccaaagaatggagctgttaattgtctcctgctgtctcaataacaaaaatctggatgagagaattcttcttcagggaggatcattcaaaggtcaagcagcccatt

SEQ ID NO: 97286 - DNA, 221 bp, Homo sapiens
caatcctgtggtccagacactgctgagtgtctcctgggtggcaacgtcacccccgtttcagaaccactagcataactgaagtcactgtctcaggctcatctccctggtctctccattttccttattcctcacacccagcgcataagcagttcctttagaactgctgcacggctctcatctccatgagcaccgccaggtcccctgcgctggctggtcgggcc

SEQ ID NO: 97287 - DNA, 329 bp, Homo sapiens
ctatttaataatctagcactaaaacttatgaattatttatatgttcattttaagaatgaaactgaatactactcatattcctttaaatatattttaccaatattataaaacttgattctacctttttttcatatttctgaagaaaactaaccttctgactctgcttaagactatttcttgttgttttcttattgttcacaatcttctgcttatggtccagaaagagactccagccctggatacccaacagctgttcctggtttaaggcctaacatcttaatggaccttgggttggacatgtattttgttgcctaccaatcgtcagagaa

SEQ ID NO: 97288 - DNA, 627 bp, Homo sapiens
attgcagcactggggctcacccaaagaccatggtcactacagaattgctgccactgaaatttatttgaggcccaagaccatttcagtcagctagggcttaagcccttctgccgtggctgtggctacagatttctatcttgcctggtgttctgttgccactgcgtgtcgtgacccaggggtccccatgaatgggactcgaaatggggatggaagagaacctggggacactgttgtttttcaatgtgacccaggatatgaacttcaaggagaggaaagaataacctgcattcaggtagaaaatcggtacttctggcagcccagcccaccagtctgtatagcaccctgtggaggcaatttaacaggatcttcaggctttattctttcaccaaacttccctcatccatatccgcatagcagagactgtgactggactatcaccgtcaatgcagactatgttatctccttggcgttcatcagttttagcatagaaccaaactatgacttcctctatatctatgatggaccagacagtaatagcccactgattggaagttttcaagacagcaagttaccagagagaatagaaagcagctcaaatacaatgcatttggcttttcggagtgatgg

SEQ ID NO: 97289 - DNA, 693 bp, Homo sapiens
tcttaggggcttctcccacacttcttgctgccaccaggtgaagaaggatgtgtttgcttccccttccaccatgattgtaagtttcctgaggcctccacagccatgaggaactgtggccaggaggagggatgttagccacaaaggtttgtttttctgagacccttcaatcagttaccctcatgcttaattttcctacatggagctttaggggaagccatgaggaacatggtgtctgacgcatagtaagtgttcaataaatatttgctgaccagatgtagtggaagtgccttatcttccagtctgtttggtctcagctgcagaagtgagatgatgaagggaatctcatcgtttggaaagcatcacagtaagacacacacattgtgccaccactgtggctctaaggcccaccacctccagaagacgacctgtggcaaatgtggctaccctgccaaacacaagaggaaatataactgggtgccaaggctaaatggcgaaataccaccagaacttgttgaatgagacacctaaaaattgtttgccacagactgaggcacagattccgaaaaggaacacacctaaacccaagagggtagccgttgcagcatccagttcatcttaagaatttcagtgactagtcatgtgacaaatgttctagttttaaaaaataaataaataaatatttgctgaccgaaa

SEQ ID NO: 97290 - DNA, 713 bp, Homo sapiens
tgggtgcattcagtttttatttcaaaggatggcatcaggcagcaaaatttaagtaatgggaaatttctgtgtttcaattgcctattggctacaaaatgtactgcctgctactcggtagtgtaaaacagcaacaaacattttgttgttgttattattattttgagacagggtcttgctctgtcactcaggctggagtgcagtgacccgatcatggctcactacagcctcaacctccctgggctcaggcaatcctcctgcctcagcccccacaagtagctgaaattacaggtgtgtgccaccatgcctggctaaattttttgggaatagtttttaaagatggagttttgcagtgttgcctgggctggtcttgaactcctgagctcaggcaatctgcccacttcagcctcccaaagtgctgggattacaggcctgagtcactggacctggttgttgttgttattatcgctcatggttttggaggttcactgggctcaggtatgtagttctcagtcaggagtctctatgcagttgtggtcagctggcagctggagcctcctgatgtcttcttcgctcacatgtctaatgaccgatgctgatgttgctgtcctctgtgacctcagtgaaacctgtcagccaaaacacctacatatggcttctccacctggcctgggtttcatcagggcatggtgtctggatttcaagagcaagtgtcc

SEQ ID NO: 97291 - DNA, 487 bp, Homo sapiens
cgggatcccaggggtcccccagtccggcgccgtctcccctagctcggcgcactgggtccgaggtggccggtgtgaggtctcaagctggccgcacctcgtccaagaagggaaaagaccagaggccgcagacgtctcctcccagtctggagttgggacgcactagggtgtagaaaggtcaggatgtccccccaccccaaacccacacgcgcttgcgagcacacacgcagacacagagaccacggcgcgcgcacacgcacacgcacacacctacgctttgctcccctggcctgagagctggagagggggcgctttggaaaacttggctgattcgccggatgaccatgtgcgctcaagactgtacccgccaaacataaccttaattttacaagatgtttttccccataacttttctgcaaatgagtcagaacagaacccagtttccgaggcagcccagtctggtttgctaaatttctcaaaatgtaccagc

SEQ ID NO: 97292 - DNA, 660 bp, Homo sapiens
cccataatattttgtgaatatgtctatgatagtatttaatacattgcattatgacttgttgtttgtgtcattctccacttattaattagacttctttgaggatagagattgagtttttaaatttgtttcttcatttgttcttttacttagctcaatgcctggcaaaaaaacaaatcattgttaaatcagtttttaggtgaaatagggataagtgggaggctaacttatccagtctttgaaaatgcctagcgatccccttcagaatcctcacacatcatcatcaatcttcttaccctgtaaataaatatacttttctcacacattaaagatatttgtaaaataaatttattcagtttttttttctattgcagtgatatgtgtgtgtatatatgtatatagttgtatttaaactaaacaggagaaaaggagcaagcctgtgaagtattatttccgcatttaccagcaagacaattatctcagaagattaaaatgtgagagatacaactagtgttcaaaccctgctctttctgatgccacagtcaatgttctttctttggtagaaaccaaactgtatttttcttattgttcaagtaatgtaattaactatggaaaaataagaaattacagattaacaaaataaagcaaaagtaagtaaaattc

SEQ ID NO: 97293 - DNA, 541 bp, Homo sapiens
actcttggaggatatttcatcccctccaagccttgccccatggaaagggctacacctcctgcaggaaggggtgccttttgttaacaggtattaatgggtacagaggcaccatgcagcctaccagcacccttgctagcctagtcctcttcctgtgcttctttttgaaagatcaagaatgaagaggaagagatgaggagtgggggtcctttacctaaaggaccctcgtggttcattgcttctctttaactgactttttaaaaaaactccctcttccacactccttgctgtgattctgtcctaatcatttttcttgagaatgtcatgtagagataaatgtgtgtcacagtgaagccagaaggtgaattaacaactaagacaaatccagcatgctcttgcctgccctgcatatgtgctcatttggggaaggacggaggacacagagcatcgacacaaattctacagctcctcagagaacacagcagagactcagatgagctgtaaaatccattaaggaaaaataaatggcatgatttggaagtta

SEQ ID NO: 97294 - DNA, 718 bp, Homo sapiens
tggcttttcttttcactataatattaaagttttgtttgttttcaatgaacaagacttgttaattttactacagtacaatacaccaacatttttggttggtgctgtctatgccctattttaaaatgtttcgccacagtcagccatggggaattcaattgcagctcactgactcttagtcatttcaatttaatcagtatatgctaagaccaagaaaatgcagctggttggtggacccgagccctaatcatatggctgacaccaaagtcatgaaggtaggggaatgattgttgagtaggaaattagtaatgtctgctaaaagctgcatctcttgagttttgatatataatactaccattaccacttaagtttaaaaactcataaatttccattatacattattttattcatgaattacttagatgttttttggagggtagttttttgttattgatttctaatgttatagcactttggttagaatttgtgttaaacatggtatcagttcattagtatttgttgaaaattgctttgtggtctagttcacacttaatttttctaatattgcatgtgtgtttgaaaagcatatgaattttctttctaaagtagagcatccacaaaatcaagcctattaattgtgtcattcagatattttctaccattactagtgtttgacagtttctgatggagatgtgacagcatttcccactcttttggatat

SEQ ID NO: 97295 - DNA, 785 bp, Homo sapiens
caggtggctacctctcatctcctgaggatctgttccttctctcttctcttaccagagattggcatcacctcctggtgttagtcagcatgtttatctgaaacagtggaaggctgttgtaggagctagggaatgatgctaattcatatgctaaaggatgaagttgccttataaagctgctgatttctgaaggatgaaaaaccttcccagaggcctgagtgcgctgtgtgccggagcttgtggcatcaatgggcctgctgtgtccaaagaaagaggctgaggcagccgagctccggcctgaagcacctggaccagacgacaaagaggtcggcttccttagtccggaggactgtccggactgtgagcaagaggaagctacagcccacgagggccacccgcagcctgacaccttcagcagtaaacaagataaaataacttcttcaagataagcctgagtattaggtgtaaaagttggtgtccgaaccagggcctgtaatgacctttcttatagtctagaataaacgaagacaagggagatttcgatgaagaagtcattcaagatggagtcagagtgttcatcgaaaagaaagcacaactaacacttttaggaacagaaagaccatgctgaagacaaactatccagtgagtttgtgttcaataacccaaacatcaaaggaacatgtggccgtggagaaagctttactatttgacatctcaggacgcctctgaccataagctctgggaaagctcctggaagccctggggctcacaaataaatcatatgattg

SEQ ID NO: 97296 - DNA, 234 bp, Homo sapiens
gacctactggtatcccaccccaaacagcaactctttctgatatgcttgcatttaaaatcaggctttttctcccttttggaaaaacacagtccttgtttgctttagggaagaataaaggtcagtgcgctgcattgcattaatttcgaagggaaagatgagaagacatcttgaaaggaatggctggctttctagagaatagtagaggcttaataggtgtcatagaaaaaccagggg

SEQ ID NO: 97297 - DNA, 525 bp, Homo sapiens
  misc_feature (14)..(14): n is a, c, g, or t
tgatctagaggatncgtttctctgatcgctcaaggaataagatcagatgagatccccagtgaaagaagagaggagttgtaaggactgggccctggggcattctagcttcatgaggagcagaagagaagaatgcaggggaggaagtggagacagggattgtggacaactcagttgagctttgcggcaaaagggagcagagtttgaggtggtatctggtggggtaaataagcttaggagaattatttttcagttggaagcattatcagcatgtttagatgctgatgggagtgattctgtagagagtgaaatattgattgtgtgggatggagggctgctgaaaacacttcttgagtaggagagagagatgggtttgtggaaaagtggagttactggctttaggaggaacacggatagttaccagtggggatggaccaaatgacagatacatgcgtgggtggtgctcggaggaggaggctctgcagttctcttctgattaccgacctttctttgtgaaatgggagtcaa

SEQ ID NO: 97298 - DNA, 438 bp, Homo sapiens
gatagccttaccaagtgataaggacagaaataaaagcagaagacaccttccacctgcccacacacacggaagaaccaaaggaccatggcaagcaatgtgaagatgtgcttgcttccccttcaccttccaccatgactgtaagtttcctgaggcctccccagccatgcttcctgtacagcccatgtaactatgaagaacagttcagccatggactgcagctgctgcgtggctaatggaaaaggagcccaggaatgcacactctccgtatctactcaatgccaacaggcttgcctgatgtgaacaaaaattcagtcaagctgcctgcttggcactgtacaagcaatagatccaggtgcctcacaagatttccaactgaaataaggggctgtttttgaatggtgccggtccaatattaaatgctttcttcctcattggctg

SEQ ID NO: 97299 - DNA, 1160 bp, Homo sapiens
aatctgagaatggcaggtatgagcagccacaacccctacgtctgagatcaattacccaggaagaagccctctcagagctcagatctagatgttggagatggtacagctgtggtttagtagctggcagggaagttaccatgctactgtgctgctgtgctgctgtgatgttaaaacttgcttaaaatctgttctctaggatgctagggaacactgttcactggcaggtgactcaccagagacatcctgctacaaaaccaactgacaggtcagggtgtttgagaaatgtctggccataggagccttgccaagatggcacactggaaccagggaggaaaacccagtccttctgcaaggtaactctggctcccaactccagctccccgtactgacaaatcttaacatatgtgccagctggcaaagggaaaatgtagaaagagatcagctccatttttggagagcaagtaatgaaggatgaattgggagctgagaggaaatacattgataactggcacacgctccaaatcttaccacctagagatactacttatgaacacacacagttatcaatatggtttttaacctgttattttcctgcaatagcgtggtgtggacagctttatatgccaataaatatgatccgcttcaacatttttctttgtcgagtagtatatattcactttgttttatatagctgattccctactggttaatatttaaattgactcctgtttttactattataaataatgctgtactcaacatctttaaatgcttattttatcatactaaattattagaagttgaattgttggaacaactgttctatgttaagttgataagagtaaatgctgggtgcattatttatttgttttagcaagaaagatattttttcattttctgcattcctcaataaagcatgaagatgctaccttagacatctgatatggtatccaagtcaaataaggtcaggtaccagtgtggttccaagaatttctctgagagccatgtagcctggccagggaaactaactggcaaagatggcatgtatctaccctggcttttcactaaaataaagtataggattaaaaaaaaaaacttcatttttcagaggagttttaggatcacagcaaaactgagtgaaagtgcagaagaattcccat

SEQ ID NO: 97300 - DNA, 672 bp, Homo sapiens
cgaattcctttgatacgtggcccccctttccatttcttcccccctagagttcctttttttggacccccccggttatcaatatggtttttaacctgttattttcctgcaatagcgtggtgtggacagctttatatgccaataaatatgatccgcttcaacatttttctttgtcgagtagtatatattcactttgttttatatagctgattccctactggttaatatttaaattgactcctgtttttactattataaataatgctgtactcaacatctttaaatgcttattttatcatactaaattattagaagttgaattgttggaacaactgttctatgttaagttgataagagtaaatgctgggtgcattatttatttgttttagcaagaaagatattttttcattttctgcattcctcaataaagcatgaagatgctaccttagacatctgatatggtatccaagtcaaataaggtcaggtaccagtgtggttccaagaatttctctgagagccatgtagcctggccagggaaactaactggcaaagatggcatgtatctaccctggcttttcactaaaataaagtataggattaaaaaaaaaaacttcatttttcagaggagttttaggatcacagcaaaactgagtgaaagtgcagaagaattcccat

SEQ ID NO: 97301 - DNA, 461 bp, Homo sapiens
cacaccacacatcacgcatacatacaccacacccctcacaaccccacacaacacataaatacgtcacacacacacacaccacacactacacacaccacacgccacatacacaccatacacacaccacacagatacatcacacacacaccacacacagatacaccaaaagcacacagataccacacacacccccacagaaagcacacagataccacacacacccccacagaaagcacacagataccacacacacccccacagaaagcacgcagataccccccccacacacacagaaagtgcacggataccacacacacacacacacagaaagcgcacacagcattcacaccccacatatacttctttgcacttaaaagcaggagcatgtcaaaggctgcctgcgaagctggccagtgctccagggagggccggatcatctctcacacaaagtgatcaggacc

SEQ ID NO: 97302 - DNA, 714 bp, Homo sapiens
tgttcatgtcttgctcattgccgcatctccagtacctggcacagtgcttggcaccaagtatctgctgctacttgtcaattgcatgaatgaattattatatacatttctcacaagctatttgggggcttggtgctggacatcaagcggaaggccccctggtactggagcgactaccgagatgcactcagcttacagtgtttggcttcctttctgttcctgtactgtgcctgcatgtcacctgtcatcacctttgggggactgcttggagaagccactgagggacgcataagtgcaattgaatccttgtttggagcttccatgactgggattgcttattccttgtttgcgggacaggctctcaccatcctgggaagtactggaccagtgcttgtgtttgaacaagattctgttcaaattctgcaaagactatgctctttcatacctctccctgcgagcttgtattggactgtggaccgctttcctgtgtattgtccttgtggcaactgatgccagttcccttgtctgctacattacccgtttcactgaagaagcatttgcctccctaatttgcattattttcatctatgaagcaatagaaaaactgattcacctggcagagacctacccaatccacatgcacagccagctggaccaccttagcctctattagtacgtgtgctttctgcttatctaaaaattgagcaagggcctgag

SEQ ID NO: 97303 - DNA, 334 bp, Homo sapiens
gattcaggcatcccttcttgatctttctaggagctgtgaagttgcagaattttggtttattgggatgcatcctggtgcttgcctacagatcttgttttgcaagtaagaacagaagactctggccgggcgtggtagattatgtctgtaatcccagcactttgggaggccaagggggggcggatcacctgaggtcaggaattcaagacaagcctggccaacatggcgaaaccccatctctactaaaaatacaaaaatcagccaggtgtggtagcacgcacctgtaatcccagctagtctggaggctgagacaggagaatcacttgaacccgggagg

SEQ ID NO: 97304 - DNA, 213 bp, Homo sapiens
gttagaacatgatggagagctacagaaggagctctaatcacagaaatacatgtggagagtttcaaatgtgctgatggggcttggtaagcatgtagatgatcttcttggccagatgcagtggctcatgcctataataccagcactatgggaagccgaggtgggaggagcacttgagcccaagagtttgagactagcctgagcaacatatggaaa

SEQ ID NO: 97305 - DNA, 805 bp, Homo sapiens
gcccttggatgcagtaggcatttatctatgtgacttgatgtaaggggctccaaaaatgccccccgcccaaccagcctaaatatctccctgccagactgtcatactgtctgtgcatgaaacccctggcttcagcattgccctctcccatttcctcgtattgaaataggtggcaagctgcagtcaggactggcaaagagccctgtgcaaaatgaaaatggagggctcctcgtccaaaagttaggaagaatttcaaggcaacaacagaagagaattcaactaagcacggggccctgcactgctgcacaggctgtgcactcttgaagccagctctgcctgcagcctgagctcttagcgagacaggatcacctcctttccttgcaccagtgaggagccctggagctgcccagatcaaggacacaaagacaaaacgagcctctttactcagctcaggacaattgttgttttcggagatgggtgaagctcagggccctctgtccagctggcctaacttcagggcctcctgaaattcctctgggttctccaggcccctggagtcctggcagttgatggggcattttctgcctatggcctggctggccctgagcttgtccttactctattgcagtgtttgccttgcctgctgagggactcgctctggcatgtgggcctgatcctgaggggtccttttcctgtttcctgaacaaccaccagatctttggatttagctcctagcagccccaggagcacccccagacagacttcccgtgcttggggctgttctaggctctccagatccactgtcttc

SEQ ID NO: 97306 - DNA, 592 bp, Homo sapiens
ggcaaggacaggcccaggctgcctggccccttacaccacccatgggctccatcccacacaggaggcagctgggtgggtccagaggctgaaatgagagccacgcagcccagtcaagtgggacagacccagaggtatctggacatcacccgagggaggagaaggtgctgataactggaacctgggatgggcagctcccaggcacactggccaagatccagaagacaaagtcttcctgccctgcaagtgcagatgcttctgcctcaaactgacagggagcagagggtgaagaacattctccacactcagcaggagatgggcaatcccacacaggcaaggaagtcagctcagcctgaggcggggacacacccaggtcacccacgatgggctgtggcatcaacttcaaggaatccacaaccaccaacaagctccaaggagcccccgaggttgaattcagggtgccaggtgttatgcccggctctgccctcccatactgagagctgagcctcagtctgccatccatgagacagaaataagggttggtgtggaaccaggcttggtaaactgcagcctggagaccaaatccagcccctgg

SEQ ID NO: 97307 - DNA, 370 bp, Homo sapiens
cagaaaaagagactgagagagagagagagagacaaatgaacaggagaactacactgtgtatttgggtgatgctccagggaggtttgaacagactgtcaatgtcatgttttgaagagagcaaggaattttggggatactgctgtgccagagaaaacaggttcgagagaaagaaaacagaggcgggatcccttacagagcaagaggtaaccaggagttgtttaggtaggcatccagccaggggaattgctcagggttctgcagagggcagcctctggggctccggctggggtggggagatggcttggccctgggctgttggcctgggaactggggttcagccacagttgagttccaagcctcctagtgtttc

SEQ ID NO: 97308 - DNA, 336 bp, Homo sapiens
  misc_feature (37)..(37): n is a, c, g, or t
cgaatgcgaaagtgggcaggcggccttaaactccggngctcaattaatccctcagcctcggcctcggaaagtgtgggatgacaggcatgaaccagggggctcatcactctcgttggagctcctatatcagagctagtcctggatcaagtttttctccttcagtctatcctcacccctgtgtgatctcatccactgccacagcttcagataccacccatgtgccaatgactcccatagccataactcagccctgacctcttttctggactcattttgtaagtgcattcaagatttttctttccttgactattttgcaggcatctcaaatttaccata

SEQ ID NO: 97309 - DNA, 378 bp, Homo sapiens
ttctgccctagccctggcatcagccgtttcttcagagagttctaatttcttttactggagaatgatatttagaaactaacatgggcattaggtataccccttttgtggacagagctaagaaatacacctgctacattaatgtgtagacttaaaaaaaataaatcacgagttaaagctagtacttctaattccaatctaatgtagtaagtcttttctgtcattctgtatttgtatttgcaaatattctggtttccagagtatcagcatatttaatcttttggataattatataatacccagaaaatagttgcagaattatgcaaatgtcactaaaagcaataaagttattaagttcaagatttcttcacagttcttttg

SEQ ID NO: 97310 - DNA, 424 bp, Homo sapiens
agagggcagggctggaaggatggtgagtggggctctgggcatcttgtcccagccaatgggtaagagggtcaaggagctggtgtgccaggctgggctgggctcaggaggagggttcagaccctcctaggcccctggggttcatagagacatgctttgtctgatagtagagggtcctgaagtattggaggagatgggggaatcttgttagggtcctggtgttgggccaggagccaggacatggttcaggctggagctcccagccccaaagaggaacagcctgtccctttgcaagggcggagttgccttgggcctccccaggccagcctagctctcagtgctgggggtgaaggagccagaagggaactggtactcctggcccagtgcgagagtcacatcagggcactgaatagtagaaatcagagga

SEQ ID NO: 97311 - DNA, 383 bp, Homo sapiens
atctcttgcctgagggcgttctttgaaattatgtgaggactttgtctgcccaccctgcaggctggaagtgtcagaagattaatgtcacccttcctctggaatagctctcaaccaaagattgatgggatttgatggctcctctagtgggagaatgctaaggcttgtattctccacttttcccagagtgtcttcctagcattaagctacagtagcccatgatggttgctggtttacgaatacacccttgattgaagatgcgccttccctgtttcactttcccctgctcctctgcactgatttccttgagcaggctcacatttcaagcaaggaacatcaatgttattaattgactgtgaaaaagaaaaagccctcacaaccccaag

SEQ ID NO: 97312 - DNA, 500 bp, Homo sapiens
taatttctaaaagaaactgttatttctaacacttgttatttattctttaacaaaaagggaaactttgaagaggaactttttacttttcacatgcggatccattagtcctcgagaatttaacagtgaacctatatagatgtattttgctgtccttacagaacatgcagtgtaagaagtacctttaatgccaacctacacacttctttcccgaagtacccaattaagtgcaaatgcttaatgtctttagtgttttatagtaaagcaaaaaatccttatttagaattagaagtacaggcctgtgcaacatggcggaaccccatctttaccaaaaaatacaaaaattagctggacatggtggcatgcttatgtagtctcagctacttgggggctgaggtgggaggatcgcttgagtccgggaggccaaggttgcagtgagccattttcgcaccattgcactccagcctgggtgacaaagtgaaacttcaccttaaaaaaaaaaa

SEQ ID NO: 97313 - DNA, 2309 bp, Homo sapiens
tgctagctgcttccgggcggaggtcctcggcctcccctaggcgaggcactaggtctgggggcggcgggtcttagcgtgcccgccacgctcgccgcctcccacctgccctggctggctggggcccgacccttgcgtcgctccggggcccaagttacggactcgggaatccagttgtccgcaccgaacaagccccgccgcagcgcccgcccctcctcttgctgctttggagtctcccggcttccgccttccgcagcagtcacgtgcctccgatcacgtgaccggcgcctctgtcattctactgcggccgccctggcttccttctacctgtgcggccctcaacgtctccttggtgcgggacccgcttcactttcggctcccggagtctccctccactgctcagacctctggacctgacaggagacgcctacttggctctgacgcggcgccccagcccggctgtgtccccggcgccccggaccaccctccctgccggctttgggtgcgttgtggggtcccgaggattcgcgagatttgttgaaagacattcaagattacgaagtttagatgaccaaaatggatatccgaggtgctgtggatgctgctgtccccaccaatattattgctgccaaggctgcagaagttcgtgcaaacaaagtcaactggcaatcctatcttcagggacagatgatttctgctgaagattgtgagtttattcagaggtttgaaatgaaacgaagccctgaagagaagcaagagatgcttcaaactgaaggcagccagtgtgctaaaacatttataaatctgatgactcatatctgcaaagaacagaccgttcagtatatactaactatggtggatgatatgctgcaggaaaatcatcagcgtgttagcattttctttgactatgcaagatgtagcaagaacactgcgtggccctactttctgccaatgttgaatcgccaggatcccttcactgttcatatggcagcaagaattattgccaagttagcagcttggggaaaagaactgatggaaggcagtgacttaaattactatttcaattggataaaaactcagctgagttcacagaaactgcgtggtagcggtgttgctgttgaaacaggaacagtctcttcaagtgatagttcgcagtatgtgcagtgcgtggccgggtgtttgcagctgatgctccgggtcaatgagtaccgctttgcttgggtggaagcagatggggtaaattgcataatgggagtgttgagtaacaagtgtggctttcagctccagtatcaaatgattttttcaatatggctcctggcattcagtcctcaaatgtgtgaacacctgcggcgctataatatcattccagttctgtctgatatccttcaggagtctgtcaaagagaaagtaacaagaatcattcttgcagcatttcgtaactttttagaaaaatcaactgaaagagaaactcgccaagaatatgccctggctatgattcagtgcaaagttctgaaacagttggagaacttggaacagcagaagtacgatgatgaagatatcagcgaagatatcaaatttcttttggaaaaacttggagagagtgtccaggaccttagttcatttgatgaatacagttcagaacttaaatctggaaggttggaatggagtcctgtgcacaaatctgagaaattttggagagagaatgctgtgaggttaaatgagaagaattatgaactcttgaaaatcttgacaaaacttttggaagtgtcagatgatccccaagtcttagctgttgctgctcacgatgttggagaatatgtgcggcattatccacgaggcaaacgggtcatcgagcagctcggtgggaagcagctggtcatgaaccacatgcatcatgaagaccagcaggtccgctataatgctctgctggccgtgcagaagctcatggtgcacaactgggaataccttggcaagcagctccagtccgagcagccccagaccgctgccgcccgaagctaagcctgcctctggccttcccctccgcctcaatgcagaaccagtagtgggagcactgtgtttagagttaagagtgaacactgtttgattttacttggaatttcctctgttatatagcttttcccaatgctaatttccaaacaacaacaacaaaataacatgtttgcctgttaagttgtataaaagtaggtgattctgtatttaaagaaaatattactgttacatatactgcttgcaatttctgtatttattgttctctggaaataaatatagttattaaaggattctcactccaa

SEQ ID NO: 97314 - DNA, 2255 bp, Homo sapiens
tgctagctgcttccgggcggaggtcctcggcctcccctaggcgaggcactaggtctgggggcggcgggtcttagcgtgcccgccacgctcgccgcctcccacctgccctggctggctggggcccgacccttgcgtcgctccggggcccaagttacggactcgggaatccagttgtccgcaccgaacaagccccgccgcagcgcccgcccctcctcttgctgctttggagtctcccggcttccgccttccgcagcagtcacgtgcctccgatcacgtgaccggcgcctctgtcattctactgcggccgccctggcttccttctacctgtgcggccctcaacgtctccttggtgcgggacccgcttcactttcggctcccggagtctccctccactgctcagacctctggacctgacaggagacgcctacttggctctgacgcggcgccccagcccggctgtgtccccggcgccccggaccaccctccctgccggctttgggtgcgttgtggggtcccgaggattcgcgagatttgttgaaagacattcaagattacgaagtttagatgaccaaaatggatatccgaggtgctgtggatgctgctgtccccaccaatattattgctgccaaggctgcagaagttcgtgcaaacaaagtcaactggcaatcctatcttcagggacagatgatttctgctgaagattgtgagtttattcagaggtttgaaatgaaacgaagccctgaagagaagcaagagatgcttcaaactgaaggcagccagtgtgctaaaacatttataaatctgatgactcatatctgcaaagaacagaccgttcagtatatactaactatggtggatgatatgctgcaggaaaatcatcagcgtgttagcattttctttgactatgcaagatgtagcaagaacactgcgtggccctactttctgccaatgttgaatcgccaggatcccttcactgttcatatggcagcaagaattattgccaagttagcagcttggggaaaagaactgatggaaggcagtgacttaaattactatttcaattggataaaaactcagctgagttcacagagttcgcagtatgtgcagtgcgtggccgggtgtttgcagctgatgctccgggtcaatgagtaccgctttgcttgggtggaagcagatggggtaaattgcataatgggagtgttgagtaacaagtgtggctttcagctccagtatcaaatgattttttcaatatggctcctggcattcagtcctcaaatgtgtgaacacctgcggcgctataatatcattccagttctgtctgatatccttcaggagtctgtcaaagagaaagtaacaagaatcattcttgcagcatttcgtaactttttagaaaaatcaactgaaagagaaactcgccaagaatatgccctggctatgattcagtgcaaagttctgaaacagttggagaacttggaacagcagaagtacgatgatgaagatatcagcgaagatatcaaatttcttttggaaaaacttggagagagtgtccaggaccttagttcatttgatgaatacagttcagaacttaaatctggaaggttggaatggagtcctgtgcacaaatctgagaaattttggagagagaatgctgtgaggttaaatgagaagaattatgaactcttgaaaatcttgacaaaacttttggaagtgtcagatgatccccaagtcttagctgttgctgctcacgatgttggagaatatgtgcggcattatccacgaggcaaacgggtcatcgagcagctcggtgggaagcagctggtcatgaaccacatgcatcatgaagaccagcaggtccgctataatgctctgctggccgtgcagaagctcatggtgcacaactgggaataccttggcaagcagctccagtccgagcagccccagaccgctgccgcccgaagctaagcctgcctctggccttcccctccgcctcaatgcagaaccagtagtgggagcactgtgtttagagttaagagtgaacactgtttgattttacttggaatttcctctgttatatagcttttcccaatgctaatttccaaacaacaacaacaaaataacatgtttgcctgttaagttgtataaaagtaggtgattctgtatttaaagaaaatattactgttacatatactgcttgcaatttctgtatttattgttctctggaaataaatatagttattaaaggattctcactccaa

SEQ ID NO: 97315 - DNA, 542 bp, Homo sapiens
  misc_feature (42)..(42): n is a, c, g, or t
  misc_feature (70)..(71): n is a, c, g, or t
gggagagccagccctggcccgacggttccgtttttcaccganactgggtgtcaaaacacatttggggggnnaagggtcatcgagcagctcggtgggaagcagctggtcatgaaccacatgcatcatgaagaccagcaggtccgctataatgctctgctggccgtgcagaagctcatggtgcacaactgggaataccttggcaagcagctccagtccgagcagccccagaccgctgccgcccgaagctaagcctgcctctggccttcccctccgcctcaatgcagaaccagtagtgggagcactgtgtttagagttaagagtgaacactgtttgattttacttggaatttcctctgttatatagcttttcccaatgctaatttccaaacaacaacaacaaaataacatgtttgcctgttaagttgtataaaagtaggtgattctgtatttaaagaaaatattactgttacatatactgcttgcaatttctgtatttattgttctctggaaataaatatagttattaaaggattctcactccaa

SEQ ID NO: 97316 - DNA, 516 bp, Homo sapiens
  misc_feature (1)..(1): n is a, c, g, or t
  misc_feature (7)..(7): n is a, c, g, or t
  misc_feature (13)..(15): n is a, c, g, or t
  misc_feature (28)..(28): n is a, c, g, or t
nacttgncggggnnncataaagccgcanttttgggtggcgtagacagcggtcatcgagcagctcggtgggaagcagctggtcatgaaccacatgcatcatgaagaccagcaggtccgctataatgctctgctggccgtgcagaagctcatggtgcacaactgggaataccttggcaagcagctccagtccgagcagccccagaccgctgccgcccgaagctaagcctgcctctggccttcccctccgcctcaatgcagaaccagtagtgggagcactgtgtttagagttaagagtgaacactgtttgattttacttggaatttcctctgttatatagcttttcccaatgctaatttccaaacaacaacaacaaaataacatgtttgcctgttaagttgtataaaagtaggtgattctgtatttaaagaaaatattactgttacatatactgcttgcaatttctgtatttattgttctctggaaataaatatagttattaaaggattctcactccaa

SEQ ID NO: 97317 - DNA, 395 bp, Homo sapiens
  misc_feature (33)..(33): n is a, c, g, or t
agggcgcgacaagataatgtcttaggaaaaagncttgggtgggaataccttggcaagcagctccagtccgagcagccccagaccgctgccgcccgaagctaagcctgcctctggccttcccctccgcctcaatgcagaaccagtagtgggagcactgtgtttagagttaagagtgaacactgtttgattttacttggaatttcctctgttatatagcttttcccaatgctaatttccaaacaacaacaacaaaataacatgtttgcctgttaagttgtataaaagtaggtgattctgtatttaaagaaaatattactgttacatatactgcttgcaatttctgtatttattgttctctggaaataaatatagttattaaaggattctcactccaa

SEQ ID NO: 97318 - DNA, 400 bp, Homo sapiens
  misc_feature (37)..(37): n is a, c, g, or t
gggggccgtccggccgccggcttcgtcttcccccggngcttcggttggaataccttggcaagcagctccagtccgagcagccccagaccgctgccgcccgaagctaagcctgcctctggccttcccctccgcctcaatgcagaaccagtagtgggagcactgtgtttagagttaagagtgaacactgtttgattttacttggaatttcctctgttatatagcttttcccaatgctaatttccaaacaacaacaacaaaataacatgtttgcctgttaagttgtataaaagtaggtgattctgtatttaaagaaaatattactgttacatatactgcttgcaatttctgtatttattgttctctggaaataaatatagttattaaaggattctcactccaa

SEQ ID NO: 97319 - DNA, 401 bp, Homo sapiens
tttgctattgaaattctcattctccttacttcattcttttttttcagggaataccttggcaagcagctccagtccgagcagccccagaccgctgccgcccgaagctaagcctgcctctggccttcccctccgcctcaatgcagaaccagtagtgggagcactgtgtttagagttaagagtgaacactgtttgattttacttggaatttcctctgttatatagcttttcccaatgctaatttccaaacaacaacaacaaaataacatgtttgcctgttaagttgtataaaagtaggtgattctgtatttaaagaaaatattactgttacatatactgcttgcaatttctgtatttattgttctctggaaataaatatagttattaaaggattctcactccaa

SEQ ID NO: 97320 - DNA, 2519 bp, Homo sapiens
  misc_feature (2455)..(2455): n is a, c, g, or t
  misc_feature (2496)..(2496): n is a, c, g, or t
tgctagctgcttccgggcggaggtcctcggcctcccctaggcgaggcactaggtctgggggcggcgggtcttagcgtgcccgccacgctcgccgcctcccacctgccctggctggctggggcccgacccttgcgtcgctccggggcccaagttacggactcgggaatccagttgtccgcaccgaacaagccccgccgcagcgcccgcccctcctcttgctgctttggagtctcccggcttccgccttccgcagcagtcacgtgcctccgatcacgtgaccggcgcctctgtcattctactgcggccgccctggcttccttctacctgtgcggccctcaacgtctccttggtgcgggacccgcttcactttcggctcccggagtctccctccactgctcagacctctggacctgacaggagacgcctacttggctctgacgcggcgccccagcccggctgtgtccccggcgccccggaccaccctccctgccggctttgggtgcgttgtggggtcccgaggattcgcgagatttgttgaaagacattcaagattacgaagtttagatgaccaaaatggatatccgaggtgctgtggatgctgctgtccccaccaatattattgctgccaaggctgcagaagttcgtgcaaacaaagtcaactggcaatcctatcttcagggacagatgatttctgctgaagattgtgagtttattcagaggtttgaaatgaaacgaagccctgaagagaagcaagagatgcttcaaactgaaggcagccagtgtgctaaaacatttataaatctgatgactcatatctgcaaagaacagaccgttcagtatatactaactatggtggatgatatgctgcaggaaaatcatcagcgtgttagcattttctttgactatgcaagatgtagcaagaacactgcgtggccctactttctgccaatgttgaatcgccaggatcccttcactgttcatatggcagcaagaattattgccaagttagcagcttggggaaaagaactgatggaaggcagtgacttaaattactatttcaattggataaaaactcagctgagttcacagaaactgcgtggtagcggtgttgctgttgaaacaggaacagtctcttcaagtgatagttcgcagtatgtgcagtgcgtggccgggtgtttgcagctgatgctccgggtcaatgagtaccgctttgcttgggtggaagcagatggggtaaattgcataatgggagtgttgagtaacaagtgtggctttcagctccagtatcaaatgattttttcaatatggctcctggcattcagtcctcaaatgtgtgaacacctgcggcgctataatatcattccagttctgtctgatatccttcaggagtctgtcaaagagaaagtaacaagaatcattcttgcagcatttcgtaactttttagaaaaatcaactgaaagagaaactcgccaagaatatgccctggctatgattcagtgcaaagttctgaaacagttggagaacttggaacagcagaagtacgatgatgaagatatcagcgaagatatcaaatttcttttggaaaaacttggagagagtgtccaggaccttagttcatttgatgaatacagttcagaacttaaatctggaaggttggaatggagtcctgtgcacaaatctgagaaattttggagagagaatgctgtgaggttaaatgagaagaattatgaactcttgaaaatcttgacaaaacttttggaagtgtcagatgatccccaagtcttagctgttgctgctcacgatgttggagaatatgtgcggcattatccacgaggcaaacgggtcatcgagcagctcggtgggaagcagctggtcatgaaccacatgcatcatgaagaccagcaggtccgctataatgctctgctggccgtgcagaagctcatggtgcacaactgggaataccttggcaagcagctccagtccgagcagccccagaccgctgccgcccgaagctaagcctgcctctggccttcccctccgcctcaatgcagaaccagtagtgggagcactgtgtttagagttaagagtgaacactgtttgattttacttggaatttcctctgttatatagcttttcccaatgctaatttccaaacaacaacaacaaaataacatgtttgcctgttaagttgtataaaagtaggtgattctgtatttaaagaaaatattactgttacatatactgcttgcaatttctgtatttattgttctctggaaataaatatagttattaaaggattctcactccaaacatggcctctctctttacttggactttgaacaaaagtcaactgttgtctcttttcaaaccaaattgggagaattgttgcaaagtagtgaatggcaaataaatgttttaaaatctaattacaatcactgcccgtcgttacacgtcngactgggaaccctgcgttaccacttatcgcctggagacatnccctttggcagcttgcgtatacg

SEQ ID NO: 97321 - DNA, 2472 bp, Homo sapiens
tgctagctgcttccgggcggaggtcctcggcctcccctaggcgaggcactaggtctgggggcggcgggtcttagcgtgcccgccacgctcgccgcctcccacctgccctggctggctggggcccgacccttgcgtcgctccggggcccaagttacggactcgggaatccagttgtccgcaccgaacaagccccgccgcagcgcccgcccctcctcttgctgctttggagtctcccggcttccgccttccgcagcagtcacgtgcctccgatcacgtgaccggcgcctctgtcattctactgcggccgccctggcttccttctacctgtgcggccctcaacgtctccttggtgcgggacccgcttcactttcggctcccggagtctccctccactgctcagacctctggacctgacaggagacgcctacttggctctgacgcggcgccccagcccggctgtgtccccggcgccccggaccaccctccctgccggctttgggtgcgttgtggggtcccgaggattcgcgaggtaaggccgccctcgcgttgtttggtctcaggctgcagaccaggtcaggcgactcttgcagtttctccagcttgcctggtgcgtgctggtgtctcgccgcttggtcctctcctgttcttcggcccccggttgccagattgcttttcttccaggcctcaaccagatttgttgaaagacattcaagattacgaagtttagatgaccaaaatggatatccgaggtgctgtggatgctgctgtccccaccaatattattgctgccaaggctgcagaagttcgtgcaaacaaagtcaactggcaatcctatcttcagggacagatgatttctgctgaagattgtgagtttattcagaggtttgaaatgaaacgaagccctgaagagaagcaagagatgcttcaaactgaaggcagccagtgtgctaaaacatttataaatctgatgactcatatctgcaaagaacagaccgttcagtatatactaactatggtggatgatatgctgcaggaaaatcatcagcgtgttagcattttctttgactatgcaagatgtagcaagaacactgcgtggccctactttctgccaatgttgaatcgccaggatcccttcactgttcatatggcagcaagaattattgccaagttagcagcttggggaaaagaactgatggaaggcagtgacttaaattactatttcaattggataaaaactcagctgagttcacagaaactgcgtggtagcggtgttgctgttgaaacaggaacagtctcttcaagtgatagttcgcagtatgtgcagtgcgtggccgggtgtttgcagctgatgctccgggtcaatgagtaccgctttgcttgggtggaagcagatggggtaaattgcataatgggagtgttgagtaacaagtgtggctttcagctccagtatcaaatgattttttcaatatggctcctggcattcagtcctcaaatgtgtgaacacctgcggcgctataatatcattccagttctgtctgatatccttcaggagtctgtcaaagagaaagtaacaagaatcattcttgcagcatttcgtaactttttagaaaaatcaactgaaagagaaactcgccaagaatatgccctggctatgattcagtgcaaagttctgaaacagttggagaacttggaacagcagaagtacgatgatgaagatatcagcgaagatatcaaatttcttttggaaaaacttggagagagtgtccaggaccttagttcatttgatgaatacagttcagaacttaaatctggaaggttggaatggagtcctgtgcacaaatctgagaaattttggagagagaatgctgtgaggttaaatgagaagaattatgaactcttgaaaatcttgacaaaacttttggaagtgtcagatgatccccaagtcttagctgttgctgctcacgatgttggagaatatgtgcggcattatccacgaggcaaacgggtcatcgagcagctcggtgggaagcagctggtcatgaaccacatgcatcatgaagaccagcaggtccgctataatgctctgctggccgtgcagaagctcatggtgcacaactgggaataccttggcaagcagctccagtccgagcagccccagaccgctgccgcccgaagctaagcctgcctctggccttcccctccgcctcaatgcagaaccagtagtgggagcactgtgtttagagttaagagtgaacactgtttgattttacttggaatttcctctgttatatagcttttcccaatgctaatttccaaacaacaacaacaaaataacatgtttgcctgttaagttgtataaaagtaggtgattctgtatttaaagaaaatattactgttacatatactgcttgcaatttctgtatttattgttctctggaaataaatatagttattaaaggattctcactccaa

SEQ ID NO: 97322 - DNA, 2004 bp, Homo sapiens
tgctagctgcttccgggcggaggtcctcggcctcccctaggcgaggcactaggtctgggggcggcgggtcttagcgtgcccgccacgctcgccgcctcccacctgccctggctggctggggcccgacccttgcgtcgctccggggcccaagttacggactcgggaatccagttgtccgcaccgaacaagccccgccgcagcgcccgcccctcctcttgctgctttggagtctcccggcttccgccttccgcagcagtcacgtgcctccgatcacgtgaccggcgcctctgtcattctactgcggccgccctggcttccttctacctgtgcggccctcaacgtctccttggtgcgggacccgcttcactttcggctcccggagtctccctccactgctcagacctctggacctgacaggagacgcctacttggctctgacgcggcgccccagcccggctgtgtccccggcgccccggaccaccctccctgccggctttgggtgcgttgtggggtcccgaggattcgcgagatttgttgaaagacattcaagattacgaagtttagatgaccaaaatggatatccgaggtgctgtggatgctgctgtccccaccaatattattgctgccaaggctgcagaagttcgtgcaaacaaagtcaactggcaatcctatcttcagggacagatgatttctgctgaagattgtgagtttattcagaggtttgaaatgaaacgaagccctgaagagaagcaagagatgcttcaaactgaaggcagccagtgtgctaaaacatttataaatctgatgactcatatctgcaaagaacagaccgttcagtatatactaactatggtggatgatatgctgcaggaaaatcatcagcgtgttagcattttctttgactatgcaagatgtagcaagaacactgcgtggccctactttctgccaatgttgaatcgccaggatcccttcactgttcatatggcagcaagaattattgccaagttagcagcttggggaaaagaactgatggaaggcagtgacttaaattactatttcaattggataaaaactcagctgagttcacagaaactgcgtggtagcggtgttgctgttgaaacaggaacagtctcttcaagtgatagttcgcagtatgtgcagtgcgtggccgggtgtttgcagctgatgctccgggtcaatgagtaccgctttgcttgggtggaagcagatggggtaaattgcataatgggagtgttgagtaacaagtgtggctttcagctccagtatcaaatgattttttcaatatggctcctggcattcagtcctcaaatgtgtgaacacctgcggcgctataatatcattccagttctgtctgatatccttcaggagtctgtcaaagagaaagtaacaagaatcattcttgcagcatttcgtaatcttgacaaaacttttggaagtgtcagatgatccccaagtcttagctgttgctgctcacgatgttggagaatatgtgcggcattatccacgaggcaaacgggtcatcgagcagctcggtgggaagcagctggtcatgaaccacatgcatcatgaagaccagcaggtccgctataatgctctgctggccgtgcagaagctcatggtgcacaactgggaataccttggcaagcagctccagtccgagcagccccagaccgctgccgcccgaagctaagcctgcctctggccttcccctccgcctcaatgcagaaccagtagtgggagcactgtgtttagagttaagagtgaacactgtttgattttacttggaatttcctctgttatatagcttttcccaatgctaatttccaaacaacaacaacaaaataacatgtttgcctgttaagttgtataaaagtaggtgattctgtatttaaagaaaatattactgttacatatactgcttgcaatttctgtatttattgttctctggaaataaatatagttattaaaggattctcactccaa

SEQ ID NO: 97323 - DNA, 1526 bp, Homo sapiens
  misc_feature (6)..(6): n is a, c, g, or t
  misc_feature (16)..(16): n is a, c, g, or t
  misc_feature (19)..(19): n is a, c, g, or t
  misc_feature (25)..(25): n is a, c, g, or t
  misc_feature (34)..(34): n is a, c, g, or t
ttgatngttctccccncancaagangtgggccgnatatggatggcagtcagtgtgctaaaacatttataaatctgatgactcatatctgcaaagaacagaccgttcagtatatactaactatggtggatgatatgctgcaggaaaatcatcagcgtgttagcattttctttgactatgcaagatgtagcaagaacactgcgtggccctactttctgccaatgttgaatcgccaggatcccttcactgttcatatggcagcaagaattattgccaagttagcagcttggggaaaagaactgatggaaggcagtgacttaaattactatttcaattggataaaaactcagctgagttcacagagttcgcagtatgtgcagtgcgtggccgggtgtttgcagctgatgctccgggtcaatgagtaccgctttgcttgggtggaagcagatggggtaaattgcataatgggagtgttgagtaacaagtgtggctttcagctccagtatcaaatgattttttcaatatggctcctggcattcagtcctcaaatgtgtgaacacctgcggcgctataatatcattccagttctgtctgatatccttcaggagtctgtcaaagagaaagtaacaagaatcattcttgcagcatttcgtaactttttagaaaaatcaactgaaagagaaactcgccaagaatatgccctggctatgattcagtgcaaagttctgaaacagttggagaacttggaacagcagaagtacgatgatgaagatatcagcgaagatatcaaatttcttttggaaaaacttggagagagtgtccaggaccttagttcatttgatgaatacagttcagaacttaaatctggaaggttggaatggagtcctgtgcacaaatctgagaaattttggagagagaatgctgtgaggttaaatgagaagaattatgaactcttgaaaatcttgacaaaacttttggaagtgtcagatgatccccaagtcttagctgttgctgctcacgatgttggagaatatgtgcggcattatccacgaggcaaacgggtcatcgagcagctcggtgggaagcagctggtcatgaaccacatgcatcatgaagaccagcaggtccgctataatgctctgctggccgtgcagaagctcatggtgcacaactgggaataccttggcaagcagctccagtccgagcagccccagaccgctgccgcccgaagctaagcctgcctctggccttcccctccgcctcaatgcagaaccagtagtgggagcactgtgtttagagttaagagtgaacactgtttgattttacttggaatttcctctgttatatagcttttcccaatgctaatttccaaacaacaacaacaaaataacatgtttgcctgttaagttgtataaaagtaggtgattctgtatttaaagaaaatattactgttacatatactgcttgcaatttctgtatttattgttctctggaaataaatatagttattaaaggattctcactccaa

SEQ ID NO: 97324 - DNA, 2905 bp, Homo sapiens
  misc_feature (2904)..(2904): n is a, c, g, or t
tgctagctgcttccgggcggaggtcctcggcctcccctaggcgaggcactaggtctgggggcggcgggtcttagcgtgcccgccacgctcgccgcctcccacctgccctggctggctggggcccgacccttgcgtcgctccggggcccaagttacggactcgggaatccagttgtccgcaccgaacaagccccgccgcagcgcccgcccctcctcttgctgctttggagtctcccggcttccgccttccgcagcagtcacgtgcctccgatcacgtgaccggcgcctctgtcattctactgcggccgccctggcttccttctacctgtgcggccctcaacgtctccttggtgcgggacccgcttcactttcggctcccggagtctccctccactgctcagacctctggacctgacaggagacgcctacttggctctgacgcggcgccccagcccggctgtgtccccggcgccccggaccaccctccctgccggctttgggtgcgttgtggggtcccgaggattcgcgagatttgttgaaagacattcaagattacgaagtttagatgaccaaaatggatatccgaggtgctgtggatgctgctgtccccaccaatattattgctgccaaggctgcagaagttcgtgcaaacaaagtcaactggcaatcctatcttcagggacagatgatttctgctgaagattgtgagtttattcagaggtttgaaatgaaacgaagccctgaagagaagcaagagatgcttcaaactgaaggcagccagtgtgctaaaacatttataaatctgatgactcatatctgcaaagaacagaccgttcagtatatactaactatggtggatgatatgctgcaggaaaatcatcagcgtgttagcattttctttgactatgcaagatgtagcaagaacactgcgtggccctactttctgccaatgttgaatcgccaggatcccttcactgttcatatggcagcaagaattattgccaagttagcagcttggggaaaagaactgatggaaggcagtgacttaaattactatttcaattggataaaaactcagctgagttcacagaaactgcgtggtagcggtgttgctgttgaaacaggaacagtctcttcaagtgatagttcgcagtatgtgcagtgcgtggccgggtgtttgcagctgatgctccgggtcaatgagtaccgctttgcttgggtggaagcagatggggtaaattgcataatgggagtgttgagtaacaagtgtggctttcagctccagtatcaaatgattttttcaatatggctcctggcattcagtcctcaaatgtgtgaacacctgcggcgctataatatcattccagttctgtctgatatccttcaggagtctgtcaaagagaaagtaacaagaatcattcttgcagcatttcgtaactttttagaaaaatcaactgaaagagaaactcgccaagaatatgccctggctatgattcagtgcaaagttctgaaacagttggagaacttggaacagcagaagtacgatgatgaagatatcagcgaagatatcaaatttcttttggaaaaacttggagagagtgtccaggaccttagttcatttgatgaatacagttcagaacttaaatctggaaggttggaatggagtcctgtgcacaaatctgagaaattttggagagagaatgctgtgaggttaaatgagaagaattatgaactcttgaaaatcttgacaaaacttttggaagtgtcagatgatccccaagtcttagctgttgctgctcacgatgttggagaatatgtgcggcattatccacgaggcaaacgggtcatcgagcagctcggtgggaagcagctggtcatgaaccacatgcatcatgaagaccagcaggtccgctataatgctctgctggccgtgcagaagctcatggtgcacaactgggaataccttggcaagcagctccagtccgagcagccccagaccgctgccgcccgaagctaagcctgcctctggccttcccctccgcctcaatgcagaaccagtagtgggagcactgtgtttagagttaagagtgaacactgtttgattttacttggaatttcctctgttatatagcttttcccaatgctaatttccaaacaacaacaacaaaataacatgtttgcctgttaagttgtataaaagtaggtgattctgtatttaaagaaaatattactgttacatatactgcttgcaatttctgtatttattgttctctggaaataaatatagttattaaaggattctcactccaaaaacacaacaccaacaaactctccgcaccaacacgaacctaaacacaaaccataacccgcacaccacacaccacacacacacacaccaacaacagcaccgacaacaaacacaacaccaaacactccccaacagacccgcgcgccaccgagccaaagcaccaccagccgggagccccccaactcccccaaccacccccacctctcacgcacccccccaactcccacaccaccctctcaaaccacacgccgcacggagcaggaacccaacggccgagcgacgacaaaccacccgggggacacgcccacgcaacaccacaccgcacgcgggtgggaccgtcaactgcccaagcaccgcacccgacaggacagcagggcggagcacacaacacggcggcgaccgcacgcgccggccgcggagcggacaacagaccgcggatcagcaaactcacgcaacaaatgagaaccgcgcccagcagaggcagcgcgcgcagccagacgggcgcgtcgagccacaaggcgcgaccgcgcaaccagcgcgcgaagcgcacacgcccgacaccacgcgaccccacgcgaccgctcgacaacgcacccnc

SEQ ID NO: 97325 - DNA, 2337 bp, Homo sapiens
  misc_feature (2317)..(2317): n is a, c, g, or t
  misc_feature (2323)..(2323): n is a, c, g, or t
  misc_feature (2327)..(2327): n is a, c, g, or t
  misc_feature (2332)..(2332): n is a, c, g, or t
tgctagctgcttccgggcggaggtcctcggcctcccctaggcgaggcactaggtctgggggcggcgggtcttagcgtgcccgccacgctcgccgcctcccacctgccctggctggctggggcccgacccttgcgtcgctccggggcccaagttacggactcgggaatccagttgtccgcaccgaacaagccccgccgcagcgcccgcccctcctcttgctgctttggagtctcccggcttccgccttccgcagcagtcacgtgcctccgatcacgtgaccggcgcctctgtcattctactgcggccgccctggcttccttctacctgtgcggccctcaacgtctccttggtgcgggacccgcttcactttcggctcccggagtctccctccactgctcagacctctggacctgacaggagacgcctacttggctctgacgcggcgccccagcccggctgtgtccccggcgccccggaccaccctccctgccggctttgggtgcgttgtggggtcccgaggattcgcgagatttgttgaaagacattcaagattacgaagtttagatgaccaaaatggatatccgaggtgctgtggatgctgctgtccccaccaatattattgctgccaaggctgcagaagttcgtgcaaacaaagtcaactggcaatcctatcttcagggacagatgatttctgctgaagattgtgagtttattcagaggtttgaaatgaaacgaagccctgaagagaagcaagagatgcttcaaactgaaggcagccagtgtgctaaaacatttataaatctgatgactcatatctgcaaagaacagaccgttcagtatatactaactatggtggatgatatgctgcaggaaaatcatcagcgtgttagcattttctttgactatgcaagatgtagcaagaacactgcgtggccctactttctgccaatgttgaatcgccaggatcccttcactgttcatatggcagcaagaattattgccaagttagcagcttggggaaaagaactgatggaaggcagtgacttaaattactatttcaattggataaaaactcagctgagttcacagaaactgcgtggtagcggtgttgctgttgaaacaggaacagtctcttcaagtgatagttcgcagtatgtgcagtgcgtggccgggtgtttgcagctgatgctccgggtcaatgagtaccgctttgcttgggtggaagcagatggggtaaattgcataatgggagtgttgagtaacaagtgtggctttcagctccagtatcaaatgattttttcaatatggctcctggcattcagtcctcaaatgtgtgaacacctgcggcgctataatatcattccagttctgtctgatatccttcaggagtctgtcaaagagaaagtaacaagaatcattcttgcagcatttcgtaactttttagaaaaatcaactgaaagagaaactcgccaagaatatgccctggctatgattcagtgcaaagttctgaaacagttggagaacttggaacagcagaagtacgatgatgaagatatcagcgaagatatcaaatttcttttggaaaaacttggagagagtgtccaggaccttagttcatttgatgaatacagttcagaacttaaatctggaaggttggaatggagtcctgtgcacaaatctgagaaattttggagagagaatgctgtgaggttaaatgagaagaattatgaactcttgaaaatcttgacaaaacttttggaagtgtcagatgatccccaagtcttagctgttgctgctcacgatgttggagaatatgtgcggcattatccacgaggcaaacgggtcatcgagcagctcggtgggaagcagctggtcatgaaccacatgcatcatgaagaccagcaggtccgctataatgctctgctggccgtgcagaagctcatggtgcacaactgggaataccttggcaagcagctccagtccgagcagccccagaccgctgccgcccgaagctaagcctgcctctggccttcccctccgcctcaatgcagaaccagtagtgggagcactgtgtttagagttaagagtgaacactgtttgattttacttggaatttcctctgttatatagcttttcccaatgctaatttccaaacaacaacaacaaaataacatgtttgcctgttaagttgtataaaagtaggtgattctgtatttaaagaaaatattactgttacatatactgcttgcaatttctgtatttattgttctctggaaataaatatagttattaaaggattctcactccaaaaaaaaanatcggnctcnttggnctcac

SEQ ID NO: 97326 - DNA, 2331 bp, Homo sapiens
tgctagctgcttccgggcggaggtcctcggcctcccctaggcgaggcactaggtctgggggcggcgggtcttagcgtgcccgccacgctcgccgcctcccacctgccctggctggctggggcccgacccttgcgtcgctccggggcccaagttacggactcgggaatccagttgtccgcaccgaacaagccccgccgcagcgcccgcccctcctcttgctgctttggagtctcccggcttccgccttccgcagcagtcacgtgcctccgatcacgtgaccggcgcctctgtcattctactgcggccgccctggcttccttctacctgtgcggccctcaacgtctccttggtgcgggacccgcttcactttcggctcccggagtctccctccactgctcagacctctggacctgacaggagacgcctacttggctctgacgcggcgccccagcccggctgtgtccccggcgccccggaccaccctccctgccggctttgggtgcgttgtggggtcccgaggattcgcgagatttgttgaaagacattcaagattacgaagtttagatgaccaaaatggatatccgaggtgctgtggatgctgctgtccccaccaatattattgctgccaaggctgcagaagttcgtgcaaacaaagtcaactggcaatcctatcttcagggacagatgatttctgctgaagattgtgagtttattcagaggtttgaaatgaaacgaagccctgaagagaagcaagagatgcttcaaactgaaggcagccagtgtgctaaaacatttataaatctgatgactcatatctgcaaagaacagaccgttcagtatatactaactatggtggatgatatgctgcaggaaaatcatcagcgtgttagcattttctttgactatgcaagatgtagcaagaacactgcgtggccctactttctgccaatgttgaatcgccaggatcccttcactgttcatatggcagcaagaattattgccaagttagcagcttggggaaaagaactgatggaaggcagtgacttaaattactatttcaattggataaaaactcagctgagttcacagaaactgcgtggtagcggtgttgctgttgaaacaggaacagtctcttcaagtgatagttcgcagtatgtgcagtgcgtggccgggtgtttgcagctgatgctccgggtcaatgagtaccgctttgcttgggtggaagcagatggggtaaattgcataatgggagtgttgagtaacaagtgtggctttcagctccagtatcaaatgattttttcaatatggctcctggcattcagtcctcaaatgtgtgaacacctgcggcgctataatatcattccagttctgtctgatatccttcaggagtctgtcaaagagaaagtaacaagaatcattcttgcagcatttcgtaactttttagaaaaatcaactgaaagagaaactcgccaagaatatgccctggctatgattcagtgcaaagttctgaaacagttggagaacttggaacagcagaagtacgatgatgaagatatcagcgaagatatcaaatttcttttggaaaaacttggagagagtgtccaggaccttagttcatttgatgaatacagttcagaacttaaatctggaaggttggaatggagtcctgtgcacaaatctgagaaattttggagagagaatgctgtgaggttaaatgagaagaattatgaactcttgaaaatcttgacaaaacttttggaagtgtcagatgatccccaagtcttagctgttgctgctcacgatgttggagaatatgtgcggcattatccacgaggcaaacgggtcatcgagcagctcggtgggaagcagctggtcatgaaccacatgcatcatgaagaccagcaggtccgctataatgctctgctggccgtgcagaagctcatggtgcacaactgggaataccttggcaagcagctccagtccgagcagccccagaccgctgccgcccgaagctaagcctgcctctggccttcccctccgcctcaatgcagaaccagtagtgggagcactgtgtttagagttaagagtgaacactgtttgattttacttggaatttcctctgttatatagctttccatggtaattcaacagacaaaaaataaatgttggtgtagtgataacggagtgatcgttcagaatttctgtcattacggtggatcgttttcgtccgaaaacagttagggtccaaaaaaaaggggggattccaggggccgcttaagggcaggaacaagggaagagaaggtgagtggtgacacttttggttaattaccc

SEQ ID NO: 97327 - DNA, 2111 bp, Homo sapiens
tgctagctgcttccgggcggaggtcctcggcctcccctaggcgaggcactaggtctgggggcggcgggtcttagcgtgcccgccacgctcgccgcctcccacctgccctggctggctggggcccgacccttgcgtcgctccggggcccaagttacggactcgggaatccagttgtccgcaccgaacaagccccgccgcagcgcccgcccctcctcttgctgctttggagtctcccggcttccgccttccgcagcagtcacgtgcctccgatcacgtgaccggcgcctctgtcattctactgcggccgccctggcttccttctacctgtgcggccctcaacgtctccttggtgcgggacccgcttcactttcggctcccggagtctccctccactgctcagacctctggacctgacaggagacgcctacttggctctgacgcggcgccccagcccggctgtgtccccggcgccccggaccaccctccctgccggctttgggtgcgttgtggggtcccgaggattcgcgagatttgttgaaagacattcaagattacgaagtttagatgaccaaaatggatatccgaggtgctgtggatgctgctgtccccaccaatattattgctgccaaggctgcagaagttcgtgcaaacaaagtcaactggcaatcctatcttcagggacagatgatttctgctgaagattgtgagtttattcagaggtttgaaatgaaacgaagccctgaagagaagcaagagatgcttcaaactgaaggcagccagtgtgctaaaacatttataaatctgatgactcatatctgcaaagaacagaccgttcagtatatactaactatggtggatgatatgctgcaggaaaatcatcagcgtgttagcattttctttgactatgcaagatgtagcaagaacactgcgtggccctactttctgccaatgttgaatcgccaggatcccttcactgttcatatggcagcaagaattattgccaagttagcagcttggggaaaagaactgatggaaggcagtgacttaaattactatttcaattggataaaaactcagctgagttcacagaaactgcgtggtagcggtgttgctgttgaaacaggaacagtctcttcaagtgatagttcgcagtatgtgcagtgcgtggccgggtgtttgcagctgatgctccgggtcaatgagtaccgctttgcttgggtggaagcagatggggtaaattgcataatgggagtgttgagtaacaagtgtggctttcagctccagtatcaaatgattttttcaatatggctcctggcattcagtcctcaaatgtgtgaacacctgcggcgctataatatcattccagttctgtctgatatccttcaggagtctgtcaaagagaaagtaacaagaatcattcttgcagcatttcgtaactttttagaaaaatcaactgaaagagaaactcgccaagaatatgccctggctatgattcagtgcaaagttctgaaacagttggagaacttggaacagcagaagtacgatgatgaagatatcagcgaagatatcaaatttcttttggaaaaacttggagagagtgtccaggaccttagttcatttgatgaatacagttcagaacttaaatctggaaggttggaatggagtcctgtgcacaaatctgagaaattttggagagagaatgctgtgaggttaaatgagaagaattatgaactcttgaaaatcttgacaaaacttttggaagtgtcagatgatccccaagtcttagctgttgctgctcacgatgttggagaatatgtgcggcattatccacgaggcaaacgggtcatcgagcagctcggtgggaagcagctggtcatgaaccacatgcatcatgaagaccagcaggtccgctataatgctctgctggccgtgcagaagctcatggtgcacaactgggaataccttggcaagcagctccagtccgagcagccccagaccgctgccgcccgaagctaagcctgcctctggccttcccctccgcctcaatgcagaaccagtagtgggagcactgtgtttagagttaagagtgatctcataaacgggtcgagatc

SEQ ID NO: 97328 - DNA, 1839 bp, Homo sapiens
tgctagctgcttccgggcggaggtcctcggcctcccctaggcgaggcactaggtctgggggcggcgggtcttagcgtgcccgccacgctcgccgcctcccacctgccctggctggctggggcccgacccttgcgtcgctccggggcccaagttacggactcgggaatccagttgtccgcaccgaacaagccccgccgcagcgcccgcccctcctcttgctgctttggagtctcccggcttccgccttccgcagcagtcacgtgcctccgatcacgtgaccggcgcctctgtcattctactgcggccgccctggcttccttctacctgtgcggccctcaacgtctccttggtgcgggacccgcttcactttcggctcccggagtctccctccactgctcagacctctggacctgacaggagacgcctacttggctctgacgcggcgccccagcccggctgtgtccccggcgccccggaccaccctccctgccggctttgggtgcgttgtggggtcccgaggattcgcgagatttgttgaaagacattcaagattacgaagtttagatgaccaaaatggatatccgaggtgctgtggatgctgctgtccccaccaatattattgctgccaaggctgcagaagttcgtgcaaacaaagtcaactggcaatcctatcttcagggacagatgatttctgctgaagattgtgagtttattcagaggtttgaaatgaaacgaagccctgaagagaagcaagagatgcttcaaactgaaggcagccagtgtgctaaaacatttataaatctgatgactcatatctgcaaagaacagaccgttcagtatatactaactatggtggatgatatgctgcaggaaaatcatcagcgtgttagcattttctttgactatgcaagatgtagcaagaacactgcgtggccctactttctgccaatgttgaatcgccaggatcccttcactgttcatatggcagcaagaattattgccaagttagcagcttggggaaaagaactgatggaaggcagtgacttaaattactatttcaattggataaaaactcagctgagttcacagaaactgcgtggtagcggtgttgctgttgaaacaggaacagtctcttcaagtgatagttcgcagtatgtgcagtgcgtggccgggtgtttgcagctgatgctccgggtcaatgagtaccgctttgcttgggtggaagcagatggggtaaattgcataatgggagtgttgagtaacaagtgtggctttcagctccagtatcaaatgattttttcaatatggctcctggcattcagtcctcaaatgtgtgaacacctgcggcgctataatatcattccagttctgtctgatatccttcaggagtctgtcaaagagaaagtaacaagaatcattcttgcagcatttcgtaactttttagaaaaatcaactgaaagagaaactcgccaagaatatgccctggctatgattcagtgcaaagttctgaaacagttggagaacttggaacagcagaagtacgatgatgaagatatcagcgaagatatcaaatttcttttggaaaaacttggagagagtgtccaggaccttagttcatttgatgaatacagttcagaacttaaatctggaaggttggaatggagtcctgtgcacaaatctgagaaattttggagagagaatgctgtgaggttaaatgagaagaattatgaactcttgaaaatcttgacaaaacttttggaagtgtcagatgatccccaagtcttagctgttgctgctcacgatgtggcgagtcgcccaggggacctctagagcggcgca

SEQ ID NO: 97329 - DNA, 390 bp, Homo sapiens
agagaaggggaatagggagcagaaggaggaaagcttggaataccttggcaagcagctccagtccgagcagccccagaccgctgccgcccgaagctaagcctgcctctggccttcccctccgcctcaatgcagaaccagtagtgggagcactgtgtttagagttaagagtgaacactgtttgattttacttggaatttcctctgttatatagcttttcccaatgctaatttccaaacaacaacaacaaaataacatgtttgcctgttaagttgtataaaagtaggtgattctgtatttaaagaaaatattactgttacatatactgcttgcaatttctgtatttattgttctctggaaataaatatagttattaaaggattctcactccaa

SEQ ID NO: 97330 - DNA, 756 bp, Homo sapiens
cgactcgcaacatcgtgagcagcaacagctaagacttggggagagtgtccaggaccttagttcatttgatgaatacagttcagaacttaaatctggaaggttggaatggagtcctgtgcacaaatctgagaaattttggagagagaatgctgtgaggttaaatgagaagaattatgaactcttgaaaatcttgacaaaacttttggaagtgtcagatgatccccaagtcttagctgttgctgctcacgatgttggagaatatgtgcggcattatccacgaggcaaacgggtcatcgagcagctcggtgggaagcagctggtcatgaaccacatgcatcatgaagaccagcaggtccgctataatgctctgctggccgtgcagaagctcatggtgcacaactgggaataccttggcaagcagctccagtccgagcagccccagaccgctgccgcccgaagctaagcctgcctctggccttcccctccgcctcaatgcagaaccagtagtgggagcactgtgtttagagttaagagtgaacactgtttgattttacttggaatttcctctgttatatagcttttcccaatgctaatttccaaacaacaacaacaaaataacatgtttgcctgttaagttgtataaaagtaggtgattctgtatttaaagaaaatattactgttacatatactgcttgcaatttctgtatttattgttctctggaaataaatatagttattaaaggattctcactccaa

SEQ ID NO: 97331 - DNA, 532 bp, Homo sapiens
  misc_feature (41)..(41): n is a, c, g, or t
  misc_feature (62)..(62): n is a, c, g, or t
cgccggagtgaggttaggggaggggtgctgagttcttgganagcaattccgtttacaaaccnccggtcatcgagcagctcggtgggaagcagctggtcatgaaccacatgcatcatgaagaccagcaggtccgctataatgctctgctggccgtgcagaagctcatggtgcacaactgggaataccttggcaagcagctccagtccgagcagccccagaccgctgccgcccgaagctaagcctgcctctggccttcccctccgcctcaatgcagaaccagtagtgggagcactgtgtttagagttaagagtgaacactgtttgattttacttggaatttcctctgttatatagcttttcccaatgctaatttccaaacaacaacaacaaaataacatgtttgcctgttaagttgtataaaagtaggtgattctgtatttaaagaaaatattactgttacatatactgcttgcaatttctgtatttattgttctctggaaataaatatagttattaaaggattctcactccaa

SEQ ID NO: 97332 - DNA, 647 bp, Homo sapiens
taaattcgcggccgctcgacctcttgaaaatcttgacaaaacttttggaagtgtcagatgatccccaagtcttagctgttgctgctcacgatgttggagaatatgtgcggcattatccacgaggcaaacgggtcatcgagcagctcggtgggaagcagctggtcatgaaccacatgcatcatgaagaccagcaggtccgctataatgctctgctggccgtgcagaagctcatggtgcacaactgggaataccttggcaagcagctccagtccgagcagccccagaccgctgccgcccgaagctaagcctgcctctggccttcccctccgcctcaatgcagaaccagtagtgggagcactgtgtttagagttaagagtgaacactgtttgattttacttggaatttcctctgttatatagcttttcccaatgctaatttccaaacaacaacaacaaaataacatgtttgcctgttaagttgtataaaagtaggtgattctgtatttaaagaaaatattactgttacatatactgcttgcaatttctgtatttattgttctctggaaataaatatagttattaaaggattctcactccaaatatgttttgattgtggtgtatataatactgtaacaaaatttttctttt

SEQ ID NO: 97333 - DNA, 1851 bp, Homo sapiens
gcaaatcttcagatacagagattaagttccaaattgattaagatcgttggaaacccggaatataattttggatttgttgaaagacattcaagattacgaagtttagatgaccaaaatggatatccgaggtgctgtggatgctgctgtccccaccaatattattgctgccaaggctgcagaagttcgtgcaaacaaagtcaactggcaatcctatcttcagggacagatgatttctgctgaagattgtgagtttattcagaggtttgaaatgaaacgaagccctgaagagaagcaagagatgcttcaaactgaaggcagccagtgtgctaaaacatttataaatctgatgactcatatctgcaaagaacagaccgttcagtatatactaactatggtggatgatatgctgcaggaaaatcatcagcgtgttagcattttctttgactatgcaagatgtagcaagaacactgcgtggccctactttctgccaatgttgaatcgccaggatcccttcactgttcatatggcagcaagaattattgccaagttagcagcttggggaaaagaactgatggaaggcagtgacttaaattactatttcaattggataaaaactcagctgagttcacagaaactgcgtggtagcggtgttgctgttgaaacaggaacagtctcttcaagtgatagttcgcagtatgtgcagtgcgtggccgggtgtttgcagctgatgctccgggtcaatgagtaccgctttgcttgggtggaagcagatggggtaaattgcataatgggagtgttgagtaacaagtgtggctttcagctccagtatcaaatgattttttcaatatggctcctggcattcagtcctcaaatgtgtgaacacctgcggcgctataatatcattccagttctgtctgatatccttcaggagtctgtcaaagagaaagtaacaagaatcattcttgcagcatttcgtaactttttagaaaaatcaactgaaagagaaactcgccaagaatatgccctggctatgattcagtgcaaagttctgaaacagttggagaacttggaacagcagaagtacgatgatgaagatatcagcgaagatatcaaatttcttttggaaaaacttggagagagtgtccaggaccttagttcatttgatgaatacagttcagaacttaaatctggaaggttggaatggagtcctgtgcacaaatctgagaaattttggagagagaatgctgtgaggttaaatgagaagaattatgaactcttgaaaatcttgacaaaacttttggaagtgtcagatgatccccaagtcttagctgttgctgctcacgatgttggagaatatgtgcggcattatccacgaggcaaacgggtcatcgagcagctcggtgggaagcagctggtcatgaaccacatgcatcatgaagaccagcaggtccgctataatgctctgctggccgtgcagaagctcatggtgcacaactgggaataccttggcaagcagctccagtccgagcagccccagaccgctgccgcccgaagctaagcctgcctctggccttcccctccgcctcaatgcagaaccagtagtgggagcactgtgtttagagttaagagtgaacactgtttgattttacttggaatttcctctgttatatagcttttcccaatgctaatttccaaacaacaacaacaaaataacatgtttgcctgttaagttgtataaaagtaggtgattctgtatttaaagaaaatattactgttacatatactgcttgcaatttctgtatttattgttctctggaaataaatatagttattaaaggattctcactccaa

SEQ ID NO: 97334 - DNA, 1937 bp, Homo sapiens
tgctagctgcttccgggcggaggtcctcggcctcccctaggcgaggcactaggtctgggggcggcgggtcttagcgtgcccgccacgctcgccgcctcccacctgccctggctggctggggcccgacccttgcgtcgctccggggcccaagttacggactcgggaatccagttgtccgcaccgaacaagccccgccgcagcgcccgcccctcctcttgctgctttggagtctcccggcttccgccttccgcagcagtcacgtgcctccgatcacgtgaccggcgcctctgtcattctactgcggccgccctggcttccttctacctgtgcggccctcaacgtctccttggtgcgggacccgcttcactttcggctcccggagtctccctccactgctcagacctctggacctgacaggagacgcctacttggctctgacgcggcgccccagcccggctgtgtccccggcgccccggaccaccctccctgccggctttgggtgcgttgtggggtcccgaggattcgcgagatttgttgaaagacattcaagattacgaagtttagatgaccaaaatggatatccgaggtgctgtggatgctgctgtccccaccaatattattgctgccaaggctgcagaagttcgtgcaaacaaagtcaactggcaatcctatcttcagggacagatgatttctgctgaagattgtgagtttattcagaggtttgaaatgaaacgaagccctgaagagaagcaagagatgcttcaaactgaaggcagccagtgtgctaaaacatttataaatctgatgactcatatctgcaaagaacagaccgttcagtatatactaactatggtggatgatatgctgcaggaaaatcatcagcgtgttagcattttctttgactatgcaagatgtagcaagaacactgcgtggccctactttctgccaatgttgaatcgccaggatcccttcactgttcatatggcagcaagaattattgccaagttagcagcttggggaaaagaactgatggaaggcagtgacttaaattactatttcaattggataaaaactcagctgagttcacagaaactgcgtggtagcggtgttgctgttgaaacaggaacagtctcttcaagtgatagttcgcagtatgtgcagtgcgtggccgggtgtttgcagctgatgctccgggtcaatgagtaccgctttgcttgggtggaagcagatggggtaaattgttcatttgatgaatacagttcagaacttaaatctggaaggttggaatggagtcctgtgcacaaatctgagaaattttggagagagaatgctgtgaggttaaatgagaagaattatgaactcttgaaaatcttgacaaaacttttggaagtgtcagatgatccccaagtcttagctgttgctgctcacgatgttggagaatatgtgcggcattatccacgaggcaaacgggtcatcgagcagctcggtgggaagcagctggtcatgaaccacatgcatcatgaagaccagcaggtccgctataatgctctgctggccgtgcagaagctcatggtgcacaactgggaataccttggcaagcagctccagtccgagcagccccagaccgctgccgcccgaagctaagcctgcctctggccttcccctccgcctcaatgcagaaccagtagtgggagcactgtgtttagagttaagagtgaacactgtttgattttacttggaatttcctctgttatatagcttttcccaatgctaatttccaaacaacaacaacaaaataacatgtttgcctgttaagttgtataaaagtaggtgattctgtatttaaagaaaatattactgttacatatactgcttgcaatttctgtatttattgttctctggaaataaatatagttattaaaggattctcactccaa

SEQ ID NO: 97335 - DNA, 1128 bp, Homo sapiens
tgtccccgggctcaagttagtaccgctttgcctgtgttgaaatcttattcccgaaaattgcataatgggagtgttgagtaacaagtgtggctttcagctccagtatcaaatgattttttcaatatggctcctggcattcagtcctcaaatgtgtgaacacctgcggcgctataatatcattccagttctgtctgatatccttcaggagtctgtcaaagagaaagtaacaagaatcattcttgcagcatttcgtaactttttagaaaaatcaactgaaagagaaactcgccaagaatatgccctggctatgattcagtgcaaagttctgaaacagttggagaacttggaacagcagaagtacgatgatgaagatatcagcgaagatatcaaatttcttttggaaaaacttggagagagtgtccaggaccttagttcatttgatgaatacagttcagaacttaaatctggaaggttggaatggagtcctgtgcacaaatctgagaaattttggagagagaatgctgtgaggttaaatgagaagaattatgaactcttgaaaatcttgacaaaacttttggaagtgtcagatgatccccaagtcttagctgttgctgctcacgatgttggagaatatgtgcggcattatccacgaggcaaacgggtcatcgagcagctcggtgggaagcagctggtcatgaaccacatgcatcatgaagaccagcaggtccgctataatgctctgctggccgtgcagaagctcatggtgcacaactgggaataccttggcaagcagctccagtccgagcagccccagaccgctgccgcccgaagctaagcctgcctctggccttcccctccgcctcaatgcagaaccagtagtgggagcactgtgtttagagttaagagtgaacactgtttgattttacttggaatttcctctgttatatagcttttcccaatgctaatttccaaacaacaacaacaaaataacatgtttgcctgttaagttgtataaaagtaggtgattctgtatttaaagaaaatattactgttacatatactgcttgcaatttctgtatttattgttctctggaaataaatatagttattaaaggattctcactccaa

SEQ ID NO: 97336 - DNA, 2358 bp, Homo sapiens
tgctagctgcttccgggcggaggtcctcggcctcccctaggcgaggcactaggtctgggggcggcgggtcttagcgtgcccgccacgctcgccgcctcccacctgccctggctggctggggcccgacccttgcgtcgctccggggcccaagttacggactcgggaatccagttgtccgcaccgaacaagccccgccgcagcgcccgcccctcctcttgctgctttggagtctcccggcttccgccttccgcagcagtcacgtgcctccgatcacgtgaccggcgcctctgtcattctactgcggccgccctggcttccttctacctgtgcggccctcaacgtctccttggtgcgggacccgcttcactttcggctcccggagtctccctccactgctcagacctctggacctgacaggagacgcctacttggctctgacgcggcgccccagcccggctgtgtccccggcgccccggaccaccctccctgccggctttgggtgcgttgtggggtcccgaggattcgcgagatttgttgaaagacattcaagattacgaagtttagatgaccaaaatggatatccgaggtgctgtggatgctgctgtccccaccaatattattgctgccaaggctgcagaagttcgtgcaaacaaagtcaactggcaatcctatcttcagggacagatgatttctgctgaagattgtgagtttattcagaggtttgaaatgaaacgaagccctgaagagaagcaagagatgcttcaaactgaaggcagccagtgtgctaaaacatttataaatctgatgactcatatctgcaaagaacagaccgttcagtatatactaactatggtggatgatatgctgcaggaaaatcatcagcgtgttagcattttctttgactatgcaagatgtagcaagaacactgcgtggccctactttctgccaatgttgaatcgccaggatcccttcactgttcatatggcagcaagaattattgccaagttagcagcttggggaaaagaactgatggaaggcagtgacttaaattactatttcaattggataaaaactcagctgagttcacagaaactgcgtggtagcggtgttgctgttgaaacaggaacagtctcttcaagtgatagttcgcagtatgtgcagtgcgtggccgggtgtttgcagctgatgctccgggtcaatgagtaccgctttgcttgggtggaagcagatggggtaaattgcataatgggagtgttgagtaacaagtgtggctttcagctccagtatcaaatgattttttcaatatggctcctggcattcagtcctcaaatgtgtgaacacctgcggcgctataatatcattccagttctgtctgatatccttcaggagtctgtcaaagagaaagtaacaagaatcattcttgcagcatttcgtaactttttagaaaaatcaactgaaagagaaactcgccaagaatatgccctggctatgattcagtgcaaagttctgaaacagttggagaacttggaacagcagaagtacgatgatgaagatatcagcgaagatatcaaatttcttttggaaaaacttggagagagtgtccaggaccttagttcatttgatgaatacagttcagaacttaaatctggaaggttggaatggagtcctgtgcacaaatctgagaaattttggagagagaatgctgtgaggttaaatgagaagaattatgaactcttgaaaatcttgacaaaacttttggaagtgtcagatgatccccaagtcttagctgttgctgctcacgatgttggagaatatgtgcggcattatccacgaggcaaacgggtcatcgagcagctcggtgggaagcagctggtcatgaaccacatgcatcatgaagaccagcaggtccgctataatgctctgctggccgtgcagaagctcatggtgcacaactgggaataccttggcaagcagctccagtccgagcagccccagaccgctgccgcccgaagctaagcctgcctctggccttcccctccgcctcaatgcagaaccagtagtgggagcactgtgtttagagttaagagtgaacactgtttgattttacttggaatttcctctgttatatagcttttcccaatgctaatttccaaacaacaacaacaaaataacatgtttgcctgttaagttgtataaaagtaggtgattctgtatttaaagaaaatattactgttacatatactgcttgcaatttctgtatttattgttctctggaaataaatatagttattaaaggattctcactccaaatatgttttgattgtggtgtatataatactgtaacaaaatttttctttt

SEQ ID NO: 97337 - DNA, 2465 bp, Homo sapiens
  misc_feature (2401)..(2401): n is a, c, g, or t
  misc_feature (2442)..(2442): n is a, c, g, or t
tgctagctgcttccgggcggaggtcctcggcctcccctaggcgaggcactaggtctgggggcggcgggtcttagcgtgcccgccacgctcgccgcctcccacctgccctggctggctggggcccgacccttgcgtcgctccggggcccaagttacggactcgggaatccagttgtccgcaccgaacaagccccgccgcagcgcccgcccctcctcttgctgctttggagtctcccggcttccgccttccgcagcagtcacgtgcctccgatcacgtgaccggcgcctctgtcattctactgcggccgccctggcttccttctacctgtgcggccctcaacgtctccttggtgcgggacccgcttcactttcggctcccggagtctccctccactgctcagacctctggacctgacaggagacgcctacttggctctgacgcggcgccccagcccggctgtgtccccggcgccccggaccaccctccctgccggctttgggtgcgttgtggggtcccgaggattcgcgagatttgttgaaagacattcaagattacgaagtttagatgaccaaaatggatatccgaggtgctgtggatgctgctgtccccaccaatattattgctgccaaggctgcagaagttcgtgcaaacaaagtcaactggcaatcctatcttcagggacagatgatttctgctgaagattgtgagtttattcagaggtttgaaatgaaacgaagccctgaagagaagcaagagatgcttcaaactgaaggcagccagtgtgctaaaacatttataaatctgatgactcatatctgcaaagaacagaccgttcagtatatactaactatggtggatgatatgctgcaggaaaatcatcagcgtgttagcattttctttgactatgcaagatgtagcaagaacactgcgtggccctactttctgccaatgttgaatcgccaggatcccttcactgttcatatggcagcaagaattattgccaagttagcagcttggggaaaagaactgatggaaggcagtgacttaaattactatttcaattggataaaaactcagctgagttcacagaaactgcgtggtagcggtgttgctgttgaaacaggaacagtctcttcaagtgatagttcgcagtatgtgcagtgcgtggccgggtgtttgcagctgatgctccgggtcaatgagtaccgctttgcttgggtggaagcagatggggtaaattgcataatgggagtgttgagtaacaagtgtggctttcagctccagtatcaaatgattttttcaatatggctcctggcattcagtcctcaaatgtgtgaacacctgcggcgctataatatcattccagttctgtctgatatccttcaggagtctgtcaaagagaaagtaacaagaatcattcttgcagcatttcgtaactttttagaaaaatcaactgaaagagaaactcgccaagaatatgccctggctatgattcagtgcaaagttctgaaacagttggagaacttggaacagcagaagtacgatgatgaagatatcagcgaagatatcaaatttcttttggaaaaacttggagagagtgtccaggaccttagttcatttgatgaatacagttcagaacttaaatctggaaggttggaatggagtcctgtgcacaaatctgagaaattttggagagagaatgctgtgaggttaaatgagaagaattatgaactcttgaaaatcttgacaaaacttttggaagtgtcagatgatccccaagtcttagctgttgctgctcacgatgttggagaatatgtgcggcattatccacgaggcaaacgggtcatcgagcagctcggtgggaagcagctggtcatgaaccacatgcatcatgaagaccagcaggtccgctataatgctctgctggccgtgcagaagctcatggtgcacaactgggaataccttggcaagcagctccagtccgagcagccccagaccgctgccgcccgaagctaagcctgcctctggccttcccctccgcctcaatgcagaaccagtagtgggagcactgtgtttagagttaagagtgaacactgtttgattttacttggaatttcctctgttatatagcttttcccaatgctaatttccaaacaacaacaacaaaataacatgtttgcctgttaagttgtataaaagtaggtgattctgtatttaaagaaataaatatagttattaaaggattctcactccaaacatggcctctctctttacttggactttgaacaaaagtcaactgttgtctcttttcaaaccaaattgggagaattgttgcaaagtagtgaatggcaaataaatgttttaaaatctaattacaatcactgcccgtcgttacacgtcngactgggaaccctgcgttaccacttatcgcctggagacatnccctttggcagcttgcgtatacg

SEQ ID NO: 97338 - DNA, 2134 bp, Homo sapiens
tgctagctgcttccgggcggaggtcctcggcctcccctaggcgaggcactaggtctgggggcggcgggtcttagcgtgcccgccacgctcgccgcctcccacctgccctggctggctggggcccgacccttgcgtcgctccggggcccaagttacggactcgggaatccagttgtccgcaccgaacaagccccgccgcagcgcccgcccctcctcttgctgctttggagtctcccggcttccgccttccgcagcagtcacgtgcctccgatcacgtgaccggcgcctctgtcattctactgcggccgccctggcttccttctacctgtgcggccctcaacgtctccttggtgcgggacccgcttcactttcggctcccggagtctccctccactgctcagacctctggacctgacaggagacgcctacttggctctgacgcggcgccccagcccggctgtgtccccggcgccccggaccaccctccctgccggctttgggtgcgttgtggggtcccgaggattcgcgagatttgttgaaagacattcaagattacgaagtttagatgaccaaaatggatatccgaggtgctgtggatgctgctgtccccaccaatattattgctgccaaggctgcagaagttcgtgcaaacaaagtcaactggcaatcctatcttcagggacagatgatttctgctgaagattgtgagtttattcagaggtttgaaatgaaacgaagccctgaagagaagcaagagatgcttcaaactgaaggcagccagtgtgctaaaacatttataaatctgatgactcatatctgcaaagaacagaccgttcagtatatactaactatggtggatgatatgctgcaggaaaatcatcagcgtgttagcattttctttgactatgcaagatgtagcaagaacactgcgtggccctactttctgccaatgttgaatcgccaggatcccttcactgttcatatggcagcaagaattattgccaagttagcagcttggggaaaagaactgatggaaggcagtgacttaaattactatttcaattggataaaaactcagctgagttcacagaaactgcgtggtagcggtgttgctgttgaaacaggaacagtctcttcaagtgatagttcgcagtatgtgcagtgcgtggccgggtgtttgcagctgatgctccgggtcaatgagtaccgctttgcttgggtggaagcagatggggtaaattgcataatgggagtgttgagtaacaagtgtggctttcagctccagtatcaaatgattttttcaatatggctcctggcattcagtcctcaaatgtgtgaacacctgcggcgctataatatcattccagttctgtctgatatccttcaggagtctgtcaaagagaaagtaacaagaatcattcttgcagcatttcgtaactttttagaaaaatcaactgaaagagaaactcgccaagaatatgccctggctatgattcagtgcaaagttctgaaacagttggagaacttggaacagcagaagtacgatgatgaagatatcagcgaagatatcaaatttcttttggaaaaacttggagagagtgtccaggaccttagttcatttgatgaatacagttcagaacttaaatctggaaggttggaatggagtcctgtgcacaaatctgagaaattttggagagagaatgctgtgaggttaaatgagaagaattatgaactcttgaaaatcttgacaaaacttttggaagtgtcagatgatccccaagtcttagctgttgctgctcacgatgttggagaatatgtgcggcattatccacgaggcaaacggtaagagaaagccattcatttcatttggtttcttgaaaccttcagtgtagagtcctaaataatgtacttatctaaaatggagtaggttagcaaaggaactaacaaagcaaatgaaatcaagattgccacaatagtgagaattatgataaacccagttaaaaatgagtagtataggccggttgcagtggctcacgcctgtaataccaccactttgggaggccgaggcaggcagatcacaaggtcaggagaccatcctggctaagatggtgaaaccccttctctactaaaaatac

SEQ ID NO: 97339 - DNA, 173 bp, Homo sapiens
ctctgaatccatcacatgacaaattgtatagtttctcactatcactttgtctaacccagaactttttagaaaaatcaactgaaagagaaactcgccaagaatatgccctggctatgattcagtgcaaagttctgaaacagttggagaacttggaacagcagaagtacgatgat

SEQ ID NO: 97340 - DNA, 687 bp, Homo sapiens
atcatagggaccgtttccctcatactgttctagtgggagtgaataagtctcacaacgtctgatggtttgataaagggaaacccgtttctcttggctctcattctttctcttgctgccgccatgttcaaggtcccctccaccttccgccatgatggtgaggcctccctagccatgaggaattatcactggaccagaggacaacttgtaaaaggatttcagaatggcataatgggaagaaacacgctaataaaacgatgagacatgaagagaatttaaaaatatacaatgatcagctgtgaagaattggccagacaagccttgattttactcattgggtgtccagtgtccatccagtcctcatataattcaagggaagcgactctcttttctctgcaagggagccagtcctgaactatccaagtcaaccgaggcaatcccatttccttgccgctacttggatgaaacatggggatgtgactcagctacagcgagagaggatgagaggcgtgctgagaacacctttgggaaggccgccgattcctgagaagaacatggcggcagagcagatggcctcaccctgcctctggaaattgcagtgtgtgtctgtgagaactgaaagggtgtggccatcttgaccccaagatgggagccaggctcaggacacgcagtgatgccggaatggctccc

SEQ ID NO: 97341 - DNA, 709 bp, Homo sapiens
gaacagtcttcttgccattatccagcctgggcctctcttcattggcctcccacttgagccgacatgggggagaagacaatgcgagtctccaccttcgcacgcaggctccctggcctccggtgaataccacgctggcctcatttatctcctgcactgttccttccctctgcatctgtgcagggagactcacgtcactgggggccactttcatgattttgttgccatcaggattagctggattaggggccagtacataaggaccccctggtgccgtgaggaagtttcatcaccgggtcagcatggtgtgaactatattctgtcaacaccaccacttcttatagccaccaaccaaaaaacggaagggtggaggtgggggcgtggcagagaaaatacctcaagtgcaaaatgtataaactcatcatagcaataaattcccgcatcatgcatttcaaagtaaaaaaaaaaaaaaaaaaaaaaaaaaaaaaaaaaaaaaaaaaaaaaaaaaaaaaaaaaaaaaaaagaaaaaagcaaaaaaagacaaaagaaaaaacagcaaaaaagaaagacaaaagaagaagaaagagaagacgagagccagacgccaaaacgagacaacggcaggaccaagcaagaggagcgaggcggggcggggggcaagcggcgcggagaggcggggcgggcggcgggcgccgagagccggtggaacgag

SEQ ID NO: 97342 - DNA, 422 bp, Homo sapiens
gcacttctcttaaacattctgtctagcctctatttgataaagaactcagcctccccagggagcccaggctctctcctgatagatctgaccaagaaactactacttctcatactgaggtaaaaagctctcatcttaacctctagtttgaattcatggaactaaagggcaggttaagcccagcttcgaatattcaatagcatttaacacattttcctatttcttctccaggataaacattcacaacatcttcaactcatccttctatgataaatctgcaatcctgttcctagttgcttttttttttagatggagtttcacccttgtcacccaggctggagtgcaatggcactatctcagcttactacaacctcctattccccagttcaagtgattctcctgcctcagcctctcgagtagctggg

SEQ ID NO: 97343 - DNA, 562 bp, Homo sapiens
atctgcggtgtttttttaaatcttgaattagttgtcaacagggagaaattgggaaattttaaataaaaatgggctggcattccccctgcagcagccagtgagtccggcacacgctcccaacaccctcggtcccccttggtcattcaggtcttacccggaccagaacaccagagggcagtgctgcctaggccaggtctcctcctgtgtctaggggccactcactgaagccttggctgagcgaagtctgggtgacaggccccgggggcatggcccaggccgggggtgtgcagagaaaaccccctggagtttctgttgtcttccagctgtgcagttcgttatttgcattgggaggggctgttcagagggagggaagaatgtctggggttcccacgtacctggggtggcccctcagcgcagggtcagagaccgcccatgttccctggggagcttatgccaagggccccacctgggtctccaattggaacctctacctgagcctctcgagtgacacctgcccttcaaattgcaggcccagtggtttgggtgcagccagatatgccac

SEQ ID NO: 97344 - DNA, 672 bp, Homo sapiens
caaaatggccgagtttaactggtatgtgaacgttttaagatttgactcaggggcataaggcagaaaaagagactgaggcaagttttagggcaggagtggaaggcaagaattgatgttgctgcagacctgtacggatttgctgctggaggtctcttttccactggagcctactttgaaatcagctgaggagccaccaaatcctatggccacctgggctgtgccctatgaacagctctctattgaaagagagctactaggttgactgatggcagttccaaggtggataatcaacatcctgtttggaagactattgtactacatcagatgatggaaaagttctgattgaggaaggttacatctactacaatactgcagatacagtataacattggtattgctggtatgattcctctcccttagaatcaggaagacagcctggcttgatgtcatgactacaggggtctaaaaacccagatgggaacttttgccttgaggttttctgaagctaagatgcatcacatagatcttggtgtttcagtctgaagacaggcagtctatgtgtgtgaataaggcccctggaaagcttgcacctgggccccaatgcttgccacagtatctttctcttgctgcaccgtatcctgtgcctttgaataaaagccacacagaagaaag

SEQ ID NO: 97345 - DNA, 752 bp, Homo sapiens
caaaatggccgagtttaactggtatgtgaacgttttaagatttgactcaggggcataaggcagaaaaagagactgaggcaagttttagggcaggagtggaaggcaagaattgatgttgctgcagacctgtacggatttgctgctggaggtctcttttccactggagcctactttgaaatcagctgaggagccaccaaatcctatggccacctgggctgtgccctatgaacagctctctattgaaagagagctactaggttgactgatggcagttccaaggtggataatcaacatcctgtttggaagactattgtactacatcagatgatggaaaagttctgattgaggaaggttacatctactacaatactgcagatacagtataacattggtattgctggtatgattcctctcccttaggatttgtttcccatttcagggaacaaacaagagtgccccaaagaagttctgagaggactattatcagtgattgccacattgattcattggatcatataaccttaggggtgtgccttcactctttatctgaccttcttctggatacagcaaacacttgtggaccagctgcactgaagcattaaacaaggttggtaagttaccaagaagcacacaaaccctgtaacttgagctgtggaaagttagacatgcaatacaagaggactaacattagattaacatgcctattctgagctccttccactatgacactgtttgaattatgcttctctgaa

SEQ ID NO: 97346 - DNA, 638 bp, Homo sapiens
caaaatggccgagtttaactggtatgtgaacgttttaagatttgactcaggggcataaggcagaaaaagagactgaggcaagttttagggcaggagtggaaggcaagaattgatgttgctgcagacctgtacggatttgctgctggaggtctcttttccactggagcctactttgaaatcagctgaggagccaccaaatcctatggccacctgggctgtgccctatgaacagctctctattgaaagagagctactaggttgactgatggcagttccaaggtggataatcaacatcctgtttggaagactattgtactacatcagatgatggaaaagttctgattgaggaaggttacatctactacaatactgcagatacagtataacattggtattgctggtatgattcctctcccttaggggtgtgccttcactctttatctgaccttcttctggatacagcaaacacttgtggaccagctgcactgaagcattaaacaagagacaagcctcatagccactacacatactgccaaatacagagatgatggaagacttgtatgtctgataatgaatattgaaagggaagaatcattcatccagaatttatgagaatctccctccacaactatcaaaag

SEQ ID NO: 97347 - DNA, 381 bp, Homo sapiens
aaaacctttatttcccccctaaacagtaggggagattcacttaattttttgagtcttgaaaagttagcatctaaatccaatgaaatgctttcttttaggttggtaagttaccaagaagcacacaaaccctgtaacttgagctgtggaaagttagacatgcaatacaagaggactaacattagattaacatgcctattctggtgagtgaatacatctacaatcaattttgaaagggctaaaatctcactaaattaacagaaatgatgtgaaaaaaatatgatgacatactatgtcttctgatcttgagaaagtcacttatgcttaattcttgcagttgtgaaaaagaatacttgggaccttatttttcaatagacactgtaa

SEQ ID NO: 97348 - DNA, 379 bp, Homo sapiens
agctttgactcttggccaagataagaacagtaagattaatgatgtgctgtttactgtctgaaactccccctgagagtttcatgtcccccgcatggccagtttgtttactgatggttttcatttggcagaatcaggaagacagcctggcttgatgtcatgactacaggggtctaaaaacccagatgggaacttttgccttgaggttttctgaagctaagatgcatcacatagatcttggtgtttcagtctgaagacaggcagtctatgtgtgtgaataaggcccctggaaagcttgcacctgggccccaatgcttgccacagtatctttctcttgctgcaccgtatcctgtgcctttgaataaaagccacacagaagaaa

SEQ ID NO: 97349 - DNA, 532 bp, Homo sapiens
gccacgaagcttccttttgagaagctgcttgtgttctgggcccccacccatgcagcgaatgaatgagcgttgaagttgagtttggacgtggttgcttcagtatccagcggtccttccctagcaacacaggccatttaggagcaccacctaaggcttcttccccttcctacagatggattgctgagttgatgagaggaggaactctgggacctgtgcctctgggaaagcagaatctttcagaagactggaagagaaaatctgaaggcagcaaatctcaggtgctagaacataaagtgaggactgagaagctggaaaagagagatggctgatgctgagtgctcagaggtggcttctggaagaaaaagacttgagctgagatggttcaaacaggcaggagtgaaggcattccaggctgggagcagagtatgagcaaaggcagggagattcctggcagtgactcagaatctggtagcccagagaccaagaaacctacatttatggatgaggaagttcaaagcatactcacgaaaat

SEQ ID NO: 97350 - DNA, 383 bp, Homo sapiens
ggaatactggctgcaaaagttcagcgtttggcatttgcaatgattgctgtttgattttctttatggttgtgttggcacattctggaaagtcaggaagctcaagtatatactgtgggagctctatggggtgggaataggagatatacaagctttgttttgtattataactattgcaacacatttccaaatgtcactttttgtccatggtgggagaacctggggatagttcaatgtcagatggtttcaagtgacataacactagtgcagtaatttatttattcaattattgtttattaagtgtctactatatgttgagtctggtgacactttggtttttctgtgctacatcagaatgaaacaataaaatttaaacacagtcgacg

SEQ ID NO: 97351 - DNA, 535 bp, Homo sapiens
aacgggtgatgcggttgggataaataatgccagggaaatctactgtctcagtcttattaaatatagactattgttgaatctaagtttcagtcaacaaccagagaagccactagcgatacctccatctacacaagctaacatattcaattcagaatctgtattacatgcacctcgtatcagtaaattctaaccaccttagtgtaatatcctgagactctgttttcacatgtccctcagatttctgcttttatatattagcaaaatcttggaattttttggcctgtaaaactgtttccattgtgtgtacctgtccccctacaacatgctgagatttgaccctagttatggctctagtgatgacggggttagctgtggttggttttgatgagaatgaacgtcctcctgtagggcatctattgcacatgaggatatcacatgattttccagcaaaagaaggctattctttttagatacagagggcaggtggaagtttgaaatagtcagtttcattctgatccaaccagatattcccatt

SEQ ID NO: 97352 - DNA, 442 bp, Homo sapiens
gcatgtgctgaggtgatctaaggatcccctcacgctttatacttcgtgctttttcaagcaattgcggttctcctgtctagcccgctgccactggactatgctgtaagtcctctctataaactctatgtcttgcttactggctctgggtctcctctgtagcctctcaaacatggtgccatccctaaaagtcaacagggctccaggatgatggcacatggagctctactaattctctcaatgtatacacctctgagactgaactctaattcctgtaaacctgaactactttcaactttccagtggttttggccaaaaaccttagtcattcttcacttctctctctcacaattgcaggcattctgtcaaaaaatcctttcattttactgcaaaatgtgtccagaagctgacctcttcacacctcctccacagctactaagtggag

SEQ ID NO: 97353 - DNA, 561 bp, Homo sapiens
ttttctcagcttctgatgcttcctttggtcttgtaaattggctctgaatggccatattgcgatcctgagccatttcaagttctttgtttttctcagttagtgccttcagttgattgttgagtttctctgaagtataaaccgttgagctcaacgctttatacttcgtgctttttcaagcaattgcggttctcctgtctagcccgctgccactggactatgctgtaagtcctctctataaactctatgtcttgcttactggctctgggtctcctctgtagcctctcaaacatggtgccatccctaaaagtcaacagggctccaggatgatggcacatggagctctactaattctctcaatgtatacacctctgagactgaactctaattcctgtaaacctgaactactttcaactttccagtggttttggccaaaaaccttagtcattcttcacttctctctctcacaattgcaggcattctgtcaaaaaatcctttcattttactgcaaaatgtgtccagaagctgacctcttcacacctcctccacagctactaagtggag

SEQ ID NO: 97354 - DNA, 707 bp, Homo sapiens
gtgatttgcccaggcaccccatctttttgctatatcaggagctccagtacgggtgggtagagaggctgggcaaagatgctgggagagttaaagtttatggtcattgggaggcttcaaaacttttagaaggctgagtggcaactttcagttgcttcagtttctcaggtctactggagaataagttcttggagcaatttgtcctacatgtttagcttatcatagggtggggaggtgacatgaatagataatcaaaggtcaggctgcatcctcgacacacagaggtctatgaggacctgccctgttgccatggtaacaaaaaggacagtggtggacttgctgctaggctggaaggtatatagctgaggtcataaactcacagctcatgggttgattctagttagcagacatatttcgactgagccataagtctataaaatttttataagttatttgctaacatctaaaatttgggatatttcatttaaaatccgaatttccaacttctcttgcaaatttgaaatctctggacacatggggcttcattccttcttgtcagtgattgcttagagtgggagatggcttccttttagagagaaccagagttctccagctttgtttacttgtttttccttttacctaacctttgtcatcactggtgttatcagcctattccctggcaccactgagtgtacaaccatcgctctata

SEQ ID NO: 97355 - DNA, 334 bp, Homo sapiens
cgaaatacatggagagacagaaagtagagtagagatttctgagggctggagagtttggagagaattgtataatatgtggtctttgtgtctggctctttttacttagcataatattttgaaggttaatccgtgttgctgcatgtgtcactacttcagtcctttgttgttaataatattccattgtatggatataccttgacatttatccaaatgtcaacatttggatatttatcttggacatttatccaagatgaccaacagcacatgagaagatgcttaacatcgttaagtatcatttaaatacaaatcagaactatagtgagataccacttca

SEQ ID NO: 97356 - DNA, 217 bp, Homo sapiens
ctttactcccatgttgtctggccatgtgatgttttgaaaagttttcaaaacaacatatatgggctcatttcaaagctgtttttaatataccacatgagaccagttctgattgtatgtagttttcctgtcttacagttgtccagtataagagtgacatttttctaggtcaaatgtcttgagttagagtccctgtgtgaccctgggcaagttatttcac

SEQ ID NO: 97357 - DNA, 408 bp, Homo sapiens
aaacacacacacacacacacacacacacacacactctcactctctctctctctccccgcacctccccccgaaactggtagaactaatgaatgaattccgtagtttcaggacacaaaatcaacatataaaactccatagcatctctatataccaaagatgaactatctgaaagggaaattaagaatgcaacctcatttactttagcaacaaaaattttaaaatacttaggaatttacgggactcagcaaaataactgacacaaataaatggaataaaaacacaaataagtggaaagacatctcatgttcacagattggaagaattaatatcgtctaagtgtccatactacctaaagcaatctacagattcaatgcaatccctatcaaaatcccaattgcactttttata

SEQ ID NO: 97358 - DNA, 463 bp, Homo sapiens
gaaagagccgaggtcgatcaaggactgctggaaaatggatccaagcacctttaagttccaggtgaccatagatcaggaaagaaaaaatgtcccctctctaaccgcaactctgcaaagattcgggaaacaaagttcccggcggtttctcagaacactaactagtcttcggatacagtctagcttttcctagcaatgtggttcgcaccaggaagctgaatggagcattaaaaagacggaaatgtcatttctgggcctggcgctgtggctcaggctgggcgccagtagctcacgcctgtaatcctagcactttgggaggccgaggctggcggatcatccgaggtcaggagttcgagaccagcctggccaacatagcgaaacccccgtctctactaaaagtacaaaaattagccgggtgtggtggcgggcgcctgtaataccagctactcaggaggctgaagcagga

SEQ ID NO: 97359 - DNA, 633 bp, Homo sapiens
tccagcagactcttgcaccggcagccccttttcatgagataagaaagcctaggagggttgggggcaggagggcacccatgaaagacagggtgtctggatgttctactggggattagaaaaacaaaacataaaatttccatatactctgctaaaaagtccattttagaagactacatggttacagggagaaatacgcatgttatattaagtaaaaaaacactgtggatactatgattttgtaaagtaagtataaatatatatgtatgtgtgtagaaaatgccttgaaaaatattcatactcaaaatgtagctgtgtcctagcggggcatggtggtgtgtgcctgtggtcccagctacttgggaggctgtggcatgagaattgcttgaacctaggaggagaaggttgcagactgtctcaaaaaaagatgtagctgtgtccaagtcatgttactaatgattgtgcatatatatggttcttgtgacaagtacacattagcttagtgacgaagctgtcacatgatttttgaggtcaaaagtttccaggccaggtgcggtggttcatgcctataatcccagcactttgggaggccgaggcaggtggatcacttgaggtcagaagtttgaaaccagcctg

SEQ ID NO: 97360 - DNA, 462 bp, Homo sapiens
agagcaagaaaatggaaacatgttcttctacgaactgtggaacaaggagggatctcagaagacatgtagtaacttcttttaataactacctgtgtcactttgggcaagatttgcactttgatgaatgccatcctggagctcctagaaaccagtgccatgagtaaagccagcctggaagagaaaagatctaagcccagctatgactgtgtctgtcacttgagtttcttaataagaccctacatgacctgaattacatgagtcccttctctactccttttctgttcaagccagtttcagttaaatttccatgtttgttacttgcaactaaaagccctaaaggagaaatgatatcttataataatggactctatcatttgtatgaactttctatctataaatgtgatggcctttgatgacttctaattgttatttcaagtcacacgaataaatacagatcggccg

SEQ ID NO: 97361 - DNA, 797 bp, Homo sapiens
cagttggggaagtctatggacatgtcctcagcttgcagattctctcctgggctgtgtccagtccactgacgtccgaggcacaatcccccgtgtgaccctgcctggcggcggcctcttgttagagctagaagaggtctcaccatgtcgcccaagctggtctcaaactcctgagctcaagtgatctgcctgcctcggcctcccaaagtgtcacgcctgtaatcccagcactttgagaggccgaggtgggggcggatcacctgaggtcaggagtttgagaccagcctggccaacatggtaaaaccccatctctactaaaaatacaaaaattagcctggcatggtggcaggcacctgtaatcccagctactcgggaggctgaggctggagaatcgcttggacccaggaggcagaggttgcaatgagcagagatcatgccactgcacgagtgaaattccgtctcattaaaaaaaaaagaaagaaagaaaaaagaaactaaacatcttaccttataattcagcagttgcactccttgatctttacccaaagggttaaaaacttatgtctacacaaaaccctgcacaccaatgtttatagcagctttagtaattgtcaaaaactggaagccaccaaggtgtctctcagtaggtgaatgaatagacaaactgtagtgtacatttgcaatggaatattatacagcaatgaaaaagagtgagccatcaagccatgaagcgatagtgaggaaacgttaggtgcacattaccaagtgaaagacactgatctgaagagtctgcctactgt

SEQ ID NO: 97362 - DNA, 374 bp, Homo sapiens
tcccattgtctggatgtaccacagtttatcattcacttactgaaggatattgagtttgcattgagtttttggtgattaagaataaagcttctggcctggcgcggtggctcacgcctgtaatcccagtgctttgggaggccaaggcaggcagatcacctgaggtcaggagttcaacaccagcctgacaaacatggagaaagcctgtctgttataaaaatacaaaattagccgggcgtggtggtgcatgcctgtaatcccagctacttgggaggctgaggcaggagaatcgcttgaacctgggaggtggaggttgccgtgagccaaagtcatgttgttgcactccagcctgggcaacaagagagaaactctgtctt

SEQ ID NO: 97363 - DNA, 278 bp, Homo sapiens
agagcaaaaccctgcctcaaaaaataaaataatataaataaaataggcacaaaatggggatgaaaacccctccctgcagtgaggattcctaggtaatggagggagctggaggtgttaagtacttcataaacaagagcagctgctgttaccatcatcagcaacagatcaatgccagcctcggaagagaatcccaaaccccagaaccctaacccggcctggcctccctctcctgccgtaacctgagtcggatcctccgatgtcgtcctcggagaagctct

SEQ ID NO: 97364 - DNA, 113 bp, Homo sapiens
gtgaagagggaatgctaggtggaagctaatcacagaaagtctgaatatgtaaagttattgcatcaggcaccttttactaactaatcttgtacagaagctagaaaaaaagcatt

SEQ ID NO: 97365 - DNA, 412 bp, Homo sapiens
actgggattacaggcatgagccaccgtgcctggccagaatattatatctttgagtgtgaatgttaaatggtggaaaaacaatagaatgatctctgtagattcaaaatctgcactgatcttttttgtccagattcatattacaatcttgaggaatttctcataattctttgttttagtggatgcatttcatgggctacagttttcatttttactcacctaactttatccaagtccttggtcaccttctctggaaaaaaatttgaagattatggcagctgttgaatccaaacagtttctcagtgatttttttttttttttttttttttttttgagatggagtcttgctctgtcacccaggctggagtgcagtggcacaatctcagctcattgcaacctccacctctcgggttca

SEQ ID NO: 97366 - DNA, 303 bp, Homo sapiens
gaattcagccctttccatcaacatcagcatagttagggtcttatgagtagtcagctactacagctgtgcttccagggaaagcctggcttccagaggcacatagacacattagtgcttctacagggcatttagccaggagggaaggaaggtctggaaagcaggttgggtgagaagagaggttcaaggtgcggggtttctcctaaacaccctggaccatttgttcgtggggctgtttgcacctcctgcctcttgttttgcttcgtgtatgtgtacaaataccttaaaagtataagtgttccagca

SEQ ID NO: 97367 - DNA, 365 bp, Homo sapiens
cccactgaccatgctggggcccctttcctcatcttccatgtccactagtgagtctgagggctcaccatctgcagccagcatcacccttcacccagaatatatctccttgttcccttcacacactttgggaggccgagacgggcagatcatgaggtcaggaggtcaagaccatcctggctagcacggtgaaaccccatctctactaaaaatatgacataacataccggacgagtgactcccgcgtcacgtcgccgggcacgcatggccgcagggcccgggccggcggaggccgacgacgggcgtgcacccggggaggcggagctggcagtaagcggaaatcggcgccaatggcacttccaccctgg

SEQ ID NO: 97368 - DNA, 411 bp, Homo sapiens
atacaaagattagccaaatgtggtggcaccgtgcctgtggtccccagctacctgagaggctgaggtggaaggattgcctgaccccaaggaagttgaggctgcagtgagctgagattgcaccactgcactccagcctcagtgataaagcgagaccctgtttgagaaaaaaaacagaaaacgaagatttggccacaaagacagacatacctagaaggcaatgtgcaaacagccacctgatgggggcaggattggggtgatgcgtctgccagctaagggatgcctgaggctaccagaagccagaagcaggtggaacagacccttccccagctccttcagagggagcatgctctgccacagcttgatttcagatttctggcctcaagaactatgagacaataaatttctgttcta

SEQ ID NO: 97369 - DNA, 624 bp, Homo sapiens
aaaggatatgcaacagaagttgaataaaaggagagactctgtttctgaatggaaaattaataaatgttaatttcatggaccagtttcatggaagataatttttccatggactggaggtggagggggatggtttcaggatgattcaagtgcattacatttacttagttaaaatataaatttgacacatttccattagtgtcccaaaaggtacttttctactgtacttgacagttgatactgtagttcatctggaagaataaatgagaaagtagtaaaatataaacaaattacagtaatacaagggcttgtttttatcaaatattaaaatggaccgtgaagccataggccagcatagttttggcagagaagagcaagatcagagaagaacggagaatccacagataggtccaagtatgtatgttggcttactatgtgacaaaaatggtaattcaaaccatggaaaacacatttagtcgtttatttatttttagaattgtgtttatccatttatttaataaatagataatagaacttaaataaatagagtatttgaaacaaaacaaaaccattctcccatgttacagtagacttactccctgatagacaatggagaaggaagggtga

SEQ ID NO: 97370 - DNA, 300 bp, Homo sapiens
ggctcactgcaacctccgcctcctgggctgaagtgagcctcccacctcagcctcccgagtagctgggatcataggcacatgccaccactcctggctaagtttttaaatttttagtagagatggggttttgccatggtgcctaggttggtcttgaactcctgagctcaagtgatttgcccacctcggcctcccaaagtgctgggtctacaggagtgagccactgcaccaggccttttcttgtgtatctttaaacctttttctctctctactgacacattcccatcagctcttaaacatgct

SEQ ID NO: 97371 - DNA, 636 bp, Homo sapiens
ccctcatcttaaaaaaaaaaaattaaaaaattagctgggtgtggtttcacttgcctatagtcccagctaactatccaagcaggaggatggcttgagcccaggagtttgaggctgtagtgagctatgattgtgttactatgccccagctgggatgatagaaagagaccccatctccaaaaaattctatttactgtcttaaaatgtgcttcactagctgggtgtggtggctcacgcctgtaatcccagcactttctgaggccgaggcgggcggatcacaaggtcaggagatcaagaccaccctggctaacacggtgaaacccctcgatgatagttccattcgattctatgcgatgattccattccattccattggaagatgattccattcgagaccattcgatgattgcattcaattcattcgatgacgattccattcaattccgttcaatgattccattagattccatttgatgatgattccattcgtctctactaaaaatacaaaaaaattagccgggcgtggtggcaggcgcctgtagtcacagctatttgggaggatgaggcaggagaatggcgtgaacccgggaggtggagcttgtagtgagcagagatcgtgccactgcactccagcctggg

SEQ ID NO: 97372 - DNA, 145 bp, Homo sapiens
cagtgtcaaaatgctgacaggtgaaataatatgggcaatgaaacatgtacattagggtcaggaactagaagttcacttagagcagtttcgatggagtcggagatggtagagcagacaaatgcatatgagaagagaagaggtcatg

SEQ ID NO: 97373 - DNA, 1937 bp, Homo sapiens
tcttttcttagagacatagatggctcctttctggggaatgctggttctgtgatacctcaagcagaatatgaatgggacggaaacagccaagtaggaattggagactacagaattcctaaggcgatgctcacattcttgaatggaagtagaattcctgtcactgagaaagcacctcataaaggaattattagagattcaacctgtaagtaccttccagagtggcagagctatcagtgctttgggatggaatatgcaatgatggttattgaaagtctggatcctgacacagaaactcgaagactttccccagtggctataatgggcaacggttatgttgatcttattaatggcccacaggatcatggctggtgtgctggatatacatgccagagaaggctgtccctgtttcacagcattgtggctctgaacaaatcttatgaagtttacttcactggcaccagtcctcagaatcttcgactgatgttgcttaatgttgatcataacaaggctgttctagtaggaattttcttttccacacttcaacgtttggatgtctatgtgaacaacttattggtctgtccaaaaactacaatatggaatgcccagcagaaacactgtgaacttaataaccatctgtacaaagaccaattccttcctaacctggattccactgtccttggtgaaaactactttgatggaacctaccagatgctttatcttttggttaaaggaactatacctgttgaaattcacactgccacagtgatatttgtttctttccaattatctgttgcaacagaagatgacttttatacctctcacaatctggttaaaaatcttgccttgttcctaaagataccaagtgacaaaatccgtatcagcaaaataagagggaagagtctgaggaggaagagatccatgggattcataattgaaatagagattggagaccctcctattcagttcataagcaatggcaccacagccataggtcagatgcagttatctgaactccaggaaattgctggttctcttggacaagctgtaattttaggaaacatcagtagtatccttggatttaacatttcgtccatgtctattactaatcccctccccagcccaagtgactctgggtggattaaggtgactgcccagccagttgaaaggtctgcatttcctgttcatcacgtggccttcgtgtcctcactcttagtgatcactcagccggtggcagcacagccaggacagccatttcctcagcagccttcggtaaaggcaacagattctgacggtaactgtgtatcagttggaattactgcactaactttgagggccatactcaaggactccaataataaccaagtcaatggccttagtggaaatacaacaattccgtttagcagctgttgggccaactacacagaccttactccccttagaacaggaaaaaattataagattgaatttatactggataatgttgttggggtagaatccagaactttcagcctgctggcagagtctgtctctagcagtggcagcagcagcagcagcaacagcaaagcatcaactgtgggtacatatgcccagataatgactgtagtaattagctgtctggttggaagaatgtggctcttggaaatatttatggctgcagtttcaactttgaatataactttaagaagctactaaagtgctgttccgaagaataggctgaaacaaaaatataagaattattagctactttgttgggcaataggcaaaagtctatagcattttcatgaaaatatactaaaaatatttttatgatatataaaatgtactaattagctttaaacactaaaatcagatttcttcaaaatataaatttgttttgattctttatatttatatgtttttatttcatttcaataaacttccagaaatttgtcatttgg

SEQ ID NO: 97374 - DNA, 1267 bp, Homo sapiens
aaaattaacactttattttttaaaatgacacatgataatagaaatgcatgataatgcttcattggtaaacaaagattggtaggagaaagtattaaattaagagacatatattctcccactatgttttcattcgtttttcttgtatctgttttatctacctttgtttttcctttaattccaacttaaaatatattctcctgagttcttccttttcctcccctcattaatatgactgctgtgttttgctcaggtaagactagaaagccttagaattctataatgtgatggagcaatgcaaagaatgctaaagtgaacccataggtcagatgcagttatctgaactccaggaaattgctggttctcttggacaagctgtaattttaggaaacatcagtagtatccttggatttaacatttcgtccatgtctattactaatcccctccccagcccaagtgactctgggtggattaaggtgactgcccagccagttgaaaggtctgcatttcctgttcatcacgtggccttcgtgtcctcactcttagtgatcactcagccggtggcagcacagccaggacagccatttcctcagcagccttcggtaaaggcaacagattctgacggtaactgtgtatcagttggaattactgcactaactttgagggccatactcaaggactccaataataaccaagtcaatggccttagtggaaatacaacaattccgtttagcagctgttgggccaactacacagaccttactccccttagaacaggaaaaaattataagattgaatttatactggataatgttgttggggtagaatccagaactttcagcctgctggcagagtctgtctctagcagtggcagcagcagcagcagcaacagcaaagcatcaactgtgggtacatatgcccagataatgactgtagtaattagctgtctggttggaagaatgtggctcttggaaatatttatggctgcagtttcaactttgaatataactttaagaagctactaaagtgctgttccgaagaataggctgaaacaaaaatataagaattattagctactttgttgggcaataggcaaaagtctatagcattttcatgaaaatatactaaaaatatttttatgatatataaaatgtactaattagctttaaacactaaaatcagatttcttcaaaatataaatttgttttgattctttatatttatatgtttttatttcatttcaataaacttccagaaatttgtcatttgg

SEQ ID NO: 97375 - DNA, 402 bp, Homo sapiens
cacattgcggtttaattacaaactttttttgtgacatactgttccccttgcctgcaaaggcatggattgtcaagagttgactgaaaaatgttttttagaaaccttgcaaattatcagcagattagtgatgtaacagagtacccccatttttctgataaagaacatgagttatttttaaaatgttattttcttttctctttcctccttttcccctgttccccacttcctacttatgtctttaggaatgcagttataaccttgaccttcccttcaccagacactccctacagggcgagcttatctaactgtgtgcttacttagaagctccagagcaggaactttctcccactgggagattgccttgagagacaacagtcaatttacaacgtaacatgtgcctgc

SEQ ID NO: 97376 - DNA, 327 bp, Homo sapiens
ggcaattacagaagccagaaagaatgcaaaacataccatctgcaagttggagcaccaggtaagccagtggtgtgatgcagtctgagttcaaaggcctgagaatgaggagagccagggtataagtcccagagtctgaagacccaagaaccaggagctctgatatccaagggcaggagaagatggatgtcctggctcaagaggagagtgacaatgcacccttcctctgcctttttgttctatttgggtgagccctcagtggattggatgataccagatgagacgacgcagatcttcttgactcattctactgattcaaatgctaatctc

SEQ ID NO: 97377 - DNA, 791 bp, Homo sapiens
agcaattccaagagtatcatctgagccagcctgaacttcctctgctactattattcaaataaggatttgaataagcagaatttgcttcagtgaggaaactgcctggggcatcagcctaggagaggtgtggaccatgagagtgggctgggggcggccctccctctcactcataggggagcaaaccaaacagctcaggctggaagtcctgcagggaattcagcaccggggtggcctttctcctcaagtctcagttcaaggttctgtctagaatgaagaccacttgcatcccagttgccagggttgcctccacctcattgagagcatcttcaaacaaggcacctctccataggaggacagggagagaacctgttggcacaagctgggaggatgttggggtctggcttgctgtgctgtacttcggggtcatctccctgcataatgtgagaaaacaggctgaagaactccttgtgtcagctcaccttcatctccaatgaggcagaccctgagctggtggccatggcaaagggaatgctgtgtttctgcaggtggacgatgagattctcagcccctggcatgagcacagctgtagggaacacttcctttaacttcgtttggctttcttccaccagttcctccttggacatcaggagctgcaagatgtctattataatctgtgctgcctctaatgcctacttacccattaccagggactttacaacccagctgtatttcttttcatagaaatcacatatttcttgaaacagcactgaatatagccattcagtatccag

SEQ ID NO: 97378 - DNA, 201 bp, Homo sapiens
cgccatgttggccatggcgcagggagcggatcgggcgggcgagcggcggatctagtgtgtggaggcggccgcgggcgcggggggctgttttcgggcggggtgggcgcccatgctgtggccgggggcagtgaggaggaggaggagcgggccggccgcgctgcactgaggaaggaggtggaggaggcggcgggagtcctcccc

SEQ ID NO: 97379 - DNA, 398 bp, Homo sapiens
gcatgaggtctctgtcctcaggatataatcacctgccaaaggctccacctcaaaatgacaacacattggggattaggtttcagcataagaattttgaggaggacacaaatattcattcaacggaatacggattatctttaaaccttacaaatctgtttgacatagctcttgttattaatatttccattttatatatgaggatatcattctcaaagttaattgtccagtatcaaatgactatttagtggtacagctaagcttgtctgactccacaacctcatctcaagtgatcctctcactttggcttctcatagtgctgggattacaggtgtgaacactgcacctggccaatctattattttctcaagtgagctttggtagttgagatgaggtcgacg

SEQ ID NO: 97380 - DNA, 291 bp, Homo sapiens
cactgatgcagggaattaagataaacctcctgctgaagatgatcatcaggagaaagtgattctgacaaatcagtgaaatgcataaagaaaggacaaagagacaggacatgtcacaaaagatttttttgcgctacgtcacctctgtgggttttaagagattgtattcaagtggatattcttagaccacattcttgaggcgttattagtataagaacctgcctatgggagaagtggacctaccatgaaagaagaaagctgaaattctgtctgttggagaacatggggaggaaa

SEQ ID NO: 97381 - DNA, 634 bp, Homo sapiens
accctgggtgactgtgttgcagatcagaaggagaattacagttcttatttgggatctgcttttgtgtgaccttggccgagtcagttaactcctcggggctatggtttcatcatctataaaattgagggtttgaaccaggtcccccgatttaaagctctcttgccaagacttttcaaccttacctgccagaatccccattctagaaagggagcctttttcagagagcatggagaccccaagtttatgtgaacaaaagtgattcctttagtcgtcttcccaccaacaaagaaatgcccgtggtgctccttgtaaatttccaccagtctcagctgtggtgattccacttgtagctgagatttgtatgcggatgaggcttttgcttcatctttctctgggagctacaaaaaggaggatgtgtggacaaatcaaaacagaaacaaatagcagcttcctgctttgtcctgtagaccaggtaccctgatgccttcctagcatgcggaggaatgaggaggaagccatgcccatccttgtcccctctagacactttcccggctcctgtccagcccagccctgatgcctggaaaaataaggaagggaaagcaggaggggaggacaaggagaaaaactcccagaa

SEQ ID NO: 97382 - DNA, 374 bp, Homo sapiens
aagcccaagtcaggggccaaaaatccatggaatgcaagacccagagctgcaggccacactgaacaccacctcaaagagggcttttcttctgcctcaagcaagggccctacatttgcaaaacactgtggatagctgcacagtgaggcttcccagctcaggttcctggctttaggctgccgtgtgctgtgtgtccccaggcaccgagggaccagattgggagaagcctcagggttcagtgaggctggcggggagctggactgcaggagtccaggtcctggcccggtttcatctaaccatgctgcgtctcagtttcttcatctggaaaatgggctaacagtcagatcttcctcttagggtcactgtaaactccttag

SEQ ID NO: 97383 - DNA, 520 bp, Homo sapiens
gttctttaaacagtagttctcaaactttagtttgagattgcaccactgcactccagcccgggggacagagcaagattccatctcaaaaaacaaaaaacaaataatcacctggagagtttgttaaaacaggttactgcataccactcctggagttttctaattcattgggtctagggtggggtctaagaagttcgcagatgatgcttctggtccaggaccactgtttaagaactgttggccttaaatgttaaccttatggcttttttcctatatcttttattctccccaggatgtattgttttcaacctgttgatcatactgtatgtgtctgccctgtttttgcttaatatttttgcaactgtttttcccagttaaaaataatgactaggggccgggcgcggtgtcacgcctgtaatcccaacactttgggaggttgaggcagacaaatcatgaggtcaggagattgagaccatcctggctaacatggtaaaaacccatctctactaaaaatacaaaaaaa

SEQ ID NO: 97384 - DNA, 292 bp, Homo sapiens
atttgttcccccttctactttttgcttccctgtggctgctgtttctatcctccagccagagagctagtgtttattttctccattgtgttacacacttgtgcagctgcaaccaccatatccagggcccaatggtaggaggtagagaagaaaagcaaaagggattggcctcatcctcttacaacgatagttccattgaatagagagaaaggttttcctgcctcagagtgttggctgcactaggcttttgttactgtagtctggccctgttaccatgggattgcttgcatgtggg

SEQ ID NO: 97385 - DNA, 369 bp, Homo sapiens
ggatcttttaaaagtctgattccctggggtcatcccagaccaattaatcagagtcactgaggtgggtcttcaggtgatttcaaagtgcagctgaggcacaaagtttctcaatttcagtgtgcattatccttgggcggcttgcctccacctgtccaccaccccaaagaaatttggtttcgtaggtgtgggattttctcacagatctacattcacacatgcatctcaggtgatgctgatgcagatgatctctggtccacatgtgactactgctaccggactgaagttcctgatttttcatcctcatcacttatcttttctgcttctccataaatcttctcccctgggctttgttcttgtggctcttcaccc

SEQ ID NO: 97386 - DNA, 399 bp, Homo sapiens
ggtcgtggtgatgatggtgttgacagcagtggtgatgatgataatggtggtgatggtgatgatggtggtggtgatgtcaatggcagtggtgatggtcatggtgaggatgatgatggtattggtgatggtgaggatgatgatggtggtggtggtggtgacaacgatgatgatgatgttaaggaaaaggagagggaggaagacagagagataaagagaagcaaatatgttacaacgttaacaactagtaagggggtatgggtgttcactgtatcattcttgcaaatattccattggtttgaaattgttcaaaataacaagttaagaaaaataaaccctgaagaaagtctttctcacatcttccatcactgacattccagtccaagtcccatctccctccca

SEQ ID NO: 97387 - DNA, 461 bp, Homo sapiens
tgtggtagcgtcccccgcctgcgccgcaatacaggaacacacaaaaaaaaaggtagcaggcctcctctgccatcataccagcaagggaaggtggatatctcctcactagtgcccaatgagggttgaagtccaggttctccacttggcctccactgacgttctagcaggggagaggagactcatcccttctgttccccagagatggggtctcactatgtagcccaagctggtcttgaactcctagcctcaagctgtgctcctgcctcagcctcctgagtagctgggattacagaatgtccaggggccaatttaacatatgatgcacattgcttgccttagctgaagatttctagtacactttataaagaattctcgtgggaacctagaagacttgaaaactctaatgtcagtaagtctaatttcattgttttgacactaatttaatcttttctcttggctgc

SEQ ID NO: 97388 - DNA, 195 bp, Homo sapiens
cagatcacttgagcccagcggttcaggagcagcttgggcaacacagcaaaaccctgcctctacaggaaataccaagaaaaaaaaaattagccgggcatggtggcacgtgtctgtaatcccagctacccaggagactgaagtgggaggatcgcttagcttgaaaggtcaaggctatagactcttgcctgtgagaca

SEQ ID NO: 97389 - DNA, 568 bp, Homo sapiens
  misc_feature (539)..(539): n is a, c, g, or t
ccatcagcacacgcagtttttctcagttttctgagatggggccatcttgaatccaacagacaacacacagcatcagccagactaacacaaaggacgtcatgggcatggacgtaaatactggtgtcaacactaggtctgcacctcgagaggagtggagcaaaaggatggagtggcagatgaaggtatgctgttcagaaaggaggcagaaatgaaaggaagaccatcagtgcgctccacagcttgaggaccgtcctggagggcaaatgccagctgctcacttctgaaaagaaaaattccagtgaaatgagtacagtcattcttaggattactcacttgatactgtgtatgtctcttcttggcttctcatctccacacaaaaccctcaggtggtaaaaatctaattaaaaaaattatataaagtcttgtagatttattagcctgaacataatagattttttttaagcacgttaagtcttccatggactaaaagaaatctaattaaaaaaattatataaagtcttgtagatttattagcctgnacataatagattttttttaagcacgttaa

SEQ ID NO: 97390 - DNA, 402 bp, Homo sapiens
  misc_feature (369)..(369): n is a, c, g, or t
  misc_feature (395)..(395): n is a, c, g, or t
  misc_feature (401)..(401): n is a, c, g, or t
atgaaaaggcaggctacagactgagagaaatattttcaaataacacatatgacaaaagactagcacctggaatatacaaagatctctcaaaactcaatagtgaaagaaaaaaaccccagtctacttagaaaatgggccaaagacatacatacatttcactaaataagatatacattcggcaaagaagcacacaaaaagctttggcataattaaccactgaggtaatgtaaattaaaaccacgatgagatgttactacatgccgttcagaattgctaaaataaaaagtagtcacaacagtggtcaggtgtggtactttgctcttcagccacagttaagttagttttagttccctgagtatgttatccggntctctgggttctgggctttgctcctntttccnt

SEQ ID NO: 97391 - DNA, 168 bp, Homo sapiens
tctcctgagagccttacaaacaatgtgacacacacacacacacaacctatatatacacacatgtattatatacacacacatatgtgtatatataatatatatgatgtgtatatgtatccatgggtgtttgttatgactattgtcatagtcataacatagtcatagtgc

SEQ ID NO: 97392 - DNA, 206 bp, Homo sapiens
ctctttctacggtttctctccatggttgatatttgaggagagggaaccaacaacagatagaatatgaaacatttcttccacatggtagttactcagtaaaattgttaaccaaacaacttagagtttaaaccattattttattgtgattggttggttggttggctggtcggttgattggcttgtcttttgaattatcttctgaccgc

SEQ ID NO: 97393 - DNA, 823 bp, Homo sapiens
gcacagctgcccgtcagaaagtgttctccctcgggcatttcgcactccacggaggccctgattaaggaagagcagtgtctcctcaccctgaagtaagatatatgagtcgcgagtccatcctgggatccctcacgtctccctgttttgtatatgaaattggaatggatgaaagagcttcaatataaatgcctatttgatctaacagagatgcacattcatagtcatttactcacttataaactgattcagttcccctggtatttggaggtgagaaggggcagggtatctggaagggagagggggagactgtggcatcaccaggtcgcccttgcctaccctcacccctgctgtctgtttcactccagcacctcctcacagcagtcttacactagtcactggcctagcaggttacaaagctggtctgtggcaggcacaggtttgtacctggcctcaaagcaaatctctttctcttccttcctccggtcttaatgggaagacatgagacacctgagaggaaagggggaaaaaaccccaaatgccagagtacaaaacaaaataaagcaagaggagcaggagagcgaaacaaattcttttgtactcgggccatttaatcgacaactgtggttactctgagagcactgcctgtgggtcagccctgctccgcaaggagcagtatttaaaaacaaaaacaaaaacaaaacctatacactggtaagcaggttttttggttattcaacctggaaaagcacaccacttaaactgcacagtataagccgtgcctacctacgtttgcaccgtttcgacctcccctgcgcccgcccca

SEQ ID NO: 97394 - DNA, 571 bp, Homo sapiens
ccctgctcccagcccctggcacctgccattctactttctgtctctatgaatgtgatgactctagggacctcatataagtggattcgtatggtatttgtccttttgtgactggctcatttcactcagcatgacatccccagggtccatccgtgtggcagcagttatcgacatttggatgtgtataaaacattttgtttactgagcttgactgttatgcagacagaatcattcagtatgcagctgggcacagtggctcacacgtgtaatcccagcgctttgggaggccaagatgggcagatcacctgaggccaggagttcgaaaccagcctggccaacatggcgaaaccccatctttcctaaatacaaaaaattagctgggtgtgagccacccagctaatttttaaaatttttgtacaaaatgagatttcactatgttacccaggctgctctcacctggccctcaagtgatcttcccacctcccaaagtgctgagattacaaggcgtgagccactgcacctggcctctcctgcatccccacatcgggaccctggtgattacattggggccatc

SEQ ID NO: 97395 - DNA, 421 bp, Homo sapiens
gtcacattattctctatttttattactctctgttttatatcgtatccgtcataatatgactacatgaaatgaaatagtagctacagtcaggtatgtgctaaacacgatacttatgtcctttatttaatattcacaacagtcctatcagatagctattaatagttccattttacagaaaagtaaagagaggcttaaagacattaacttgcccaattcaacactggtaagtggcagatctagaaatgtttgactattaaacaatgacttaattatatattttattattctattccaaaagctcctattacagtgccagtcataagaaggcagtcaataaatactgcctgatgattaacatgacactagaaaagaacccatatctcccacacagactataagaccctcacctttctacacacac

SEQ ID NO: 97396 - DNA, 445 bp, Homo sapiens
ctgcagtgcctccccaagttttgaatgacaaagcataataaagtgcatgttcttgtcatcgctgcaaatgagtaaacttttcatcaactgtcttactggaaaagctgattttactcagtatcattataagtaaaaccacttttcaattgattttctttttttgattaaatggtatggcctgatttggaagctattcctataccattgtggggacaatttctttgaatcagttcaaatttctgcaattatatattatgattaattttacatttacattgttttagggtttttcttccctgaggatcctgggcttaaactgtttttgtctatgaaatgaaagaatgatactgatttttttttttaatttctgagccactaagttcatgaaacaactacaatagcaattgaaatgctttgtgttgatgactgatgtagagaaataatg

SEQ ID NO: 97397 - DNA, 2405 bp, Homo sapiens
cgcagcgcccagcagcacccggagtcgcttggacgccggttcggggctattgcggggtggcgtcgctgggcccgggaaagttcgggactggagagtggcgacgccgggcggcgggacccatggaggcgcgcggggagctgggcccggcccgggagtcggcgggaggcgacctgctgctagcactgctggcgcggagggcagacctgcgccgagagatcccgctgtgcgctggctgtgaccagcacatcctggaccgcttcatcctcaaggctctggaccgccactggcacagcaagtgtctcaagtgcagcgactgccacacgccactggccgagcgctgcttcagccgaggggagagcgtttactgcaaggacgactttttcaagcgcttcgggaccaagtgcgccgcgtgccagctgggcatcccgcccacgcaggtggtgcgccgcgcccaggacttcgtgtaccacctgcactgctttgcctgcgtcgtgtgcaagcggcagctggccacgggcgacgagttctacctcatggaggacagccggctcgtgtgcaaggcggactacgaaaccgccaagcagcgagaggccgaggccacggccaagcggccgcgcacgaccatcaccgccaagcagctggagacgctgaagagcgcttacaacacctcgcccaagccggcgcgccacgtgcgcgagcagctctcgtccgagacgggcctggacatgcgcgtggtgcaggtttggttccagaaccgccgggccaaggagaagaggctgaagaaggacgccggccggcagcgctgggggcagtatttccgcaacatgaagcgctcccgcggcggctccaagtcggacaaggacagcgttcaggaggggcaggacagcgacgctgaggtctccttccccgatgagccttccttggcggaaatgggcccggccaatggcctctacgggagcttgggggaacccacccaggccttgggccggccctcgggagccctgggcaacttctccctggagcatggaggcctggcaggcccagagcagtaccgagagctgcgtcccggcagcccctacggtgtccccccatcccccgccgccccgcagagcctccctggcccccagcccctcctctccagcctggtgtacccagacaccagcttgggccttgtgccctcgggagcccccggcgggcccccacccatgagggtgctggcagggaacggacccagttctgacctatccacggggagcagcgggggttaccccgacttccctgccagccccgcctcctggctggatgaggtagaccacgctcagttctgacccaggcccggctccaccctgcacctcacacgagggagctgcccctgggtgggcggctcggggctgctggggtttccgaggaagtggggccagggcgtcaagggagggctggtgccttcggagcctcccactgccgaccgcacagctccctctctgggggctgagggacccacctggcccctcctctgacacagggctggcccgccaggtggcctcccagcaagccagccttttttgtaagcaaatttctcccctttattgaccaattaactgagcacttgctgctatttctagacatgaaatgtcaccttgctgaggcccagcccagcccagcatagcccgagggctggaaaaacgctttcatctctaaaactgagaaatcatcataattgtgctttcacttcccaggctccatgtgtcttggagccgtcaccccgaggctccctctttaggtcggagattggccttgcctgtcgaggcaagaggctgcagaggcggggacacacctgtgtcttccgggagaggccccctcttctccccagacccacagggggcctctgtgcctccagccccacttccccgggagaagctttccccaatccccaggtctctagatcattctgttctcgagtatcctgtggaggaggcaaaaatgcctggcgccccttctctccaagctcaattctctaagcccctcagggtctcctcctcaccccaccccaggcccttggtgtccaggctgcacccacagatgtctgttgccaaacagcctgccctccctgccggagccggctctgccagccccagattgggaagtctccccgctggagaagggtggggctcctctgagcctgccctgcctcctccatcagatcctttgggaagaagtttctgggagatgcccgcagctgtgcgtgccccagacacaaaggctggcctgtgtgtaagtcaaagtcactcccgcaaacctgaatctcgagctacctattggttctgtgaatgttctgtgtcttttatttattctcgggtgatcagctctttccaagacttcaataaatttgtcagttacctcgtgcc

SEQ ID NO: 97398 - DNA, 2183 bp, Homo sapiens
  misc_feature (4)..(4): n is a, c, g, or t
  misc_feature (6)..(7): n is a, c, g, or t
  misc_feature (65)..(65): n is a, c, g, or t
ggcncnngccccgcacgacgcggcgggacttgggagccccgaaccctccaggggacgctgacctnggaggagcgcgtctcgcgccactcggcctggtggccgcgatgctgctggaaacggggctcgagcgcgaccgagcgaggcccggggccgccgccgtctgcaccttgggcgggactcgggagatcccgctgtgcgctggctgtgaccagcacatcctggaccgcttcatcctcaaggctctggaccgccactggcacagcaagtgtctcaagtgcagcgactgccacacgccactggccgagcgctgcttcagccgaggggagagcgtttactgcaaggacgactttttcaagcgcttcgggaccaagtgcgccgcgtgccagctgggcatcccgcccacgcaggtggtgcgccgcgcccaggacttcgtgtaccacctgcactgctttgcctgcgtcgtgtgcaagcggcagctggccacgggcgacgagttctacctcatggaggacagccggctcgtgtgcaaggcggactacgaaaccgccaagcagcgagaggccgaggccacggccaagcggccgcgcacgaccatcaccgccaagcagctggagacgctgaagagcgcttacaacacctcgcccaagccggcgcgccacgtgcgcgagcagctctcgtccgagacgggcctggacatgcgcgtggtgcaggtttggttccagaaccgccgggccaaggagaagaggctgaagaaggacgccggccggcagcgctgggggcagtatttccgcaacatgaagcgctcccgcggcggctccaagtcggacaaggacagcgttcaggaggggcaggacagcgacgctgaggtctccttccccgatgagccttccttggcggaaatgggcccggccaatggcctctacgggagcttgggggaacccacccaggccttgggccggccctcgggagccctgggcaacttctccctggagcatggaggcctggcaggcccagagcagtaccgagagctgcgtcccggcagcccctacggtgtccccccatcccccgccgccccgcagagcctccctggcccccagcccctcctctccagcctggtgtacccagacaccagcttgggccttgtgccctcgggagcccccggcgggcccccacccatgagggtgctggcagggaacggacccagttctgacctatccacggggagcagcgggggttaccccgacttccctgccagccccgcctcctggctggatgaggtagaccacgctcagttctgacccaggcccggctccaccctgcacctcacacgagggagctgcccctgggtgggcggctcggggctgctggggtttccgaggaagtggggccagggcgtcaagggagggctggtgccttcggagcctcccactgccgaccgcacagctccctctctgggggctgagggacccacctggcccctcctctgacacagggctggcccgccaggtggcctcccagcaagccagccttttttgtaagcaaatttctcccctttattgaccaattaactgagcacttgctgctatttctagacatgaaatgtcaccttgctgaggcccagcccagcccagcatagcccgagggctggaaaaacgctttcatctctaaaactgagaaatcatcataattgtgctttcacttcccaggctccatgtgtcttggagccgtcaccccgaggctccctctttaggtcggagattggccttgcctgtcgaggcaagaggctgcagaggcggggacacacctgtgtcctcctcaccccaccccaggcccttggtgtccaggctgcacccacagatgtctgttgccaaacagcctgccctccctgccggagccggctctgccagccccagattgggaagtctccccgctggagaagggtggggctcctctgagcctgccctgcctcctccatcagatcctttgggaagaagtttctgggagatgcccgcagctgtgcgtgccccagacacaaaggctggcctgtgtgtaagtcaaagtcactcccgcaaacctgaatctcgagctacctattggttctgtgaatgttctgtgtcttttatttattctcgggtgatcagctctttccaagacttcaataaatttgtcagttacctcgtgcc

SEQ ID NO: 97399 - DNA, 190 bp, Homo sapiens
gagttgtaagggttgttaatagattcgggatacaagtccctcatcagtcatgtgatttacaactatttaccgcctttctgtaggtttttctgtttcttcactttcttcatggtgtcctttggtggaccaaagtgtttcattttaatgaagtccaattgatctgttttttcttttgtcgcttatgttttta

SEQ ID NO: 97400 - DNA, 900 bp, Homo sapiens
agcaagggctggtggaccttccccacattccagttcaggccagaatgggcctcgctccccacagccagtgctgctctgtttgagcagagaagccagctccagcccgctgaaaacagactggacccaaaggaagaggagacaaaccctactgtcggcctgccccaggccttttcccagatgggtgagcacctgccctgaaggcacaggaggaagtgagcgtggggctcagggaccaggcctgccctcccagttagtgccaaggacacagaaacagaggggagtgcccatcaacctctgcccaacacagagccccttaatgacttttagattaaaaagccaagacacggccatatccttaagatgcctaatgaagcaattggcccatcagccagtccaggcacccgcatgaagccccaaatgtagaaactcagccagtcttgccagacctgcttaatgcaaaattggtaatgtcatttacaagcctctcacacgcaggcctatgaataaaagaataatgctgaaaagcaaggctctccaatttctatacattgcaaacagctctgagcagttccttcttgtgcacttggcacagaccttccaccctgccagggctcgccttgaagatagagtgccccaatcctggaggcacagtggctggaattgctgcaaagtaccaggaggcaggaagatttacctccctggccctggagctccttccagccacacaactccagggaggctcagaggccagccctcggaccccaaggccagaagacatgtaaacagtgacataaatgcaccccaaccgcctctgtcaagcatcttgtaatgcttctccactcctgctgcaaaggctgctggaattttctgcctctactgcccccattaaatcagctgccc

SEQ ID NO: 97401 - DNA, 164 bp, Homo sapiens
cagacatctaagaatgggttccagccctacccctaccagctttgccactgaaggcaaaccatcaacctctggaacttagcgtctttacctataaaatggagaggctgaaataccacatccatggaattcaaactgtgcttcagagttcttagattcccttccta

SEQ ID NO: 97402 - DNA, 668 bp, Homo sapiens
cctacccagtttcagggacctgtgctaacttccggcctcagcgttcttcttattcactcagaccctggcgagcaccttcctccttattcttttacagaagtaccaaagccaagcaaacataatttcttttgttttttttttctctttttgagatggagtttcactgttgttccccaggctggagtgcaatggtgcaatctcaattcactgcaacctttgccccccggtttcaagcggttcttctgcctcagcctcccaagtagctgggactacaggcgcccgccaccacgcccggccaattttttgtatttttagtagagacagggtttcaccatgttggccaggctggtcttgaactcctgacctcaggtgctctacatgcctcggcctcccaaagtgccgggattacaggcgtgggccactgcgcccagccaaaacataatttctgaacacagggaacttggaacagggactcccctcttgcctcgtggttgatggaggcttatcttctgggtaggggcacagagatccttgtgtacttcgccaatgagccctatagtctgctcatctcagccatttcccacaagaaaggaaaatggatattgtcagagggtttcagaccccgtaaatgggatgtttccaagaggcttccctatcagtgattaatc

SEQ ID NO: 97403 - DNA, 395 bp, Homo sapiens
gtgggttgatcgtggcttgtgggttgaccgtggcttgtgggttgaccgtggcttgtgggttgaccgtggcttggctttgccctagcacgcggctacgctaggaggggttgtggcccaatttgcaactctggccccgggatttctgcactccatcagaaccacctgggaggctagtttaaactggattctagagacacattccacaagagaaacgggtgctggtgagaaaggaattacttagtaaactttaaataaagatcctgccacccactgtgtacacgcagtcctccttgggtcctccactctgtcccccaccccatgcaaacagcacaggcgtgcacaagcacgcacgcatgcacacacaccagtctctgaatagctgttctaggttgggg

SEQ ID NO: 97404 - DNA, 816 bp, Homo sapiens
ctttgggtagtctcatttttttcatactggtttcttttgtacccctaggtagattatcattatagaacacataaatagacacagattttgtgacatggggattttgaagtattgtcttttagtagatcctgccattttttaaaacatgtgaaatttattttgaaactctcacttggcttccaaaggactgcctagaaatctttttagaagactaacttggaataaaatagaaattacagtttgataggaatcctagaatcctaatttgtcccttgccttagagctagtgtactccagttaggctctgtgtgttcgtgtgtgtctgtgcaggtgcatgcacatgcgtgtatgtgactcagtaaaatgctgttacatactgcatatgctggatgagaactcttgaaaagccaagactaaaaaacaacaataacaacaacactcccagctcactgtatgctgatctgctgaagacacctccttactctattgtcatttcatattcaaggatttccctcaatgctgagcttcctgtagagcatttctttttgatcttccactcttccattatttgaactgcaccatgcccgtgcacacataacatatttattgacaacaaattttatctttgcattgaagccaaggcctttatttccctggtcttccaggttcaggcctgggaacctggaaggttccccaggtttccccaggaatgtaagccaactggtgtgccgagctttttctgtttcccgaggggcccaccatatggtgtgctccacctctagtggtcgctcacgtggttatccaacttatggggga

SEQ ID NO: 97405 - DNA, 208 bp, Homo sapiens
aatgatactaaatggaaaaatattcagaagacattagtagtaaatattaaatatgccaattcatttattcatatgttgtttacatagtagaccaataaaggataattttatttgtcagatagaagacagggtggtatagctgataccaccagaggaaagagagaaagtcctggtagtgagttttaaggtgggggtggtatcaggggta

SEQ ID NO: 97406 - DNA, 516 bp, Homo sapiens
gctatgatgtcactaggcaatgggaatttttcagctccattataatcttacgagaccactgtcatatatgcagcccattgttgacccaaacatcgttatgcagcgcatgagtaatcttatgaagttagcacaattttgacacagcaacttgataaagacattaccagaaaagaatgtaactgacctgtagacctcataaacacaggcaacaaatgcttagtgtaatattaacaaatctaatccagcaatatataaaaaaggataatacatcataaccaagtggagtttatcccaagaacacaaggttggcctaacattttaaaatcagtgtaattcaccacattaataaaaacaccatctgagcatccaatcaattcaaaaaagcatctgtccaaaatcaatacccactcatgataaaacctcttagcagacttggaacaaaaaacaacttcctcaatctggttaacggcatctattaaaaatctacatttatcatcacatttagtagtgaaatac

SEQ ID NO: 97407 - DNA, 550 bp, Homo sapiens
ctcagtccaatctcagatgtggccaagaagtttctaagcagagaaaaacgttcaagagagcgaaacccagaactgccataaatattcatcaaggaaaatctcttgagtagcagagcagatacttttcacatgtatgtattaatttactttagaaaagaggatgtttgtttcttattcttccattttccaaatgagagtattatggtagtgaccatattcctattctctattatattttatatcggagaggatttgatttagcccatgagtcaaaaaccactgcgcccagccagtcctacctatcaatttttacataaatgatactggccagaaagaataaagctgacaggataaaaagtaagggtacaattaaaggatacaaacaaatgtaatgtaataaatgaatagagaagtttccacatataggctgttatgatgctctgcttagtctttacttgactgtgttccatatgcatcatatagaaagttctcttcttgttactcatttttctctttgtgctttactaaatataatttctattgtattctc

SEQ ID NO: 97408 - DNA, 369 bp, Homo sapiens
agacagaggattttgccatgttggccaggctggtctccaactcctgactgcaagtgatccacccatctcaggttcccaaagtgctggattacaatccagccaccgcgcctggccatttttaagaaatacatacatttagaaatgcctcaaaagaaattatatgatgtctggattttcttcaaatcaatctgatgggaagagggaacggatggtggtatagatgaaatgagattggtcttgagttgctaattgttgaaactgggtgatggatacatggcagttcattgtacgatttccactttgtaaatgttgaatttttgataataaaaagctaagacaaaattaaattaataaaaattaaataaagga

SEQ ID NO: 97409 - DNA, 327 bp, Homo sapiens
gggtatgccaagttccaattcagccctcaggtttgggcacgagaagagggacattgttcaccactcggccacaaatgacaatttgactcacaacagccactgaaaccctgagtatcaatcatataacataattaagtgtgtgtgtggcggggggtaggatggtaaacaaggtacctttcttgcctccaagggactgacgacctgtatgatgcactctggcaatggtgcctgcacacaacagttgtgtggtcattgttggtgcaggtaggcgagaggagctgagaccgggacacccatcacagcaaaagacaaagcatagtaaagtga

SEQ ID NO: 97410 - DNA, 582 bp, Homo sapiens
aggttacactaatgtttatgttttgaaaatattacctcttccatttagtactatatgtattaaataaaagtagacagtttttttttttttggctttataatgtggttcagatttttttagaaagtctggctgtgtctacattgccttaaagcaataggatatttctctttatttatttatttgtttgttttttttgagctagagtttcgctcctgttacccatggtggagtgcggtggtgtgatctcggctcactgcaacatctgcctcccagattcaagcaattctcctagctcagcctcctgagtagctgtgattacaggcacccaccaccataccctcctaatttttgtatttttagtagagttggggtttcaccatgttggccaggtgggtcttgaactcctgacctcaggtgatcctcccgcttcagcctcccaaaatgctgggattacaggcatgaaccaccttgtcccgccaggaatgttttttaagaaggctatctacttacagaattcctggccttgagaggatattacttggaaaggaaaggatttgttttgtgattaaaaagtaagactct

SEQ ID NO: 97411 - DNA, 451 bp, Homo sapiens
ttcccggtaggctattctatgccatcctaaaagaacaagaaaatgtggccagtaggatagatgctgtcaaccccattttaaagatggagaaactgaggctatatgagtgaactgactttctcaggaccaacatttgacactgaggctgctgattctctggtctttttgtgctaccataatacgtgctcagcttatttttaacaaacctagagcatggcaatgtgaagggactggcagggaatggaaaagaagagcgtgtactgaagaaaaaaacaccagggaagggaaggaacagcctcactggagagggtcactgacagctgacagtgggtgcccctatggccctggggagctatgaactccttgcccagggctggcttgggagggtctacttgactctgggtccctgacttatctagttgcatctaggcctgggagcaaatgcaaactg

SEQ ID NO: 97412 - DNA, 1183 bp, Homo sapiens
cagcagagcaggtaacagctcttgcacctgtttctcttgcacctgacgtgcagctgctcctacccacctctcctggctgagccttgcctgatacagcagcccggaggcaccacttgcttcccgagtctcaccctcccaggcagctcctacactcaactgcttctctaggaaaggtctcacctccagcctggagcagtcgggattacagaaagccccatccttggcttagggagcgccatgacgactgaaattggttggtggaagctgactttcctccggaaaaagaaatccactcccaaacacaaaaaaatctgttgggcgcgcgcgcctggggccccaggagaggtttctaacaccccaatgccggtggggcgagcgggggcccacggtagcgcacggtagaacatggggcacaaacggggtccaaaaggaacaccggggggccgagcacacaagggcgggggagttctctcccccaatataaaaaaagcccgccgggggggacccaccggggcggttcgggacaccacctcccagagggggagccacgagggagggcaaaaacgggggggcacaacacaccaggggggtgcccaggggagcacagaaataaaaaaaattacgccggggcgcgcgcgtggggggtgcgaccacaccagaaaagcacagatgaaagaagcgcgaacaagccgagcaacagagagcggagcagcaagcagacagcaaacagaatgagtgacaaacgaccgagacacaccacgaacacacacagacaaagcaacgaaaagcaatacactagccacagacgatgcgtcagacgacgcagccaaagagcagggccagaaagggacaacagcaacacaaagaagggggacgagcaggagaggaagagacagcaaacaccggagaaagacaaggagcacgcaagcaaggagccaagaacagaaacgaggaacgagaacagagacgacgcaagcaagccgaagagaaaagagagcagaaacgcaggacgagcaggccaagatgcaggacaacacagagccaagagcgaggcagaaggagacagggaagggaagcaggaacgaggacaggcagagagacgagacacaggcaacgacgagagagaggagagcacggcaagatgcgaaaaagaaaagaaggcgaaagacggcgaggagaagaa

SEQ ID NO: 97413 - DNA, 1505 bp, Homo sapiens
cagcagagcaggtaacagctcttgcacctgtttctcttgcacctgacgtgcagctgctcctacccacctctcctggctgagccttgcctgatacagcagcccggaggcaccacttgcttcccgagtctcaccctcccaggcagctcctacactcaactgcttctctaggaaaggtctcacctccagcctggagcagtcgggattacagaaagccccatccttggcttagggagcgccatgacgactgaaattggttggtggaagctgactttcctccggaaaaagaaatccactcccaaagtgctgtatgagatccctgacacctatgcccaaacagagggagatgcagaacccccgaggcctgacgctggaggccccaacagcgactttaacacccgcctggagaagattgtggacaagagcacaaagggcaagcacgtcaaggtctccaactcaggacgcttcaaggagaagaagaaagtgagagccacgctggcagagaaccctaacctctttgatgatcacgaggaaggacggtcatcaaagtgaagggctgaggagggtgctagcacctcttggctccctgccatcagccagatctgagacaggaccttgccacgctggcctctttggccatagctgaagctgtggggccagttgatacctgctggcaggaaatggctgttttttaggtttgtatttatgtgccgccacttttgtaaggcctgggagatcccagggtcctccaccctccccctgaccacatacaaaggcactctagttcaagagtgaaaaatctcacccaggaggaacagccctccttgaagcaatggcagggccagcagggaggtgggcatggcagggaatggagagagtgagccagacagacttcacctccttactggacacagggtcaagggcgagtttcaattgctgctccctttactttctctacctgtgactactccctggaccaatcctgaggagggcacattttccagaagccacgtgataggggctggtttctgtggagccagaggcagagacactgaacttgagctcacctcctaacaccggcagtaaacttcctggaactttgccctcaggtgcggaggggacagaggaccctggcactctgttagggtgctgtagaagactagattgatggtagtttggcctgttagttcctgttttggccatgacttttgcagatggcaagtcacacaccctcaaagggaagctacacgggccaaatcgggggagtgggtggggaattttctcctctccctttcctactataatagtatttaagacatatcagctccagagatgagtcctggagccttgaattttgtttaacaaaataattgtaggtttctctctgtaataacaacgctggaaaggcagagaacctcttttatgctcatgtcttgcatttattgagatgactgtttctcatgcctttatgttccttcatgtaagtaaagtggacctttgtgctcaaa

SEQ ID NO: 97414 - DNA, 2320 bp, Homo sapiens
cagcagagcaggtaacagctcttgcacctgtttctcttgcacctgacgtgcagctgctcctacccacctctcctggctgagccttgcctgatacagcagcccggaggcaccacttgcttcccgagtctcaccctcccaggcagctcctacactcaactgcttctctaggaaaggtctcacctccagcctggagcagtcgggattacagaaagccccatccttggcttagggagcgccatgacgactgaaattggttggtggaagctgactttcctccggaaaaagaaatccactcccaaagtgctgtatgagatccctgacacctatgcccaaacagagggagatgcagaacccccgaggcctgacgctggaggccccaacagcgactttaacacccgcctggagaagattgtggacaagagcacaaagggcaagcacgtcaaggtctccaactcaggacgcttcaaggagaagaagaaagtgagagccacgctggcagagaaccctaacctctttgatgatcacgaggaaggacggtcatcaaagtgaagggctgaggagggtgctagcacctcttggctccctgccatcagccagatctgagacaggaccttgccacgctggcctctttggccatagctgaagctgtggggccagttgatacctgctggcaggaaatggctgttttttaggtttgtatttatgtgccgccacttttgtaaggcctgggagatcccagggtcctccaccctccccctgaccacatacaaaggcactctagttcaagagtgaaaaatctcacccaggaggaacagccctccttgaagcaatggcagggccagcagggaggtgggcatggcagggaatggagagagtgagccagacagacttcacctccttactggacacagggtcaagggcgagtttcaattgctgctccctttactttctctacctgtgactactccctggaccaatcctgaggagggcacattttccagaagccacgtgataggggctggtttctgtggagccagaggcagagacactgaacttgagctcacctcctaacaccggcagtaaacttcctggaactttgccctcaggtgcggaggggacagaggaccctggcactctgttagggtgctgtagaagactagattgatggtagtttggcctgttagttcctgttttggccatgacttttgcagatggcaagtcacacaccctcaaagggaagctacacgggccaaatcgggggagtgggtggggaattttctcctctccctttcctactataatagtatttaagacatatcagctccagagatgagtcctggagccttgaattttgtttaacaaaataattgtaggtttctctctgtaataacaacgctggaaaggcagagaacctcttttatgctcatgtcttgcatttattgagatgactgtttctcatgcctttatgttccttcatgtaagtaaagtggacctttgtgctcaaactgttcctttcaagcttcaggaagggttcccaggtgtgacaatgtaggaactgggtcactaatttttaccatcaaactagccttagtatggggatggggcagcagaaggagctagttacacctcagtggtcagttctctccagtcaacagagagcccgtcaggtgctctaagagagtagggcagacctttggtgattgaccccaaagtttcagtggtttggtttgggattaagattcaaactcgggctctaccccttagtagctgggtgaccttgggaacatttgcttgtactctgagcctcagtttcctcttctgtaaaagggggctgaaataatacctatctcatagggagtggtcagtattaagtggcctatgagaggtcccatagtaagtgctcagtttaatactggtttccttcccccttcctttataaggaactccaccataccccacagctttggtttaagaaaaaggagaaggtgggtatggtggctcaggcctgtaatcctagcactttgggggctgaggtgggaggactgcttgagcccaggagtttgagaccagcctaggcaacatagagagaccccatgtctaaaaaaaaaccaaccaacaaacaaaaagtagctgactgtggtggcacatgcctgtagtcctatctacttgggaggctgaggtgggagggttgcttgagtccaggagttcaagacgacagtgagccatgattgtggcactgcactaccacctgggtgacagaactaggtcttatctctaggggaaaaaaaaaattaataaataagagatgcttggcacggtg

SEQ ID NO: 97415 - DNA, 1008 bp, Homo sapiens
cagcagagcaggtaacagctcttgcacctgtttctcttgcacctgacgtgcagctgctcctacccacctctcctggctgagccttgcctgatacagcagcccggaggcaccacttgcttcccgagtctcaccctcccaggcagctcctacactcaactgcttctctaggaaaggtctcacctccagcctggagcagtcgggattacagaaagccccatccttggcttagggagcgccatgacgactgaaattggttggtggaagctgactttcctccggaaaaagaaatccactcccaaagtgctgtatgagatccctgacacctatgcccaaacagagggccagcagggaggtgggcatggcagggaatggagagagtgagccagacagacttcacctccttactggacacagggtcaagggcgagtttcaattgctgctccctttactttctctacctgtgactactccctggaccaatcctgaggagggcacattttccagaagccacgtgataggggctggtttctgtggagccagaggcagagacactgaacttgagctcacctcctaacaccggcagtaaacttcctggaactttgccctcaggtgcggaggggacagaggaccctggcactctgttagggtgctgtagaagactagattgatggtagtttggcctgttagttcctgttttggccatgacttttgcagatggcaagtcacacaccctcaaagggaagctacacgggccaaatcgggggagtgggtggggaattttctcctctccctttcctactataatagtatttaagacatatcagctccagagatgagtcctggagccttgaattttgtttaacaaaataattgtaggtttctctctgtaataacaacgctggaaaggcagagaacctcttttatgctcatgtcttgcatttattgagatgactgtttctcatgcctttatgttccttcatgtaagtaaagtggacctttgtgctcaaa

SEQ ID NO: 97416 - DNA, 1040 bp, Homo sapiens
  misc_feature (673)..(673): n is a, c, g, or t
cagcagagcaggtaacagctcttgcacctgtttctcttgcacctgacgtgcagctgctcctacccacctctcctggctgagccttgcctgatacagcagcccggaggcaccacttgcttcccgagtctcaccctcccaggcagctcctacactcaactgcttctctaggaaaggtctcacctccagcctggagcagtcgggattacagaaagccccatccttggcttagggagcgccatgacgactgaaattggttggtggaagctgactttcctccggaaaaagaaatccactcccaaaggtgctgtagaagactagattgatggtagtttggcctgttagttcctgttttggccatgacttttgcagatggcaagtcacacaccctcaaagggaagctacacgggccaaatcgggggagtgggtggggaattttctcctctccctttcctactataatagtatttaagacatatcagctccagagatgagtcctggagccttgaattttgtttaacaaaataattgtaggtttctctctgtaataacaacgctggaaaggcagagaacctcttttatgctcatgtcttgcatttattgagatgactgtttctcatgcctttatgttccttcatgtaagtaaagtggacctttgtgctcaaaaaaaaaaaanaaaacaaaaaacaaacagccaactcgtcaagcaacacgaaccaatccaaacagaacacagtcatgtagctagaacaacacaacagacaaaacaagaattgtggtgcggggcggccgcacagaagacattaaacaaacactctgggggggcgccaccaaaagaatagtagagtactctgattcacacgaacacgcgctgcaaggtgtccgtgttcacccaaaacaagccggaggagggcttcaacacaccgtgcgttgtttttgtctgcacgccgcgatccttcgccctctgtcgtcgggatccacgcatcaacacacagcacaccgaccaggcactaactgaaacgacgacgcagttgcactccact

SEQ ID NO: 97417 - DNA, 1420 bp, Homo sapiens
aactagctagtacagccggtgtgaatcggccgaggccgagtctcaccctcccaggcagctcctacactcaactgcttctctaggaaaggtctcacctccagcctggagcagtcgggattacagaaagccccatccttggcttagggagcgccatgacgactgaaattggttggtggaagctgactttcctccggaaaaagaaatccactcccaaagtgctgtatgagatccctgacacctatgcccaaacagagggagatgcagaacccccgaggcctgacgctggaggccccaacagcgactttaacacccgcctggagaagattgtggacaagagcacaaagggcaagcacgtcaaggtctccaactcaggacgcttcaaggagaagaagaaagtgagagccacgctggcagagaaccctaacctctttgatgatcacgaggaaggacggtcatcaaagtgaagggctgaggagggtgctagcacctcttggctccctgccatcagccagatctgagacaggaccttgccacgctggcctctttggccatagctgaagctgtggggccagttgatacctgctggcaggaaatggctgttttttaggtttgtatttatgtgccgccacttttgtaaggcctgggagatcccagggtcctccaccctccccctgaccacatacaaaggcactctagttcaagagtgaaaaatctcacccaggaggaacagccctccttgaagcaatggcagggccagcagggaggtgggcatggcagggaatggagagagtgagccagacagacttcacctccttactggacacagggtcaagggcgagtttcaattgctgctccctttactttctctacctgtgactactccctggaccaatcctgaggagggcacattttccagaagccacgtgataggggctggtttctgtggagccagaggcagagacactgaacttgagctcacctcctaacaccggcagtaaacttcctggaactttgccctcaggtgcggaggggacagaggaccctggcactctgttagggtgctgtagaagactagattgatggtagtttggcctgttagttcctgttttggccatgacttttgcagatggcaagtcacacaccctcaaagggaagctacacgggccaaatcgggggagtgggtggggaattttctcctctccctttcctactataatagtatttaagacatatcagctccagagatgagtcctggagccttgaattttgtttaacaaaataattgtaggtttctctctgtaataacaacgctggaaaggcagagaacctcttttatgctcatgtcttgcatttattgagatgactgtttctcatgcctttatgttccttcatgtaagtaaagtggacctttgtgctcaaa

SEQ ID NO: 97418 - DNA, 1882 bp, Homo sapiens
  misc_feature (1515)..(1515): n is a, c, g, or t
cagcagagcaggtaacagctcttgcacctgtttctcttgcacctgacgtgcagctgctcctacccacctctcctggctgagccttgcctgatacagcagcccggaggcaccacttgcttcccgagtctcaccctcccaggcagctcctacactcaactgcttctctaggaaaggtctcacctccagcctggagcagtcgggattacagaaagccccatccttggcttagggagcgccatgacgactgaaattggttggtggaagctgactttcctccggaaaaagaaatccactcccaaagtgctgtatgagatccctgacacctatgcccaaacagagggagatgcagaacccccgaggcctgacgctggaggccccaacagcgactttaacacccgcctggagaagattgtggacaagagcacaaagggcaagcacgtcaaggtctccaactcaggacgcttcaaggagaagaagaaagtgagagccacgctggcagagaaccctaacctctttgatgatcacgaggaaggacggtcatcaaagtgaagggctgaggagggtgctagcacctcttggctccctgccatcagccagatctgagacaggaccttgccacgctggcctctttggccatagctgaagctgtggggccagttgatacctgctggcaggaaatggctgttttttaggtttgtatttatgtgccgccacttttgtaaggcctgggagatcccagggtcctccaccctccccctgaccacatacaaaggcactctagttcaagagtgaaaaatctcacccaggaggaacagccctccttgaagcaatggcagggccagcagggaggtgggcatggcagggaatggagagagtgagccagacagacttcacctccttactggacacagggtcaagggcgagtttcaattgctgctccctttactttctctacctgtgactactccctggaccaatcctgaggagggcacattttccagaagccacgtgataggggctggtttctgtggagccagaggcagagacactgaacttgagctcacctcctaacaccggcagtaaacttcctggaactttgccctcaggtgcggaggggacagaggaccctggcactctgttagggtgctgtagaagactagattgatggtagtttggcctgttagttcctgttttggccatgacttttgcagatggcaagtcacacaccctcaaagggaagctacacgggccaaatcgggggagtgggtggggaattttctcctctccctttcctactataatagtatttaagacatatcagctccagagatgagtcctggagccttgaattttgtttaacaaaataattgtaggtttctctctgtaataacaacgctggaaaggcagagaacctcttttatgctcatgtcttgcatttattgagatgactgtttctcatgcctttatgttccttcatgtaagtaaagtggacctttgtgctcaaaaaaaaaaaanaaaacaaaaaacaaacagccaactcgtcaagcaacacgaaccaatccaaacagaacacagtcatgtagctagaacaacacaacagacaaaacaagaattgtggtgcggggcggccgcacagaagacattaaacaaacactctgggggggcgccaccaaaagaatagtagagtactctgattcacacgaacacgcgctgcaaggtgtccgtgttcacccaaaacaagccggaggagggcttcaacacaccgtgcgttgtttttgtctgcacgccgcgatccttcgccctctgtcgtcgggatccacgcatcaacacacagcacaccgaccaggcactaactgaaacgacgacgcagttgcactccact

SEQ ID NO: 97419 - DNA, 582 bp, Homo sapiens
aaacttggaataattatattctaaccattttgttttacaaagaaaccaaggttaacatagatggggactgttaccagtttttgctgctaattagttagaagtggaaggagaagtcaagcctcctgattcctagccagattttctttttctcacttctccttgctgaatcattggccaaaaatgtacaactaacttctccttttgggaagtgcatatttcatattaactctggcaatttatgaaaaaatgtagattcatttgctccattaacaaaatatcagtgcctaagaagaaataaggttgatttttgaaagaaatcaagtgcctactcagaatgtgcaggggatggcacctttcatttagcagcgttaagcttaatgtgttgttttacttatgatgtaatttctccccgatatatgaacaatgtaagttcacatcactacatatgtaaaatcactatctaactaaatgcctgtccttgaggtgaaatctttaataaactttcacccatcttgagttatttttcctctgattatacctgggaattaaggtatttaaaagttctaataaatttccatcttt

SEQ ID NO: 97420 - DNA, 151 bp, Homo sapiens
atgggttcatgcgttatgcatgagagatgctctggcacaaagggctgggccacagcctggggataggcaggagcaggcaggcatgtgtgcacatacacacacatacacatgcagacacatatgcatgtacagttcattatacacacacaca

SEQ ID NO: 97421 - DNA, 817 bp, Homo sapiens
ccagttgcacatatttggaagactcattatttcagcaattttgtgaagctgtacggatggtctccagtacaacattgaaaagaagtggtgagagagctaacatccttgccttgttcctgagtttataaagagtttctagatgcaaacacacacacacacaaaagtgtgcttccagaagatgctgctgggaaggccactgcatccctagggagccaaatcaaagcattttgtcctaatgtgtccggaattggtgggttcttggtctcactgacttcaagaatgaagccgtggaccctcgcggaaagatagaatagaagctacaagatctgcagttatgcttcctcttacccaatttacagataatatatgtttgtggctgtgatacacagaaaaatggcatccaaggaaagtccacctcctaatcctcagaagctgtgaatatgttactttatatggcaaaatggactctgcagatgagattaagtttctgcctgcctgacaatcactctgctgatggcaaccaaatattgtcttcttcctggagtctcagggaaaatgtggcctggggcagaccctagttcttcagatggaaggtgaaacttcaatacatcaccgcaacaggaaacaatctcaagaatttgtatttacacatcctggacaaagaaagtgtaaataagtctggaatgcagtcatcagttcccaggtcctggaaggcaggagtctggagtcaggcagaaagagaaagcaggcacagtgacaaccagcagtacacttaaggattagagtgcagatttttctaagctcccaggccaatgcc

SEQ ID NO: 97422 - DNA, 138 bp, Homo sapiens
ccaaccaggaggaaaaagctgtttgttggtggggggtggggagggagatgaggacttatgtccctgttgtttttgaacttgccatttgacattggtcaaacttttctgggtcccctttcttctctctcagctgaaatg

SEQ ID NO: 97423 - DNA, 295 bp, Homo sapiens
tagaggcgggatcttgctgtgttgcccgggctggtctcgaactcttggcctcaagcgatcctccctcctcggcctctccaagtgcggggattacgggcggagccaccgcgcacggccgtggtcagctttgaaagctgcgtagatccctttggctcatacgcctttctgctagcttaccctgattctgcttctggttcagatagtattttaatatttctagtgtgtctttttgtaagatatctgaaatctttttgtggaatgaagtggcatgaaaaataaaccaataatcgttagt

SEQ ID NO: 97424 - DNA, 126 bp, Homo sapiens
tccagtgattcaagtaattctcctgcctcagcctcccgattagctgggattacaggcatgagccaccaggcccggccctcacccccattttgtacactctctgccattcatttaccctgacaactt

SEQ ID NO: 97425 - DNA, 329 bp, Homo sapiens
gcgtcgaccacatttggcattttctctcaaatgtggcagatgctgaagctgaagaggaagaagttatgaacaacatatgaggtccctgaatgccaaggctggttctcactctgaatggcttctggggaaggggtgagtgaagggactgagggacttcctactcttgctgcgggcctctgggttcttagcttcagggaaccccacgctgcccacagatatttgagctgatgtgggggatctccccagagatttggcagaaacagagctacagcaggcaggtagctggggatctttgtgttgaggacagctccagggagactggccataag

SEQ ID NO: 97426 - DNA, 490 bp, Homo sapiens
tagagcatccgatagcatcctaaccaggccagaacagggatgtgatcagccatgtgtgattgggctgagaggtgaagatgaggccagaatttgcccactgccttggccgagatttgaagaccatcagcaatattgagtttctgtgggttgtattcctgtttcttcaaggggtgtatgtcagtgactgtttgcacaggtagcttatttatgtgcagcattgctgggagtgcatgagcatgtttaatgcctgccatccacgggaatatcggtgtgtgctacagtgtgcttgtatgactacgtgtgttgtgtgcctcagtgcctcagttcatgtggcacagacctgtgtctgtgagagtccacatgtgtgctcctctatgtgcagtctaaaattttggatctgtttctgtcaagctgtttccatgcacctctgtgctacgcagctctctgtatctctgcctgcaggcaaaagtatgtttgtgtctgggttggt

SEQ ID NO: 97427 - DNA, 387 bp, Homo sapiens
atgccacagcattccagcctgggtgacagagcaagaccctgtctcaaaaaaaataataataaaattaaagaacacatgatgctgactatgtacttggtgagggaaattgcatggagtggaggatgggagtcaggcagtgggacaaacgcaaggggctacagtgacctgagcaggatttttggaggggcctggagtttgaaccgggtctggaagggtgagaaaggtccaactatgcaaacaacagttgaccatgtagagcagggaagctgcttagacacatggatgtgaaaataagaatgaccagttatggagaaaaccaggaggcctgcctgtccaagtcagaagccctgtgtttgggtatagtggggcatgagatcagatagtgaa

SEQ ID NO: 97428 - DNA, 709 bp, Homo sapiens
ggctgtgtggggcgggctcccggccaggcgcggtcgggacgcccgccggtccccaggttcggggcagcgcgcagcgcgggtccgcggcggcttatcctttttcgcgacccggcctggcagcgccgcgctccgcttggagggcactcggcggcagagttccgcgctgggaggggtgaggggaccagccgcctcctctgcggactcagatcgagcaggagagagtgggcgcggagctggggccagcgcagggccgtgggctcctctctgggcacgcatcctttacgccacgggctttcaggggctgaggggcctcgaaccttgccaatcaccagtgctgtgcgccccgcttgctttggggtgcgttaaacgtcaggagagagctgctcagatggggtcaccagacgccttctcccccttttctcggagcccgcgggttgcgcgataagccaacccagccggacgctgcgctcctataaatagagcgcgtgtgcccgcttcgcgctctccgggctgcacgagggacgagaaagttgtgcgcagggactgggggcgggcggccaggcaggagaggaccccgccggaccagccgccctgaacgctgcgcccggcgccctggacctgatcctgcgaatccgcgctttcggtgcgagggacctggctagccgctgcctccctccctacctctgggtgacaccaggtttgggggatt

SEQ ID NO: 97429 - DNA, 388 bp, Homo sapiens
gatccagagagggctccaggtggagtccctttttctgcataaggggctgtgaccgaaggcacagaggggaaaaaaaaaggtggtgggagcctcctctggtttcacctgaagagggaggcggaagggcctgaaaattagattttgtttataaataatagatattataggtatatttacatatttttacataatgatgccaaccacaaacaatggaccataaagcactgacctcagaatgatcaattgcaaaatgtttaaaccctggaagcttttgcttaggagggcggatattctgtgttgatgttattctatagccataaacttccctgaattttctgctaatgtatccaagtccaggcaagtcacttaaactcttcaaatgcagctt

SEQ ID NO: 97430 - DNA, 648 bp, Homo sapiens
cctgggcaacagagagactgtctcaaaaaaaaaagaaagaaaatattaatactgtggaggttatgtgacagtctttaataacaacaaccagttatattactataataagctttccatgaaaacaccaaaaagtactttttgatatcttattaaaaattaagattctgtcatatttcttagaattatatacattataattttatgttttttagaataaactcagcaatactgtacaaggatatcgtaatctatatggaagcacaaaggaacatataaatttaaatccttttgctccatgatcagtcacttcttttcattttaaactttgaattttggacattccacaaaattgttaacctcttgagtgatgtggattgagtaagttgtattacaattgtaaaaacaaatgattcatttcaacttgtattgaacatcttatgtgcaagacactctgcttaacacttgaggggactacagagataaatcagtgaggtcagttctatgggaggggaatcagggacagctacacagaagcagcttaaggatgataaggcttccagtccacagaaagagaggggtgaagatgattccagtataatggaaccatgagaacacacagaggaataaaggtgtgtcacatcagctctt

SEQ ID NO: 97431 - DNA, 556 bp, Homo sapiens
gccaaatgttaaaagtatttttgagcttctcagaggaaaccaatgaactgaagttcaataatctgtggtttgtgttacaatattttgaatccttccggagactgaatgaaagatacatatttaaagtgaatgcagtaagtaggaagaggcactgcttcagcctggtaacatgcagttattgctttgagggtcttgcagaaagaatatgcacattgagtaagtaggagaaggtgtgtattttggaaaaatcaatcaacttagttcaacttgaaggttttcctatctgaaaagggatgtatcaaaagatattttttcttaggaggaaaaaatccacaactcgcaccagagcatttcattgagaattactgttatttacgttttggaatttacattgttaaaaagagagattttggaaaggcaggggtgggactagaattgtggcttgcatgttgcctataaacatagattcctttttttagatgtctgtgtttcttagtggattatgttcttaaaatagaacataccacattactctctggtttggcagggtgtggtg

SEQ ID NO: 97432 - DNA, 483 bp, Homo sapiens
tgtgactcactccaagcggtcacatgaggctgggaggggactctgctctgaggggcggagctaggccctggccccagagtttgccatcagagccgtgtcatgtcagagtgggtgcggtcacacttgaggaatttgtccccatacccagatggagagcagacagcagctgccctgggagctctgccttccaagaacaaaaggtatcctgtttttttgtaagcactaatatattcatttaacagacacagcccctgtgcctggggctcagctagtccctgtcctagttcctcttgtggggggtggtgggttctgcaagtccaggaagagggagcacagagggatgtaggcatagacacagccataggcaaatgtgtcagctcagagcatgtggcaatcacagagtccgcggcctgactcttgacagcaccaggcaagtgaggactttaccgccttctccctagactccaaccccaaggggcagaa

SEQ ID NO: 97433 - DNA, 184 bp, Homo sapiens
gatcgcttgaggccagaccagcctgggcaacacagtgagacatcatctctacaaaaccaaaaagccaaaaaacaaaatgaagactgcccccccaccccataatctgatgcaaatatggctcaacatgttaagacttgacaaagttgggtgggtacatggatagggtattcttatttctttgttt

SEQ ID NO: 97434 - DNA, 703 bp, Homo sapiens
cgatcgaatcgagctctgtaccgatgagtaatctgtgcgtgagcatgggctggtctggagagtccaagatagcttcattcacttatttgataagccttgagggaaatgattagaaggcagggttcagctaggattgtcaacaggaatgccaatgtgtggcttctccagcacaatggcctcaggtagtcagattggcttccctcagaacaaatgtctcaaagtaactaagggaaagctgcttctgaccaagcctcagaagtcacttggaataacttccaccacattttattgttcatgcaagtcttacggccagctcagatttaaagggagagaaactagactgcatttatcttggtagagaaacggcaagatcacattgtataacagcatgtgagatggcaatactattgtgactctctttgaaaaaataccattttccacaccctcacaatctaccctgcccctaagaaagtaaacctggccaggatgtatctgaagagtactgagaaattgcagcagacatctctatcttttgtactttccttatctccctcttttacactctgccttcttccaccttttcactttattttcttacttccctttctttcccccagtcttttagttaactaaactcacaaggacatatcttagtgtgttcctccccatctctcctacacatctgtaaatctttgatccctgg

SEQ ID NO: 97435 - DNA, 290 bp, Homo sapiens
atggaagaaaagggccacaagccaaggactgcaggtggcttctcaatagggcaaggaaacagatgctctcccagaacctcaaaaaagtgaaacagccctgccaacaccttgagtttagtcccctgagatgcttttcagacttctgacttccagaactgtgtgataagttgtgctgtaagaataggaagctcatacaagataagagaggagataaagttgaatcacataaaatgtccaattaaaaagaaataaaaggccaggcgcggtggctcacacctgtaatcccagca

SEQ ID NO: 97436 - DNA, 499 bp, Homo sapiens
cttccttctttcctctttttccttccttgattcctttccttcctcctaccctccctccttttctcctttcattccttcattcgttctttctttgtattatctttatctgtaacttttagttcaaaagcatggactttggaaccagacaacctgaactgaattccaacaaccccacctaacagctgtatatcatatggcaggttatttaccctctctgtgtctcagtttactgatctgtaaaatttgggtaataatagggttaattcttagggtattcttatgattcagtgagttaatatatgtgtaattattgcatagtgagttgtgttggctattattcactcatttatacacttacttattttataatccacacccatatcacattgactgaagacattttaggattcactgtgttagcttttaaatttagaaatgagaaatataaatgcaatgcattaaaaaaattctgtgtacattcaccccataaaaatgtaga

SEQ ID NO: 97437 - DNA, 331 bp, Homo sapiens
ttgagcctgcctaaaggccagatgctatcagaagctgaacagcatctacagaaaccagccgcaaagacagaaacagaacaactggattggtggagagatccgataacaaaaagttgggaaatagatgcggatcctgattcctgtgagaagtagctcaccgtgacaaagctgcctttgcttttatcgctttgcaaaacaaaaaaggggggcatgttggaaacaggcccccaaatctggctataaactggccccaaaactggccataaacaaaatctctgcagcactgtgacatgtttgtgatggccatgatgcccatgctgaaggttgtggg

SEQ ID NO: 97438 - DNA, 104 bp, Homo sapiens
ttcacagccttgggtaggtttaggacaaagggtcccagactctgcctgccaagaagatgccttgagaatgtcttctgcgggtgctactgacggcaaacacctac

SEQ ID NO: 97439 - DNA, 861 bp, Homo sapiens
ccacccacctcggcctcccaaagtgctgggattacaggcgtgagccaccgcgcctggccttgaatctgtgaatatttctataggctaaattcttagaagtggaattgctgaagtaaagggtatgtacatttcaaattttaatagctcttaccaaattgtgctctaaccagttattatcaagagcctataagaatactgatttctcacactctcaacaactaagtattgtcattaaaaaccattgccagagttagaaagagtaaatctgagattaataattagaagttacaggaggtggatttgggcatatgcatgaaaaaactttctaatgattactgcttctaaggaatggaagagatgttcgaagggtgttcagttctccatcactaagagcagcaactaacttgtgtgatttatagtttagggagttctttgacataaatgatctaatttatcttcatgaaaattcaagaataagtattaatatctttttttataaatgagaaaatggaggctcagtctcagtgtcactcaataagaggtgaaattaggacacaattccaggtttctggactctgaatcttttctctttccattgtgctatgcagagattaaaataattatccaatagattgctgtgaagttgaatgttgatttaattaagatactttccaacaccaaacttctttgattttgtgctagttcaataaagtagtggtttggagaagggaaaggagaggtgatgaagtcccaataatgtggtggcaatagtgatacaggacaagagaaaacaaatataaggaacatagagagcaaagagtctaagataatgctgggattctgagcatgggtcactagtag

SEQ ID NO: 97440 - DNA, 818 bp, Homo sapiens
agcggaagtgacggttattcctcctgcgcgggagctttggggacgcacttctggatgcctaggcctcttccgtttgcctctgggactggcgatactcgagatgtcttgaggccttccagaccttgctccacctccaccaccaggtctccagtcctgagccacatgctgccatttttgtctcagaagcacccctcttccaggtggaagattgaaggtctgaagagtgggaagtcccaggaacaggcaattccaggaagatatgaggaaaatcaagaaagagaaggaaactgaagctagtgggaagtgcttcaagttggagatgatgctgagatggccaaaaagtgagaggtggaaaacatttggagtgagttaaggagagaacgcgaggcaaggaagtgaagctgagtgagttggggagtggggtgcaggggcctttggccaccccaggctctttctatgtgaacattctgagactgattctgatttttttcccctcccaaattgctctcttttcctttcttcacctacttactccctggtcatccttcctttgggtcagtgaagttgctgattctttagggaacacttctctgattgctgaagctaatagtctctccctgcggttgccggttgtttccaatagttgactagttttcttccccagcacttacgagtacacagccagtcactctggttgctcactgtcttccttcttccttgactgtcagctcacaggaatgcagggcccttacttgttttactcaccactgcatcccaaggatatagcagagtgcctggcacacggtaggtgctgaata

SEQ ID NO: 97441 - DNA, 260 bp, Homo sapiens
  misc_feature (40)..(41): n is a, c, g, or t
ggcgcgaggggggaggggggaggagaagaaaaaaaaaaannttggccgcaactggctgtatatttgtattgggattcttattatactttaagttttagggtgcatgtgcacaatgtgcaggggtgtgacgtatgtatacatcggccatgttggtgtgctgcacccattaactcgtcatttagcattaggtatatctcctaatgctatccctcccccctccccccaccccacaacagtccccagagtgtgatgttcccctt

SEQ ID NO: 97442 - DNA, 625 bp, Homo sapiens
atcctgaggcctccagcctagtgaggactgtgccaggtgctggggcctctgtggtgtgagaaactgcagattcgacaacacttgctggtgcacactttgcaggaacctggcccagtgcctggtcctcactgtcctaaattctcaaggctctgggatggaggtggtcacctccattttaggggtatgggatggaggctctggatggcacttgttagcccaaggcccccagcagcttcagaacctgtgtctactgcgattccagagcccagacccttgaccatcacaaccgcccccttccgcccccaggttggggtctagggggacaaaggctgttccgaagtcctctaggtgttagtcattggcttggagacgctggactccctgcctagtggggtgtactgtccacgaggactcctacacgcagggctgctggctggttcaggggaaccccagcatagtgggagaagcacaagtggctcggaagttgagtgctgagatccatgcaacccccaaggaggcctcactcacccagcatcagggagagcaaggcaggtgtggagttcgagcagtcacacctccagtgtcagtggccctgtcccaggagcccagagctgtcaccttacag

SEQ ID NO: 97443 - DNA, 262 bp, Homo sapiens
ggagagctggctagaacgtcgctggtcgatagaggggcggggattgaacgcggcggggaggtaagggtgcggggatagaactcggggatcggggagaggaaggggtgtgaataacaaaacgggattgaaaaccaggagaggggtggggcgcagtggtttacgcctgtaatcccagcactttgggaagccgaggcggttggaccgcttgagctcgggaattcaagaccagcccgggcaacacagcaagacccagtctctacaa

SEQ ID NO: 97444 - DNA, 814 bp, Homo sapiens
atcagccagctcacaaagaactttagctgcaggatgttctacctccagtaacttcaggatggtgcaccaccgttagtaatggatacatcaccaatatcatccaccaacattttaaccaagccaactggaccaagagaactttttacagtattggcaatcaaagctgcagccataacgttctgggagcagatcgcctccccagtgctgcggtccccaaacacggacaaaggcctctccattttcacggcagcggtacacgttgaattctgctcacaccgcgggcaaccagtatcgcagcccctcggctgactggcgaccacagcggtggctgcgacagcgtggagcgaacccgagcgattctccaagaggtgctcaacccaagtctattttcaaataacactatactacttcacagtcaaaagacaccgaaggtcgtcgacacagcatccaaaaatgcttcctggggaagatggaccaagacgctgccgcgacaggctccaagaggaagagtggtagcaggctataacacagaggataatcttgtctccaaaagagccattgccagggccattgtcctgaaaacgcacaaaatgcagcatgtctgaactggaagaacgtttagagctttttcagtccaacttctcagattggaagtggaacctcagacaagtgtttgggccaataattcaacgcagtgtagcagataaaggacacgaaccgaggtttccagtcctcggtcttgtgattccactaaactactcctaattgaagaagagatggagagattataaaggattcatctgctgctttacat

SEQ ID NO: 97445 - DNA, 281 bp, Homo sapiens
tccctttcccctacccaggaggtcacgatgagattggggatcgcaaagccaatgctgctcttgcccacaacccatcagagtcctctcttgcaggctttgctttggcatagggagggtgcctgcttattaagcatccagatgagcaaactctgccactgcagttctccacccagcagctgggagcctgacagcaaccagatggaaccaggctgggcaggaatagggaggggcaattccctacaaggctggcccagaagacatggctgcagaagactgctggc

SEQ ID NO: 97446 - DNA, 719 bp, Homo sapiens
agcgccgcgtgcagccccggttcccgctggcgcctctccctccacacctccccgcaagctgagggagccggctccggccttggccagcccataaaggggctcccacagtgcagcggtgggctgaagggctcctcaagtgccgccaaagtgggagcccaggcagaggaggcaccgagagcgagcgagggctctgaggactgccagcacgctgtcacctctcaatagcaagaggggacagataaattccttggtagaacgggacagtgccgggtaaaacccaaacttcaagccacagacagtctgaaacctgaaaactgacctaccagttttgggtggagcccgtcaccggagtaagaacttctttacttcctggatgccttttagccaatcaaatggtgctttttccagacctgcccaaggaccaatcagcatgcactcctccattctgagcacatataaaccctggactcagcctcacaggtggctgctacctgctttccggcctcctctcccacggagggctgcccactttgggtcccctcttcttgtccagagattttctgttactcaatagaattattcttggccaggcgtggtggctcacgactgtaatctcagtattttgggaggccgaggtgggcggatcacttcaggtcaggagttcgagaccagcctgaccaacatggcgaaaccccgcctctgctaaaaataataataat

SEQ ID NO: 97447 - DNA, 777 bp, Homo sapiens
  misc_feature (71)..(71): n is a, c, g, or t
agcgggcttttgcgtcaggcttctgcctgagctcggttagggcctcaccgacctgcttccacccctcaggnaggcctcagtgattcggccacagcctcagcctccgtcgctctgtgacctgcgggtattggatgattcgtagctaagactctacgacatccctgaagccgggaaatggtgtgtgttctcattttacccaagatctttggccagtgcagggcatagaagattcattccacaaacttatactgagaagatatgagaaatgtggacagaagaatttacaattaaggaaaggctctaaaagtgtgaataagtgtaaggtgcagaaaggaggttataatggactttaccaatgcttatcaactacccagagcaaaataattcagtgtaatacatctgtcaaagtttttcataaattttcaaattcaaacaacataagacatactggagagaaatcatttaaatgtaaaaaatgtggcagatcatttcgcaagttcctccaactaacttaacataagggaatacatgctggagagataccctacaaataaatgtgaagaatgtggcaaagcctttaataggtccacaagcattactaaatatacagaaaattcatgctggagagaaacccctcatgtgaagaacgtgtcagaatctttacctcatcctcaagctttgacaaacataagagaattcatactggagagaaaccctacacgtgaagaatgtggcaaagccttgagacaatccacagttctgaatgaacataagaaa

SEQ ID NO: 97448 - DNA, 362 bp, Homo sapiens
gttatctatttaggaggtgattagatataagaataaggtgcaagtttctcttgaaacctagagaaatttcagaaagaaatgggacaagatttgaataacagattcaataaagatgatgaacaaggagtcaaatataattctaatatttttagcttataaccttggtcatgcagggtgaaaaaacatatactgcccattcttataccggatactgtaaagttgacaacaaaattaacatctgtaaatgggatgaaaaaagttgaacgacttaaattcaaaagctgaaaatttaccctcttggaatcatgtaactatgtaaaatatgaagtgaagtataaaaatgttgccatcaaattaatatg

SEQ ID NO: 97449 - DNA, 538 bp, Homo sapiens
aggtccttctccagctctccttctggcttcatcctgtcttccacggctctcctgtcccacctattctccctgccggtgcccaagttttagccttcactgccttcccctagaacacgccagggatattgcattctgtcctcactgtcttgaggatcttcctccccggctcatcactccccatgggcagctgccagggtaggcgctgtcaccttctgttgacaacagtcagtagctcctaaggactaaaactgttcagcccagcattcagctctttggaggagtccatctgtcccccagcacatccaggagtaaggattccgactggtccactcctcatcctggtgtcttcagcttctctgctgccatgttctttgctgggatggctgcttcccaactccacctccagaatcaaggatattcctccaagcccagctcgaatgcttgatctgcctggagccttcctggtcatccttgggtgacctggagctggtgctgttagagcacttctgctctgccctgatgtgcagttgttgtgaat

SEQ ID NO: 97450 - DNA, 225 bp, Homo sapiens
cccaggagtttgagactagcccaggcaacagagtgagatcttgtatctacaaaaaatttaaaattagctggacatgatggctcatgcctataatcctagctactagcgaggctgaggtgggaaggtcacttgagtccaggagtttgagacggcagtgagccacgattgtgccacagtactccagcccaggcacagagtgaggctgtctcaaaaaaaaagaaaaga

SEQ ID NO: 97451 - DNA, 327 bp, Homo sapiens
aatactgatgagcatttaaacagcttccagtttggagctattgtgaatatcttgtaccgcttataagcattcttgttcatgattttttgttatccttcctttagggtatatccataaaaagtgaaattgacacgtcactgaataggcaaatgttcagcttttacaggtacgaccagttttccaaagtggttatactaatttatattccctccagcagtatgtgagagttctctttgctccatatcttcaatggtatttgttgattcccatctttatcgttttagccatgctgtgcaatccacaaatgaaagttagtttagtgctttg

SEQ ID NO: 97452 - DNA, 504 bp, Homo sapiens
tagaccctgctgacctccaggctcagcagaggggccaaggctgggcagaaatccttttccctgtctctatcaacacctctctgtgatagctgttcctggagttccccgccctcaggccttggcatctagcttatttgagaaataagagacatgaggcataaacttggtcaacttcttggcccctacgccacaggtgtctgtatctgtccccatcctgactccaccctccaggctctggggatggcccaccttggtcccaccaaaggctgctcccttctcctgtgctctggaccccaggtccttgggggctccaccatccctacttctctcttcaacctcttcctctctcctggctcctcccagcagcccgtaagtgtcgccatcttagccagatgcacaggcattaataactcctgcaatgttctctctcactctagccaccctaccttctctctctgacaggggtgagtctctactgcacttccgcttcttcaccccccagca

SEQ ID NO: 97453 - DNA, 729 bp, Homo sapiens
taggagtatataaagtataattgtttccaaatataagctattataaatattgacatcttgcagtatacccagtattttaattatgaaagttaaaattatataaacaacatatatgtggtagtattttctcttacctttattataaattgatcaatataaaaataatggctaaatagattatagcctcaaagacagtaaatgataatttcctttccctagaaattgaaatagtccagtataaaatttgcttttgttaaaagcttaaaatttaggaatataaaatatatttactgtcatgtggaggatgtaatagcatcctgattcattacttgagctttgtccaaagacttttatgtcttcaaatatactctgtgatattttactttctctggttatgtataaagctaatcaagaagcgaatataatagctgctactttaggataaactaaagataggaaaataattatattttatatagaatgtatcagctatcctttaaatgcctatagtggtatcaaaactaacacatgctaatttagctaggtatcagcaataggctggcaattagtaagggtgctttgaagcaatcactgaagctacaacataaatctgtggcagacagcacaaactacattcttatgttgttaatcactcttcttaattttcagtgccagaaagaatggtccttttcaggctatctattgctgcataactaatcaccctgagaa

SEQ ID NO: 97454 - DNA, 439 bp, Homo sapiens
attgtaaaatgcgggagttggactggaaacaacacatgcaaccctcctctctcccccagggctgatgatgagtgctgctggcttgggcttggtgccttgaggcatcttcttagtccccacagagatcctgggaggctggtggtgttgtcagctagtttcacagaggtggaaaccaatgctcggaggagttaaagtcctgtttagtgtctccgggtctgatgactgtggccagtaaagggacaggtggtcctattttgaccccctgccgtcactgctgtgtctgcccctgccaaatggtgggcaggtggcaggaagcgcaggctgccttgtggagctgagcctggtctgagcagtgcacccctggctagttataaactggggccccctgtttgtgttcagcctggaaggagacaccacgtggtttccagtggaatgggcg

SEQ ID NO: 97455 - DNA, 377 bp, Homo sapiens
ggggctatctacctcccagtggccatcctgtgcccctaccctgcctcacccggctcacagggccccaggctttcccagctattagctccgccagccacctgaacaggtgccctccctcggggtcctaaactgtcttctttctggttgggagctgggactgttctgtgttctccccacagcccctagcccagccaggtgggcctagggtggctctgttggcagcacccacacagcccccagggtcccaggcctctcagctcccttgcaaggagtgcactatcgcccacatttggcaggccaggacgcagaggcccagagaggtgggctggggtctaagtccaggcaggctggctatagagctgggaagggtagctaag

SEQ ID NO: 97456 - DNA, 1184 bp, Homo sapiens
aactgttaactgaaggtgactcagggtaactaattctggatctttgggtgcacagcctctcactggagtctgagaggaggaggtggagactatcagtgcacggcccgcaaccaggaaggactcccagactaacgccaaaggtgtgttgggctcagctgctccactgtggaaaaggaaagccctggccctgtggcaggagaggattgttctagtcaagtgtggcgttgcacggacaggcggtgccgagtgtttgggtgcagacacaggcagctgctgccctccacttcctgctcttgcaagtcacagatgattccagtacaatgtgggaggtcctccttacaggggcacttgcaacaggaaggcagagagtttcgtcaattcaggtacaggtctgtctgggagacctggccctgtggaggcaggaacaccgtgcaggggcatggcagcgcctgtctttgctatcacatcatttgccttttccttgtaggacccaaagatctatgtccaaaacttagtccagaaacatctgcattcctgtttaaacttcagctcagtttcttaaccaagaaccacgtcaaccctccagggttgtggtttgtatttttgcctttaagcattatctcctttccaccaagaagcctacttaggtttaacacatgaaagcagtgtctaaaaattagatcggtcctaaattggaatgggatgtcttccttgcatgtcccataccagggaatttttttaacacacagtgtagagcctttgccagagatgttgaaagggagattaaaggcttgagggatgaatttgatcatcattcttaaagtcccttccaatcctgtgattctctgattccctgagtctcgtttattattggacatgcctagcccatcaccagtgacctgcccgcatattgctggcttcccttggataacggagagcctatcaccacatgcctttgttgtcttccatcatatcaagtgagttgctttctggactttttccatctagagcctgctaggtttggttttgagaaaagatggtgaagtttcttttcatgagtttgtagggcaaaaaaaattctttttaaagatggtaagggtggaaattaatcatggtaccatctcattaaaaatagatacctcaaaatgtttacctttacaagtcaagaagagtatctgactttc

SEQ ID NO: 97457 - DNA, 1129 bp, Homo sapiens
aactgttaactgaaggtgactcagggtaactaattctggatctttgggtgcacagcctctcactggagtctgagaggaggaggtggagactatcagtgcacggcccgcaaccaggaaggactcccagactaacgccaaaggtgtgttgggctcagctgctccactgtggaaaaggaaagccctggccctgtggcaggagaggattgttctagtcaagtgtggcgttgcacggacaggcggtgccgagtgtttgggtgcagacacaggcagctgctgccctccacttcctgctcttgcaagtcacagatgattccagtacaatgtgggaggtcctccttacaggggcacttgcaacaggaaggcagagagtttcgtcaattcaggtacaggtctgtctgggagacctggccctgtggaggcaggaacaccgtgcaggggcatggcagcgcctgtctttgctatcacatcatttgccttttccttgtaggacccaaagatctatgtccaaaacttagtccagaaacatctgcattcctgtttaaacttcagctcagtttcttaaccaagaaccacgtcaaccctccagggttgtggtttgtatttttgcctttaagcattatctcctttccaccaagaagcctacttaggtttaacacatgaaagcagtgtctaaaggaatttttttaacacacagtgtagagcctttgccagagatgttgaaagggagattaaaggcttgagggatgaatttgatcatcattcttaaagtcccttccaatcctgtgattctctgattccctgagtctcgtttattattggacatgcctagcccatcaccagtgacctgcccgcatattgctggcttcccttggataacggagagcctatcaccacatgcctttgttgtcttccatcatatcaagtgagttgctttctggactttttccatctagagcctgctaggtttggttttgagaaaagatggtgaagtttcttttcatgagtttgtagggcaaaaaaaattctttttaaagatggtaagggtggaaattaatcatggtaccatctcattaaaaatagatacctcaaaatgtttacctttacaagtcaagaagagtatctgactttc

SEQ ID NO: 97458 - DNA, 313 bp, Homo sapiens
aatgttgtcatggatacctctgcatttctaaatggtgaaaagcttctatgacacatgatggaaaaaaaaagccccatcgtgattttcccactgcacatctattagaatgactaaaagtaacaccaaacccaaacacccagacaatgcgaaatgctggcacagatgtggagcaactggaacccccatacgttactgatgggaatgcaaaatgatacagccactttggaaaagagtttggctgtttctgtttttctttttttggaaatggtgtctccttctgtcgcccaggctggagtgcagtggcctgatctca

SEQ ID NO: 97459 - DNA, 339 bp, Homo sapiens
ctttgcctgttcatccctccctccccatagcccctgaaaaccactgatctttttcactgtctctgtagttttgtctcatagtttttacgttcttccaaaatgtcatatagtcggaatcatacagtatgtagccttttcatactggcttctttcactcagtattatgcatttatgcatttccttcgtgtcttttcatggttctttttattttttaaagcattgagtaatattccattgtctggatgtaccacagtttatccattcacctacgggaggatatctcagttgctttcaaattttggcaattatgaataaagctgctgtaaacatccatgtgca

SEQ ID NO: 97460 - DNA, 178 bp, Homo sapiens
caacacaggatcgagccggtaccccctcaacctgtgcctctgtctcccctgggagatgcttagaaaggcaagttcatgggctccccccaccaaaccaatgaatcggatctctatggttaggcccagaatctgtgatttaacaagctctctagatgattcttacgcacacgcaagttag

SEQ ID NO: 97461 - DNA, 772 bp, Homo sapiens
ggaactttggcttttagtttcaaatttatctttctagccattttatttaagacgtttatacaagaagaaatacataaagaatgaggtaaatgacaaattagcaatgtaattgttatcaactagtggaggcacttttagcaggcaaattactcattattatggtcaattattttggcaaataattaaagaaaatgaaaaagaagaccaccagactatgaatgactttgcctttaactgatgctgatagaatttgttttaaaattttttcactattaggaagtagcctggttttgactaaactttttaaaaagaaaaaaaagtttgtttgaaataattacagattcacatgaacttgcaaagatagtacagagaggtcctgggtacctgtcacccagtttccccaaatgactacatcttatgtaactgtagtatattttcatagcccagaaattgatattggtacaatgtgtgtatatagttctgtgacattttatcacattatggattcatgtaaccacctccacaatgatgatacagaaatatttcaccataagagacataaattacagaactcaagaggagggggaaggaaagaaaatttgttgtattgacacatattttgcttaccatgttctttcttccttcctgatgttccaagataccctcttttatcattttcttttggtttagataacttcttttaactaatagggtaggtatgctggtgacaaaatcttagttttcctttatctgagaatgctttaatctcccc

SEQ ID NO: 97462 - DNA, 1512 bp, Homo sapiens
  misc_feature (1)..(1): n is a, c, g, or t
  misc_feature (4)..(5): n is a, c, g, or t
ncannagatgatgtcactgctctgttcaggatcttccagtggcttctcaccacactcagagtaaagagcaacactgcaaaggctgcctaggccctgtgagatctgcttccccctcccgccacctgacttcatttctatcgccaccactccctccaacccactccagccacgcatctttgctctcccctgaatatgccaagcaggctttgccttagggcatctgcacttgctctttcctctgtttggaatactcttgcctcagccacacaaagagcatgtttcctggtttccttaaggtttctgattaaaaatgtcagcttgtgaatgaaccctttctgccaacttatttcaaatagtaatgctgccattgctgggatcccatttccttctcacctggctttactgctccccctaacacgagcatttgatatgagagatgcttacttgtttattggttgattatctgtctccctcctccactctgctagaacataagctctatgtggatagggactatgtctgttgtgatcactcttgtattcctagaacctagaacagtgtctcatacataacagatgctcaataaatatttgttgaattgcatgttctccatgttcatcaggaaagttttcaagcctctcagatagggctgctggatttgattgtacaggggtgcactgcactctaggggtgcctttctcatcacagtccatgtgattgacaccccctggagttgtgcagtggacaacctgtacagacatgtgctattgccctggtgtcagtatctcagtagatttcaaaatcagggagttctgtgtaggaatttcaagactctggaagtataatacaacattgacaaattttcaagtaaataatttgatttcctcttcagggtaattcaagcagcatatgatgcagaaactactttttttctaccctccttgtctgtctaaatttcaaagatgtcaagtgtaagttgctcatttacctatgggatgctgtctgtaatgtagctgatggcagtatgtaatttgccaagaccttaagttcatgttcttaaattgctgctgggctccttaatagcagtgaattctttgcagaaattgtttgagtattttctaagttattaattttggcctgatttgcaaatataatctcagacaaattgtttattatcaatagtaatcattgtagtaacatagagcctactatatgccaggtacttttcgtgcattatctattccaataactctgtcaggtaaacatgattaagtcacccttatagatgtggatacaggttcaaaaatttaagtaactcacttgtgactaccaaactcatgaatggtggagaaggggcctcactccaggtaagtgtggctcccagccagcactatccattcccttctcgtaactgctcttactgaataaatcactgatgtggttaatttcaaaattcttaatagcttaataatattcatatgtaacaagattagcatgttgaggtccaaaaaa

SEQ ID NO: 97463 - DNA, 4505 bp, Homo sapiens
  misc_feature (1638)..(1638): n is a, c, g, or t
gccagggaaaggccttatcgctgtgtgtgtgtttcagtctacgtggattaaacattacttcgctccgtctgcctggattaaacgtgcactttgcagtcctcacttctccgtaccagtgatctggggatcgctacggaccttaaaatacccatagccccttcgcccctgcaacaggcacttctccccacgtttgatgtgtgaataattacattgactgagaaagaaacccagaagaggaagaagaggaaggaaaaggagtcagtgatggctactcaggggcatttgacattcaaggatgtagccatagaattctctcaggaggagtggaaatgcctggagcctgtgcagaaagctttgtacaaggatgtgatgttggagaactataggaacctggtcttcctaggtatctctcctaaatgtgtgatcaaggaattaccaccaacagagaacagtaatacaggagaaaggttccaaacagtggcactggaaagacatcaaagctatgatattgaaaatttatacttcagggaaatacagaaacatctacatgaccttgaatttcaatggaaagatggtgaaacaaatgataaagaagtgccagtgccccatgaaaacaatcttactggtaaaagagatcaacatagtcaaggggatgtagaaaacaatcatattgaaaaccagcttacatcaaactttgagtcacgtctggctgaactgcagaaagttcaaactgaagggagactttatgaatgtaatgaaacggagaagacaggtaataatggttgtttagtttctccacacattagggaaaaaacgtatgtatgtaatgaatgtggcaaagcctttaaagcgtcttccagccttattaatcatcagaggatacatactacagagaaaccttacaaatgcaatgagtgtggcaaagcctttcatcgggcctcactactaactgtacacaaggtagtccatacaagagggaaatcatatcaatgtgatgtatgtggcaagatcttcagaaaaaattcatattttgtaagacaccaaaggagtcacactggacagaaaccctacatatgtaatgaatgtggcaagtcctttagtaaaagttcccaccttgcagttcatcagagaattcataccggtgaaaaaccttacaaatgtaatctgtgtgggaaatcctttagtcagcgtgtccatcttagacttcatcagacagttcatactggagagagacccttcaaatgtaatgagtgtggcaaaacctttaaacggagctcaaacctcactgtacatcaggtaatccatgcaggaaagaaaccatataaatgtgatgtatgtggcaaggcattcagacatagatcaaatcttgtatgtcaccggagaatccacagtggagagaaacaatacaaatgcaatgaatgtggcaaggtcttcagtaaacgttcaagtcttgcagtgcatcgacgaattcacactgtagagaaaccttgcaaatgcaatgaatgtggcaaggtcttcagtaaacgttcaagtcttgcagtgcatcagagaattcatactggacagaaaacttacaaatgcaataaatgtggcaaggtgtacagtaagcattcacatcttgcagtgcattggagaatncataccggcgagaaagcttataaatgcaatgaatgtggcaaagttttcagcatacattcacgacttgcagctcatcagagaattcatactggagagaaaccttacaaatgcaatgaatgtggcaaggtcttcagtcaacattcacgtcttgcagtgcatcggagaattcatactggagagaaaccttacaaatgcaaagaatgtggcaaggtcttcagtgaccgttcagcttttgcaaggcatcggagaattcatactggagagaagccttacaaatgcaaagaatgtggcaaggtcttcagtcaatgttcacgtcttacagtgcatctgagaattcatagtggagagaaaccttacaaatgcaatgaatgcggcaaggtctacagtcagtattcacatcttgtagggcatcgaagagttcatactggagagaaaccatacaaatgtcatgaatgtggcaaagcctttaatcagggctccacactcaatagacatcagagaattcataccggagagaaaccttacaaatgcaatcagtgtgggaattcctttagtcagcgtgtccatcttagacttcatcagactgttcatactggagacagaccttacaaatgtaatgagtgtggcaaaacctttaaacggagctcaaacctcactgcacatcagataattcatgcaggaaagaaaccatataaatgtgatgaatgtggcaaggtattcaggcatagttcacatcttgtaagtcaccagagaatccacactggagagaaaagatacaaatgtattgaatgtggcaaagcctttgggcggttgttttccctcagcaaacaccaaagaattcattctggcaaaaaaccttataaatgtaatgagtgtgggaaatcttttatttgtcgctcaggcctcactaaacatcgaataagacatactggagagagccttacaactaaactcaatgtgacaaggccttagacgttgtcctagtttctggaatcaccgaataattcctacttactgatataccttgtatatttaccccttctcttgaaatccctgtggaattgtaatctccagtattggaggtggggcccattgggaggtgattgaatcatggaagtggatttctcaaactgagaaagatgtagcgtcatccccttggtgctgtcctggcaatagtgacttctcttgaggtctggctgtttagaagtgcatagcacttccctgtcgcttgccctcattctcaccatgtgaaataccgacacccgctttgccttccaccatgattttaaccttcctgaggcttccctagagggtgatcagatgccagcaccatgttttcatttaagccttcagaaatatgagccaattaaactcttttctttatacattagccagcctcaggtttttttttgtagcaatgcagttatgacctaatacatttacacatgcagtaaatatacctaagttttaagctagtattcactactcactaggtgtaagaatttgtatatatattcccggatgtatacatcctggagaaaaatcacagaagtgtaatacgtgtggcaagaattctactcaaaagccagaacttgtaaatctaggtaattaaaagggcatagatgtatgaaatgaaatgagggtggcaaaacctttactagagttcaatcactacttgtcataagagagtttatactgaaaggaaatcatataaatgtatgtgtcagaggctttccccaggcattggaactcactaggcatcagaatatacatctttgagaggaaccacagaaatgtaatgtgcatgctaaggtttttacccgaacatcaaaatggaaagagtattcatactagagacaaccttccaaataaatggttttaaaaaatgaaatgttcaaagacctggaatcaacccaaatgcttatcagtgatagactgaataaagaaaatgtggtacatatacaccatgggatactatgcagccatagaaaggaatgagatcatgtccattgcagcgatgtggatggagctggaagccattatcctcaggaaactaacacaggaacagaaaatcaaacagcacatgttctcacttaaaagtggaagctgaacaatgagaacacatatacccagggaggggagcaacacacactggggcctgctgatgggggtgggaagggcagggaagtggagcatcaggacaaatagctaatgcattttgccttaataccaggtgatgggttggtagatgcagcaaaccaccatggcacacattttcctatgtaacaaatttgcaaattgtgcacatgtacccagaacttaaagtgagacaaaaccaatgtccacgcctttgcagtttgattgaacgtataaaggagaaaaatcctgtaagtatgctgaacatgaaaggacctggaagcagtagtgtgtcttcagcctttaccaaattatccctacttgagagaaaacttggaaatgtaatcaatgtggcacaaatttcaaccagttttttaaacagactacacatctttgaaatcatactagggataaccaaatctgcttctccaagattggcctggaatattattacagaataactaccagacaacatttgttaaaactcaggacagtatgtattttaaaggagcaagtgcatgtgtgaaaatggctcattcagtttataaaatattacattaaatttgaggtttctgttttttttcttttgtgacagtcttgctctgttccccatgctgtagtgcagtggcaccagttcacctcactgtaacttccacatcctggtttcaagcaatttgtgcctcagcctcccaagtagctgggattacagtcatgccaccatgtccagataa

SEQ ID NO: 97464 - DNA, 760 bp, Homo sapiens
tgaggaagtgccgaggctgggagcaagggcagtggccccaggagtgtggagagttccatgaccactctgatgtggacagtagggaaaaagaggaacacacccacacatattcacgtgcgtgtatgtatatgtgtatgtaatgtatgtgtgtgtgtatactgctggtatacgcataaaatatcacaggggggtacaccggaaactgacatcatgggtacatctggagaagaagaaccaggtgttacaggatacagggatgaggaaaaggagactgagggatcggggtgtgcatcaactcctagagaagagaagtgggttctctgcaagttctgaaggcccaggggtggaggttaggggtggagcttcttgactcccacagttagagagagggcttctcagcaggatgatgaaggtggcccagcctcattaccagagcgtgggctctggagccagacgatctggttcagactctacctcatcactcagcagttgttgggcaagttcctttgccctgagggtctcagtttccgcaatggcaagatggggtggacagtggcacctccccaatggggttgtcgggaaagtgcttaggactgctcctggcaagtggagagcatgtggtaaatgttagctattattatcctcgtcccttgtgaaggtgacactgttcttgggcagcgggagcccagtgctccagtgccatctggtgcttcgtggccccggctggctccacaccagcaggtgcacagcagtgctgaga

SEQ ID NO: 97465 - DNA, 173 bp, Homo sapiens
taattttaacatgtgtatgaatgagagagtgtgtttgaatacatatatgtatacatgcataagattatatgcatgcactcatttattggtgatatgtggataaggtggacttaagtagacatttcatttccaaatgtgtttagaataaggttaaaagttgagccatagctttt

SEQ ID NO: 97466 - DNA, 727 bp, Homo sapiens
attctgaggtagccttggcgactttcgagactacccaggccgagcacacccagccccctcagacccaggcatttctgcgtcctctggtttggagggaacccagggggctgaggtgaagcaagccaggactgtttctctgactcttctggaagacgacccgctgctcgggccgcctcatcactgcgggccacgagtgcccttcttcattccagacatggtgctttgaacaatttgacttggaggcaagattgcgatatagaaaatgggccactgtggaggagataagtaaatgctttgtcgcttctaagtgacaggggaaactgatcacgattggtatacttctgacatgtaactttctatatctttagaagatcgtcagggaaatagaaaaaaaaatctgaaatctccaagtaggttctactttgtgtggttccaactaaatgaactaaatttgtgtttaaagattgtaagtctacatgtaatggtgaaagctgaaggttttacactgcacagaaatagtgatttccccccgtggagggcaagaagaccggaataggaggggtgggtgggggaatcaatgtgtaggccaaatatttgaaatttcagtgcaatcttcttagtcatcactttcatttctgtcttctagggaaatctgacacagctagaaagcaatggaaaacactaagagttgcatcagatgttgaagaggaactgatattatgggata

SEQ ID NO: 97467 - DNA, 1291 bp, Homo sapiens
agcagcagaactcccggctcagagagttctccaccgctcctcccaggctcacgaggctcacgggctacccagcgccagcggcccaggaggctggaccacagactacgaagctgcaccgtgtggggcccactttttatacaagcgggtggcggtggatccaggcgcacagacgggagtgaggcgtggcggagacgcgtgcacgctgggtctgtgcacttttgctgctgctgctttttttttttttttttttgtggagaagtggaagcccggggtggaacgtggagaactcttaattaaaaaaaaaaaaaaaaaaagtgtgggtgtggggtgggcccctaattatacaagtggcctttgtaagtgttgggaaggtgcggggtggtgtgcgagaacatctaattttttctctatttacgcggggctcttctcatacaattttttcaagaaaaaagggtgtgggatcgagatgtgagcccttgtgaagatattttccaaaatttcaggggggtttcggggcgcagtgggtggtggttccatattaaaacaaaacggggcgcgaaaatatgtagatgtgctcaccagaggggataaaaaataaccttttctgtccactatatagtatagcagaaacttgtggtgaccgcatgtcggctcccgggggaggaaatctacgtttttggagaccccacagggcgcggcgacaccctttttatctagcgggcggggggacaaccacctctcctctgttgtggctgccccaagtaataattcgtcgtcgccagtttttctataaaccaccctcagaaaagagaaaaacctccgggcgctttccctcctttaagagacaccaagcaggttcgtgctcccacctccgccagcggcgggctagtaagaatataacactacattttgtgtcgccctttctaaagagaaacccactagaaaatataatacaaaacaaaaaaaaaaccttctccgccgacacggcgcgggtggagatagatccgccgggggcagccacgaaaaatagagagggcgcggcccgaggaaaaaacgcctccacgacgaagagaggggagcagggcccgccgccgcaggggaaacacaccaccgtctttttgtgtggcgcccctccacttaagaagagagcaaggaggggaaaaacacatctccacaaacacacgtcggggcgggagaagcaacccgcggcgtcacgaataacggggggcgttccgccccgtgggctgacacaaccttggggttaacatccccggctgcacaagtgctcgaa

SEQ ID NO: 97468 - DNA, 744 bp, Homo sapiens
agcagcagaactcccggctcagagagttctccaccgctcctcccaggctcacgaggctcacgggctacccagcgccagcggcccaggaggctggaccacaggtaagacgaggcccaaggcctgcctctgggaactcggccctggcttggctctgccctcctcactcccacaggatctccgtgcccaccaggcctcagtcccgacttctccctgctgcccggcacgggaccctcccccaggacagccacctcccagtgctgaagagccggcccgcctcagagccgcccgccgttcctttttcctatgcatatacttctttgaggatctggcctaaagaggtatagggcatgggaaaacggggcggtcgggtcctccccagcggcacctgcaccagtgcacctgcacctgctccagcagcacctgcctcctgacttgggactccacctgcttcctttctcctcggccgggaaccccggggctttgacccccacatccttggggcagaaaggggccaaatattctagaacaaggaaaacgtggatgtgtgcttttgtgtgggttctggaagtgtctggggaggacgtggtccaggcctctgccctgggttgatctctgcagcccctgagctgggacccaggatgcagagaggagggctggagctgggcggtgctctgtgaccagtctgaccggagttgggggtggacccattacaggaggtggcgggagggacaacctgggctctgg

SEQ ID NO: 97469 - DNA, 368 bp, Homo sapiens
ggaggctcagttacctgttcatctctgtattcccctcagtgctcagccctgtagacagtcgtgacatagttttaactaaatgctgaaatgttgagtagggggaaagaaagagccatcttattattattatagttagcaaaatttttctgtaaagagccaggtagtaaatatttttgtctttatggatggctgtacattctttgtttttgtgtttataaccatttaaaaatgtaaaaagcattcttaccttacaatacaaaaacaggttgaagcacaggtattgcctgggacatgactgcaggttttagggcaggaaggaagaggcagcatgtgccggttcctcagcggccagccctgctttcatttcc

SEQ ID NO: 97470 - DNA, 235 bp, Homo sapiens
atctgaaacgaagccaagcaaagcaacatcaccttctggaaagtgcagaaactgcaatcaagatcaacaaagaaaagcacccttcccatagattcatctctttggcgtttaagtgtttgggcgagtctacaaaactcagattcctcatttaactagatgttccaggtcacagagatattctactaaggcaattttcaaaagaccataaaaccaccacatcaatttatgcttgcag

SEQ ID NO: 97471 - DNA, 391 bp, Homo sapiens
aaacttttcatcctctccctccatgccaaggggcccttgctcccagaagccagcaccccgactggcaggtgacctcccattgcctgtcactcacacggcttcccgcctctccatcctcatgaccatcactcctgcagcacaggctctggttacctctcaatgggactaggtacagcaaaggcctccaaatccatcttttcacctccatcctgcctttcttcaatcccactcctcctctgccacgctgcttgagtaatcttaaaaactctgaccctgtcactcaactgaaaagccatcagtgagtcactttccttgcaaaagaagtcaaaattccatagtctgaaactagaagcatgggctgaacattttgctcaatagactttgtggattt

SEQ ID NO: 97472 - DNA, 625 bp, Homo sapiens
ctctgcctcttcaccatttatccccagcctaacatctggtacatgacaggtagtcaaaatatttgaggaaaaggtagagcaggatgaaagaaatttttgcttatggttatacatataaaggcaacatagcagcacttaaaaacaacagtctctataagccacaggtgcctacgttataggaataacttaatgcagtaatttgacatcctgtcttttactttctttcagacatgaaatcagcttaaatggaagaaaattctaggctggagtcaccaaaccccaggctctgcctgttttatatataaagttttattagaacacagccatgcccattcatttatgtacagtctataggtgtttccaattacaacaagcacagttaccatatggttcccaagcctaaaatattaactacctggccctttcagaaaaggtgcgccaaaccccaccctaaacccaaacaacttgtgttctttagcaagcaaaaacaaactagaaacaagtccactcacattatttctaaattaagaataacagggaattttgtcatctgcaaatggcaaaaatcattgtgttataaaggttaagattttaatactggcttctcagttcaagatgttgacaa

SEQ ID NO: 97473 - DNA, 699 bp, Homo sapiens
cgctaatggaagataccttgcgattgctgtgaaataaatcgcccacttccgacacaattcatactgaaggcagggattaatgaatttgtacattgccattttagaaatgcttgaaatttagacactggcttaatgaaaatactttaatgttggcatctggaacacaaaacatttagttttgatatagttatgaactaatcttatagttaagtctttcttgaatggtcttaaagttgaactttaggaagtgtacacacacatctctcaaattaaggtaaaggatatatcttactatttctgtattccccaaagtaccagcatatagtaaaacctcaaactctgaaattaaacagaaagcaaaaacactatgatataactttaaaattaaggtttatatcactttgagcaaaatatgaaattgcttttaaaatcagtgtgactaggccaggagcagtggctcatgcctgtaatcccagcatttcgcaaggctgacgcgggcagatcacctgaggtcaggagattgagaccagcctggccaacatggtgaacaggcgtggtggtgtgtgcctgtagtcccagctactcaggaggctgaggctggagaattgcttgaacccgggaggcagaggttgcagtgagccgagattgcgccgctgcactccagcctgggcaacagagcaagactctgtctcaaaaaaa

SEQ ID NO: 97474 - DNA, 686 bp, Homo sapiens
aaattaatgacttcaagaacttttcctgtataacagaaattctgtgtagtaaagttgttgggattaatgaatttgtacattgccattttagaaatgcttgaaatttagacactggcttaatgaaaatactttaatgttggcatctggaacacaaaacatttagttttgatatagttatgaactaatcttatagttaagtctttcttgaatggtcttaaagttgaactttaggaagtgtacacacacatctctcaaattaaggtaaaggatatatcttactatttctgtattccccaaagtaccagcatatagtaaaacctcaaactctgaaattaaacagaaagcaaaaacactatgatataactttaaaattaaggtttatatcactttgagcaaaatatgaaattgcttttaaaatcagtgtgactaggccaggagcagtggctcatgcctgtaatcccagcatttcgcaaggctgacgcgggcagatcacctgaggtcaggagattgagaccagcctggccaacatggtgaacaggcgtggtggtgtgtgcctgtagtcccagctactcaggaggctgaggctggagaattgcttgaacccgggaggcagaggttgcagtgagccgagattgcgccgctgcactccagcctgggcaacagagcaagactctgtctcaaaaaaa

SEQ ID NO: 97475 - DNA, 249 bp, Homo sapiens
atacctgaaatgtcaacctgtaccaactgacatgtacatccattaggaggtacctactccggagataacactcaggtgcctatgatactgaagaaaccatctgcttagctcaaagtatggttttcatttaattcatacatcaaactgcaccttggttacactgaccacacaaatattgcaatggtctggcttaacttactgaggctcagtgattcctcacccagttgactggccacaaccacatctaca

SEQ ID NO: 97476 - DNA, 977 bp, Homo sapiens
ggctgcagggttccccttggcctgcaaacaggaacacagggtgtttctcagtggctgcgagaatgctgatgaaaaccccaggatgttgtgtcaccgtggtggccagctgatagtgccaatcatcccactttgccctgagcactcctgcaggggtagaagactccagaaccttctctcaggcccatggcccaagcagcccatggaacttcataacctgagctctccatctccctctctctcctcctctgttctccctccctccttctctccctcaccctcctctgctccctctgcctttaccactgtgggggggtcctctggagggccctgccaccccacctcttcctcgctggtgtctgccttcctggcaccaatcctggccctggagtttgtcctgggcctggtggggaacagtttggccctcttcatcttctgcatccacacgcggccctggacctccaacacggtgttcctggtcagcctggtggccgctgacttcctcctgatcagcaacctgcccctccgcgtggactactacctcctccatgagacctggcgctttggggctgctgcctgcaaagtcaacctcttcatgctgtccaccaaccgcacggccagcgttgtcttcctcacagccatcgcactcaaccgctacctgaaggtggtgcagccccaccacgtgctgagccgtgcttccgtgggggcagctgcccgggtggccgggggactctgggtgggcatcctgctcctcaacgggcacctgctcctgagcaccttctccggccctcctgcctcagctacagggtgggcacgaagccctcggcctcgctccgctggcaccaggcactgtacctgctggagttcttcctgccactggcgctcatcctctttgctattgtgagcattgggctcaccatccggaaccgtggtctgggcgggcaggcaggcccgcagagggccatgcgtgtgctggccat

SEQ ID NO: 97477 - DNA, 266 bp, Homo sapiens
taccagttattcctccctgtttctctcagcatcaccaaaataacaacttccagcaaccccactccagcccaacttcaaactccaattgttaatcttgcattcactactccacaaatactttttacttgtatacaaacttaatgttgattttaccttcattcaatgtttatttagttacctatatattttcttcatatttgtacatgtcagtctcacctgtcttaactagtaggttcctaaaggaaaaaatgaataaacacttgatt

SEQ ID NO: 97478 - DNA, 369 bp, Homo sapiens
agaggtgaaggctggagaggaggtggcgattgcaaccttcaattcaaggtccctgagaaagagggatttggggtaaagagctcatggggcagctctctgtctctgactccagcaggtctggcgctgaggtcttctagacttgtccctgacagtgggcacagcctcccgcagccccctgcagcctcctcggcctcctcccacaccaggctctgctcagcgggccgagggcgggctgggtgcagagagcctggcttaggaagaaacagggcttgaaaacatggtgtttttgttttttgttttgggttggggtatcactgtcacccaggctggagggcagtggtgagaccatgcctcactggagtctggact

SEQ ID NO: 97479 - DNA, 704 bp, Homo sapiens
acagtgggtttctaggataggtctgaaaattgctttcatttgcaacacatttagaaagtagctttatttggatattacagacaatctaaatatatcatcagtttttaaaagtgcctatgtgaagtgatttttaaaaagagcctatgtgaaggggtaatcttgcttgttcttgttactaatttctcatagattgtttttctgcatatataagaacgaaattatttatttactatggttgtacgtgcctcaaataaacaagaatgatatttcctgttttatttacttatgttgggtaaatatgcttattgaatttttaagagaggattttttaccatctccatttttcttgtcattatgttttgtagcttatttgagggtgtctaaatataatttcatattttattggttcaactttcactctgaagaaatccgtatgttagtacattttgaggtatttttcttgttcttgtgttgtttaactatgactcctaactgagtagtcttatatttcaattacaaaatacattttttaagaaagggaatagagcagcaaaaatgataaggaaaatgttaaaagttgtaatatttcctttactcttaacaggattatatatagaacatgctcacttacaaaaataggatgatgaagtttagagcataaggcaggcttcttgtatatacttatgctgtcaaatgttatattg

SEQ ID NO: 97480 - DNA, 793 bp, Homo sapiens
aaaagatgaagtaggatctggaatttcataacttaatacccaaaatgtctaggatataattaaaaattacttttcataccaagaaccaggacaatcacaacttgaattagacaatcaacagatgctgttatggattgaatgtttgtgtctcccccaaatttataagttgaagccctaaccctgcaatgtgatgtttggaggtgggacctttggaaggtaattagatttaggtgaggtcatgagggttaggctcaagagggattaatgtccttagaagaataagagagaccagtactctctctctctaccgtgtgaagacacagctagaaggtgattatctgtaagccagaaaggggaccctcaccaggaaccacgtcgactcattccttgatcttggacttccccagcatccagaattgtgagaaataaatgtatgttgtttaagctgcccagtatatgatattttgttatagcagcctgagaagactgagacagatgctaatactgaaatgactcagaagttgaaatcatctaacaagaattttaaaacaactattataaaattgcttcagcaagcaattatgagcacccttgaagcaaagtctcagcaaggaaacagaagataagaaaaaagaaccaaatggaattatagaactgaacaatataataactaaaactttaaaagtcaccagataggctcagtagcagaacagagatgacagagaaaagaatcagtaaacttaaagacagataaataaaaattacacagtctgaacaacaaagagaagataga

SEQ ID NO: 97481 - DNA, 620 bp, Homo sapiens
tgggtatagactttgtaccaccaacattgctgagtttcagaatatattgtcctccatcagtccgtatacagtctttgacaacaagagttgttttctgaatagtagatttaatttccattctagcagctgtttcttcaagttcttttccatcttttgaccaaacaacatcaggtataggtttgccacggatgtcggcttcaagaacaaaagtctctcctgcatgaacaacgatgacatctttatattttggatccagagaggcatttggtgcatcaatttcatctcttgcagtaatggcaccactactatcagatggttcactaaagtttccagctgcatttcttgcaattactctaaattcatatctttggtcttctacaagtccactcactgtaaattcagtttctaatacgttggtaaagctggctttcatccagcggccatcaggtagatctttcttttctacaatataacctgttattttgctaccaccatcataggcaggtttcttccatttcagtgtgacattgtttcttgtaataacaatggcttcagggcgaccaggtgggtcacatggatcacgagcaacaaagcattctgacactttgctaggcttgcca

SEQ ID NO: 97482 - DNA, 410 bp, Homo sapiens
tgcccaagatgtctgcaaacaggacttccttaggtgagcgagattcaaagctccaaaacagtaagcattgtagacaaactataatcattttattgaggatttactgtgtgcaaagcacaagctcatgtcttaaattactttcagatgccactagtaattttgataataactacctaccaatgccaaatgctcaaactagtacccaactagttcccctaacattccagtaatccatcctcaatctcattacctcttacccactggactattttctaggaacctcttactcatccccaagttggctgagacaccaccataatttttttactttccaagacacaacttggaacaccctagaagcctgctcaaaaaccttcaatgaaccctcagagcctgcttaaaaaacagct

SEQ ID NO: 97483 - DNA, 519 bp, Homo sapiens
tttatctgtcactcataagtctgtgggtcagctgcaactcaggtgcatctccagactccaggtttctagttgcccatttggttttctcagcatcccacctgaaagcccaaccacttcctgaagaagtcccttcccatgggggaggtaagaagctccaagatgagggagaaacagtacgtgatgattcttaaggcttcagccccgcatttataccctgtccactctgctcacattccattggccaaggcaagtatcacagccaggtccagagtaaatcggatggagaagtgagcttcacccacagaaaaccaccagaaacatagaagaatcatagacaaataatactattcaccatgctaatcatcaaatgtgtgcctagcacagtgcctagcatgcagtcctctctcaattagaattttttgaaagacagaatgagaatatttaagcaaagctctgatcgaggtgtcttgctagtgttgtgggggcagatcagtcaagttatagcatactctctgccct

SEQ ID NO: 97484 - DNA, 857 bp, Homo sapiens
atgccaggtagatggcactggggatttcagactccagaactgaaaacaagctgagcatctggtggagccatccgctgatccaaaaggctgctctctacagatgaatgggtgttaagacagctgtccttcctagaccatgagcagctgctggccagggttgctgcctgccaaaagggtggagttgggagaaaccaggagtcaaccacagctaccacagtctaatgagttagtttgataccagggacatattaggaggacttgctgctgccacgagcttgcacatgactcttctcaactgcagaggaaaaccagtatgatgccaggctagaagcagcagcatcaccatcagcctggtcacattctacttatagcccactccatctgacagcataaagctagacctgccctgggctgctggtagcataaagccagacctgccctgggctgccaaaaaagtcttcctgaaagccatgaatgacatgcaaaggagaaatatgaaacatctaagtgaatatagaggagagggcatttctgatagacactcatgagtcaggcccacaggcttaaaacacagtgatacttgtactggtttcttacagctgctgtgacttaaaacaacagacattttttctctcatgattctggaggctgaaagtctgaaatcaatgtgttttcagggccatgctctctctgaagtctgtaaggaagaatcctccttttcctcttccagcttttggtggtttctggcattccttggtttgtgggaacctaaattcagtctctgcctccatcttcattcacatggcctcttccctgggtctctgtgtgtttctcacagtcttcttatgatgtcacca

SEQ ID NO: 97485 - DNA, 197 bp, Homo sapiens
atcatgcagggccttgtaggctaagtgtaagccctttggcttccacactcagaatgaattttggagacatcgcaggttttgagcagaaaagtggcatgctctgacttatactttaaaaagagaactctggcttctatgttgagaataaactttaggagggcagatgtggaaagcaggaagacctgttggaaggctgg

SEQ ID NO: 97486 - DNA, 507 bp, Homo sapiens
taccccctaaggtctcctgctctcaggaggtgatattgccaagagtgaggtggattggagttaggcatagggagggaagtgctgtcccagtcccagcatgagcctctggacagatggaggccacctgctgcaatggggaggacaggagtcaagcagattggggggttggcagcaggcagggggtggtgcagagatcaaaggtttggatggaaaaatgttcggttttaggtgcttctgagatatccaggtaaagaagtgagaagaagagttgtatttatggatctgaagctcagtgagaggtcacaaaatttggaattgtcattgtatttgaaatgaagtggatgagctctccaagaaagagaatttaaagagtgagatggatttgtaaagaattgtgaagtttagaaatagaatatgagaaatgggatatgcagagacaagtggaaatgaggaagagtagccagaaaagatagaaggaaaccaagagggtgtcaaacctggagaact

SEQ ID NO: 97487 - DNA, 666 bp, Homo sapiens
aggcggagcttgcagtgagctgagatcgcgccactgcgacagagcgagactccgtctcaaaaaagagatttgtaagggaccagcctggaagcagggaatcggtcaggatccgagtcaccctggagcctaggcagagatcagcgaaagccctcgctgatgcataggtctggaaggcgtggggctccgggaggctgagcagctggactcggcatgaccagaggtcgtgaggccgttccgcaggcttgggacgctcctgaccctcagaatcaagcgcgggccactgcattagcatgggagaaatggcagagatagggcttgagggagggatgcccgagattaaaggtattaaaggtaaattggtgtcgccgcaaaaccagcgtgggagccaggaaacgagagtttcagtctttcttcgctaattccagagatagctgcatatcacaggaggagaagcgacgcagccatttttcttcgttattatcaaatttggctgctgccggacgccgtagatttgtggctcacccacccttagcccacctctccgcggcttttcactaagtttgaacccgacccctcgccgtagagtgtgtaatttctgtctccgaagctgacgtcaacttctgaacgaaagctaggagcggaagagcgtgcgtggaaatggcgctc

SEQ ID NO: 97488 - DNA, 345 bp, Homo sapiens
cataatactgaatgggaaaagttaaaagcattccctctgagaactggaacaagacaaggatgcccactctcaccgctcctcttcaacatagtactggaagtcctagccatagcaatcagacaagagaaagaaataaagggtatccaaattggtaaaggggaagtcaaactgtcactgtttgctgatgatatgatctttaccttgtaaaccctacggactcctccagaaagctcctagaactgataaaagaattcagcaaagttcctggatacaagattaatgtacacaaatcagtagctcttctattacatcaacaacggccaagcagagaatcaaatcaagaac

SEQ ID NO: 97489 - DNA, 567 bp, Homo sapiens
ctttaatccatgtcaaactaagaaaataaagtcagggaaagatcatcacatttcttgaatgcagaggaatttggggaccaaaacttgaaaggaaataaggaaaggagaactatgcagaaggagaagttgaatatgccttcaaaactgggacatgagagagtctggctctgttgtcgcccaggctggagtgcagtggcgcgtctcggctcaccgcaagcttcgcctcccgggttcatgccattctcctgcctcagcctcctgaatagctgggagtacaggcgcctgccaccacgcctggctaatttttttgtatttttaggagagacagggtttcactgagttagccaggatggtctcaatctcctcacctcatgatctggctgccttggcctcccaaagtgctgggattatagctgtgagccactgcacccggtgtccactgatgatattcttatggagagcctcagatgtgaactatcagcagttcacaacctgcttttgaagaaatgtgttctgaaagaggatctgggtgatccacctaagcatccaaaacaatgaagaactacc

SEQ ID NO: 97490 - DNA, 667 bp, Homo sapiens
accacaagcccttttgcgcccaccatgtcttcacctaagagatcttcaaagcccagtatgtctctggcacccagtggatcctccatgcccactgcggatcccaagcctcctgcctccttgaagtccaccaaatcagcaacacccaacagatccttagtgcccaccaaaccagcgacatcccgtaactcagtcatgagcccaagcagttccaagtccaccaaatcgaccagtacaaaaagagccccttctaaccggcccagcagcaggtcccgagtccgcagcaaagcaagaacacccagcagggtgagcaccgacaccaggaccagcaaagccagcaaggccagcgacgtgagatgccaccagcggaggggcacacacagccggggtaggacacctggcagaaggggaagccgcagctccaagaggtcacccagcagggccagcactcctggcaggataagaactcatggtgccagaccaggcatggccagcagggtgagaactcccacttcacagcaaaaagggagccggggaaagagttacggccggcctagaaccagcaacagggaaaggagtgacagccagcctagaaatctgagcaagaagagttaccgcccaccaggaggctcaggtatagggaggagttccgagctggctgtaactccca

SEQ ID NO: 97491 - DNA, 351 bp, Homo sapiens
cagatggaatctcgctctgtcacccaggctggagtgcaatggcgtgatctcggctcaccgcaacctccgcctcctgggttcaagtgattctcctgcctcagcctcctgagtagctgggattacaggcgcccaccactgcgccaggctaatttttgtattgttagtaaagacagggtttcgccaggttggccaggctggttttgaactcctgacctcagatgaccctcccatctcggcctcccaaagtgctggggttacaggcacaagccactattcctggccggttgattattttcttctattctggggatatttttaaaaatccaacttcttagaaatttgaaatcagaa

SEQ ID NO: 97492 - DNA, 302 bp, Homo sapiens
gaaattacccaatctgaacaaaagagagaaaatatactgaaaaataaaaatgaacaaatcatcagggacttgtgggactatttttaaaagttctaatatttgtaccatcagagtcccaggggagaagaaagacgatatggttgaaaaggtattcaaagaaatgatagcttaaaattttcaaacttggcgaaggacatattcaagaagaacttaagaagttcagcaaactctgaacaggaaaatcccaaagaaatccactccaacatacattataaccaaatttctgaccactaaatataaaa

SEQ ID NO: 97493 - DNA, 424 bp, Homo sapiens
acatataggatggatataggcatgtccacttggctatggtccaggcaggtctggctaacacaagcagaaacaagtggggtcagttggggtttcctaacagccctgccttatctaataagggaagtttctctgatcaaaagaaaataataagaagcaaaggtacaaacatattaagcagtagttagtttagtcaagcttacgattatcagagaattgtaaagaagatccactactggggtaggagaaaggagctgtagcctttttaatgacctagactctaggaaagttagaggaaataaaattcctttttcttctatttgtagaagaaaagtgctatgtcttagtacacagaggaaatttatagatttagatgagagatcttctttccctttatgtgcattgtatcttggcttttcccactatg

SEQ ID NO: 97494 - DNA, 818 bp, Homo sapiens
cccagacggggtggcggccgggcagaggctgcaatctcggcactttgggaggccaaggcaggcggctgctccttgccctcgggccccgcggggccgtccgctcctccagccgctgcctcccgggcggcgctcgccggcgcggcggcaaagactgagacagctccgctgcccgctgaactccatcctcccggcggtcgggcggcggcggctgcggtcggtcgcggcagcggctccgcttcatatctgcagctggggctcgcgggcgtcagcgccgcgactgtcccggctccgcactgccccgcgccgcagcgcagccgcgccaaccaccacccgcggccaccatggccggacgggctccctaagcccaacttttcaagaatagtcagtacaataagatataaatagaaacaacaaaaagttaaaaagcaggagaacgaaattaagagacaagatctcactgtgttgcccagcctggagtgcagtggtgtgatcacagctcactgcagccttgaaatcctggtctcaaataatcctctagccttggcctcccaaagtacaagaattacaggcaatggtcactgcacctggcctggatccacttttaaatttgtcaagaggttatgaccaagaaaatttagaatgatttatcattctaaatatataaaaatattatgtattctcatgcaatgtatcgactctacaaaagagatgccctcccccacagacacacacacactcacactcactcttatctttacttccactaaaacacactcctgtctcaattttaactgtagttggtatctccagtagaaaga

SEQ ID NO: 97495 - DNA, 692 bp, Homo sapiens
accatgttgcccaggctggtctggaattcctggacttaagtgatcctcttgcctcggcctcccaaaagtgctgggattacagatgtgagccacggtgcccagccctgaaaccttttctaaagctctttaaccctgtagcgcattctggctgggcctggaggacaggacatgggaacccagtctcacggcagaggccacatcagtgggtccccacagtccagggggcacttctgggtggctggagagccctgtgccagagccacgtggccatgagcttttctcctctgtgggctcagcacaccccagaagaagtgactgctcctttatgaccctctttatctgccccggagagggtcctggcataatcccagatgctgtggcctcggccctccgggacagcacatggcacctgcatctcccagctgcagctgtagaggcaggagtgatccgaggatgttaatgccaagtccaaattggtgatttgatttttctagtgctaactttgaaatgtagccagtagagtaattatgagtttattgtagtcaatttattatgcagcatttagaacaacatgttttgttgattactgctactgccagattgctggtggcatttatagtccattgttgtattgaaattgatctgccgagcgcctactgcgttcggtaaataataaatcagtctgttatccc

SEQ ID NO: 97496 - DNA, 358 bp, Homo sapiens
cttcacattgcccatcttcttttgcagagtgttatatccaggtgtatgtgcccagctctcctaccagactgttcatctgcctgtggcacggctccttgcacacagtacgtacaaggcttggtaacagaatcccatgttcattgaagggcctagactgatcacattttaaataatgcacaatgttctcacgtctatttaaggaagaaacaactgatttctatcttttaagattgcatttcaagaccatatcaaaggctttgaatctctcaccaagactaacaatgaaaaacaaatttggccaagtgcagtggctcacacctgtaatcccagcatcttggaaggccgaggtgggtggatc

SEQ ID NO: 97497 - DNA, 212 bp, Homo sapiens
cacatacacactctcacacatggtctctcacagacacactcacacctgttctttctgtcacatacacacactctctcacacatgtacacacacacacacacccctctaccactcataaggtggctgttcctcggggtctagcatctgtttgactttctttgttctggaaaggcttcttgtcagcactgtcctttccaagatctgcactgcac

SEQ ID NO: 97498 - DNA, 361 bp, Homo sapiens
ccatgaaaccaggttaaaaccaccaagggaataattatggccaaagaagagaagatgaccaagtactgagccctggggtcctccaagataaggaggtcagaggaggaggagaaagcagccaaaggactgagaaggatgaaacgaggagcctagcgtcctgaagtgaagtgtaggatgtgtatcacgcggaggcacgatcatctgtgccagatggtgctgctggagatcctaaagaggcagttttggtggaatgctagggaaaaatctgctcagagtgagtttaagagataacagaaggagaagaattggcaatagtccttttaagttttgctgtagaggggtggaaagaaaagagtgctag

SEQ ID NO: 97499 - DNA, 497 bp, Homo sapiens
cagcgaggacacaaagtcccagcctcagcagccctcagagaagagcaacttggtattacagcttgtgctatggtaggtgggatagggttgtttcaagagtaggggaggagggagagtagaaaggaagggagggagggaaaacattctcttatccttgggaaacttgcaggatcacttccctcaatgagtttatgcaagcaatctccacctcccactgctccttacaggtcagcgaacccattcagggattaggaagtgacccaaaagcaccggtgtgaggagaggctgcatagcagtggaaacgcttggagagaatgctgcatcctgtttaacttggccttgccaatgccaaaccctttctctgtggatgttttttttagttaaagagcgataacgtcctccttttaatggcctttcctctcacggaatgggctattctctgtacttgtgtacccactctcactgtgtcacttaaactctcctgctttagcctcctc

SEQ ID NO: 97500 - DNA, 103 bp, Homo sapiens
tctcccactggagcaccctgtctcccagggagcaccctgtctcccactggagcaccctgtctcccagggagcaccctgtctcccactcaagcaccctgcctcc

SEQ ID NO: 97501 - DNA, 562 bp, Homo sapiens
aaagctaaatacaatccagttcttgcactcgagaagctcacatctacatgggtatgtgtgtgtgtgtgcatgcacgtgcacgtatgggtatgcatgtgtgtgtgtgtgcagtaaagcagcaagggtgaaaacaagaaaaaggataaaagcaaaacaaagcatgcaatgtgaaaagtgcaagagagaagggagagtgagtctgatgggggctgagggcttgagggtccccttggtgggggttggtggagagtcctctgaatgagcacttctggagctgaaccctcaggagctggcttcaggggctgggagagcctgcagctgggtgagcctctgcactgcctgcctgtaggaccttaggggagttgcttgcatcttttcttgtttcattctcttctctgtaaaacagataatcctaacactgtccacatgaagaggtgttctcaggattaaaccatataatggatgtaaagtatcaaaattgttggtgccacttgatgggggtttcattgttggctggggactgtggcagaagaggggaaagggcacttatggctgagaggct

SEQ ID NO: 97502 - DNA, 340 bp, Homo sapiens
agccaaccagtatgatagtattggattcccagaaggggaagtgcaaacccatggtagtagagaaattatttggagaataaaatcatcaaaatttttcaaattggttaaagacaaaaatctacaaattcaagtaacttaaagaactgcatatagcataaagtcaaagagactcagacctatatgtgttatcatccaactctaaaagccagacaaagagataatctttaaataacaagagattttgggagccgaggcaggcggatcacctgaggtcaggagttcgagaccagcctggctaacatggtgaaaccctatttctactaaaaatagaaaaaattag

SEQ ID NO: 97503 - DNA, 3516 bp, Homo sapiens
tcggaataacccgtgtgttctctgcaccgataagaacctgcctgaatcacatgcaagcgagaaacctgccgttgctttgattggactccataccagctccttcacgagctccctaagcctgcgctacttcacctacgggattctctttggttgtggctgttccttcgcctttcagccatccctcgtcatcctgggccactactttcaacgccgcctgggtctggccaatggtgtggtgtctgctgggagtagcattttctccatgtccttccccttcctcatcagaatgctgggggataagatcaagctggcccaaaccttccaggtgctgagtaccttcatgtttgttcttatgctgctttcactcacctaccggcccctcctgcccagctcccaggacaccccaagcaagagaggtgtccgcaccctgcaccagcgctttctggctcagctcaggaagtacttcaacatgcgagtgttccgccaacgcacttaccgcatctgggccttcggaattgctgctgctgcccttggctactttgttccctatgtacacctgatgaagtatgtggaggaggagttctcagaaatcaaggagacctgggtgctcttggtgtgtattggggctacctcaggccttgggcgtcttgtgtcaggccacatcagtgactccatccctggacttaagaagatctacttgcaggtcctttccttcctgctcctgggcctgatgtccatgatgattcccctgtgccgggacttcgggggccttatcgtcgtctgtcttttcctgggcctttgcgatggcttcttcatcaccatcatggcccccattgcatttgagctggtgggcccaatgcaggcctcacaggccattggctacctcctgggcatgatggccctgccaatgattgctgggccccccattgcaggcctactccgcaactgttttggggactaccatgtggccttctactttgccggtgtgccccccatcatcggggctgtaatcctcttcttcgtccctctgatgcatcaaaggatgttcaagaaagagcagagagattccagcaaggataagatgttggcccctgacccagaccccaatggggagctactgccgggctcccccaaccctgaggaaccaatctaatgcctttcttgccattgtgtgccctttcccagctcttccccttcatcccaccctgctcagcatttacatttttgccaccagcacacttgttcccagacctgcgcacacagcatttcagccacctgacaatctccttggagtcaaagctccaggtgttccaaactcattaactaaattctccccagaatgcttttaaattttccagggcctttctcctcccaggatctgggaaagcttgggaaccacccctggcctttggaacctctccatatactttctaagctctgggggaggaggaggatgggacctcctggacccagcttgttagtcacccactataatcaactgccaaaggtgctactgtgtccccaggagcctaatagggtaggcccaaatctctgtttgctgaggaggtcattgccatccatatttgggagccactgggtggaggggcagggaggcaaaatgagacaagtagccttggttagtcttagagttgctgatgactgtggcttcccaagaactgggtacaagcagtgcccttattgtatggttggttaacagtctgctcccctcttcccttccttctttttttcctctactgacttctctccatactctttcccctctatttctttgtatgactgtcatagacacatgggtgcttgaagaaaggagggacccggaacttgggccaatcagcctcaccttgtcccagtccactcctaacactagcatcagtcccactcatctcaggctgagccacatctcactttttcgctcaagctatataatcctagactggaagagtagaatatcatatagggaagaaaccttaaacaccacagtgttccatgttccagtcactgatttttacaaatcttacagtccaaggcattaacctcaaggccctcccagcaccccattcttgtatacacatggcaaaatgtgaagaaactcctttcatctcagcaggtagaggaggactgatgacacgagctgccatggcgggaggaggggcagtagttattgatatggtgagccccatctctcagttttcatgacaggtctatatttctacctgggccaggccaggaaagagactatttaagaaaaaaaaaatcaattcctagcctggatcccaaaaaggtacaggcagcagttgcacatagggttggaaaatttcttttgggaaggggaagccatcccagcctttaccacccaatgtgtctcccatgctgggcatcctaggccactttgcttagagggcattaaaggtgccatgaaaggtagactctgaaccactttgatccctctgaagtaggtgactgatgcctccttatgcccaggctctggcaacagtcttactgaagaacattcccagtgcccctggctaggggcagagggcactgccaggctgtgttcagttagcacagctcacctcattaggagctcagcctctctcctcactctgcctctttgtgtctctttttctcctctctgagcctttgtctattgtgttcctgtcacccaccctttcatcatctttttgccaggcattcctggctgtcacttggagccaacagtaacttgccaccttaaggcagggtcatccccgggccaggaggatgaggttgtcctgaggggctccaaagaagacaatagttcccactcatgattttccgttacaaacaggcagctggggcatggttggcctccaatgatttcattcaaggccaaagtcctgagccccctccgctggtcccagtccagctcttatcaactccccaaaggaaaacccactggttcttagctctgtgggtaggaaggggccctagaaagggcctagttactatcctgtcagttctaacagtagtggaacaggagaatctgggccctaggagccctgtaactcccaggagagaccactgaaaatactggagcaacaatgcccctgcttccatttctccccacctcactctcaccaagtcaccagagggtggttctgtaggacctcttttgttgcttaagatgcagatggctcttaagaatcaggcagtcgcccacttctctccagatgaagggaagacattcataggtcccaaatctgcccattcagatgtcacataatatggtgggatatcaatttacttcttccacacatgtggttgtgcacatgtgagcttgtgtgcttttggagagaatgttgattggcaaaagcagcacagtattaatatttagagtaggatgcagcctcttatgcaccacagttaaatctagaacgaacaaaatttcagagctcaagacatgggacatttaaatcctcaaggagtttggaacaaaataaacagatctaaaaattt

SEQ ID NO: 97504 - DNA, 4317 bp, Homo sapiens
gggttcagtagtttgggaagggagctgggggaggcagtggcggctggagtaggtaggcgagtaaaaggaggaggaagggctggggagaagagcgaggctgtagcggctgcctgttgagggaggaagaggtggggggtgtggaggagggggaggagagagagatgacatggggagaggaggaggggggttggacgtgggaggaggaggagagggctcgagggaccgtctgtcgcgggacgggctggccagctggggcgcggagcctggaggaggaggcagcggcagcggcagcagcagccctccgagcagcagcagctgcagcagcagaaacaagtaccagccacaaagcggctcctctggcccaagcagccacagtccccccgccgcgatggcgctgcaaagccaggcgagcgaggaagcaaaggggccctggcaggaggcagaccaggaacagcaggagccggtgggtagcccagagccggagtctgagccggagcctgagcccgagcccgagcccgtgccagtgcccccgcccgagccccagccggagccccagcccctaccggaccccgcacccctgccggagctggagttcgagtccgagcgggtgcacgaacccgagcccacgcctacggtagagacccgcggcaccgcgcgcggcttccagcctcccgaaggtggcttcggctgggtggtggtgttcgctgccacctggtgcaacggctccatcttcggcatccataactctgtcgggatcctctactccatgctgctagaggaggaaaaggaaaaaaatcgccaagtggagttccaagcagcatgggtcggagccctcgcgatgggtatgatcttcttctgttctcccattgtgagtatattcactgaccgtttgggctgccgaatcacagcaaccgcgggggctgccgttgctttcattggcctccataccagctccttcaccagctccctaagcctgcgctacttcacctacgggattctctttggttgtggctgttccttcgcctttcagccatccctcgtcatcctgggccactactttcaacgccgcctgggtctggccaatggtgtggtgtctgctgggagtagcattttctccatgtccttccccttcctcatcagaatgctgggggataagatcaagctggcccaaaccttccaggtgctgagtaccttcatgtttgttcttatgctgctttcactcacctaccggcccctcctgcccagctcccaggacaccccaagcaagagaggtgtccgcaccctgcaccagcgctttctggctcagctcaggaagtacttcaacatgcgagtgttccgccaacgcacttaccgcatctgggccttcggaattgctgctgctgcccttggctactttgttccctatgtacacctgatgaagtatgtggaggaggagttctcagaaatcaaggagacctgggtgctcttggtgtgtattggggctacctcaggccttgggcgtcttgtgtcaggccacatcagtgactccatccctggacttaagaagatctacttgcaggtcctttccttcctgctcctgggcctgatgtccatgatgattcccctgtgccgggacttcgggggccttatcgtcgtctgtcttttcctgggcctttgcgatggcttcttcatcaccatcatggcccccattgcatttgagctggtgggcccaatgcaggcctcacaggccattggctacctcctgggcatgatggccctgccaatgattgctgggccccccattgcaggcctactccgcaactgttttggggactaccatgtggccttctactttgccggtgtgccccccatcatcggggctgtaatcctcttcttcgtccctctgatgcatcaaaggatgttcaagaaagagcagagagattccagcaaggataagatgttggcccctgacccagaccccaatggggagctactgccgggctcccccaaccctgaggaaccaatctaatgcctttcttgccattgtgtgccctttcccagctcttccccttcatcccaccctgctcagcatttacatttttgccaccagcacacttgttcccagacctgcgcacacagcatttcagccacctgacaatctccttggagtcaaagctccaggtgttccaaactcattaactaaattctccccagaatgcttttaaattttccagggcctttctcctcccaggatctgggaaagcttgggaaccacccctggcctttggaacctctccatatactttctaagctctgggggaggaggaggatgggacctcctggacccagcttgttagtcacccactataatcaactgccaaaggtgctactgtgtccccaggagcctaatagggtaggcccaaatctctgtttgctgaggaggtcattgccatccatatttgggagccactgggtggaggggcagggaggcccaagaactgggtacaagcagtgcccttattgtatggttggttaacagtctgctcccctcttcccttccttctttttttcctctactgacttctctccatactctttcccctctatttctttgtatgactgtcatagacacatgggtgcttgaagaaaggagggacccggaacttgggccaatcagcctcaccttgtcccagtccactcctaacactagcatcagtcccactcatctcaggctgagccacatctcactttttcgctcaagctatataatcctagactggaagagtagaatatcatatagggaagaaaccttaaacaccacagtgttccatgttccagtcactgatttttacaaatcttacagtccaaggcattaacctcaaggccctcccagcaccccattcttgtatacacatggcaaaatgtgaagaaactcctttcatctcagcaggtagaggaggactgatgacacgagctgccatggcgggaggaggggcagtagttattgatatggtgagccccatctctcagttttcatgacaggtctatatttctacctgggccaggccaggaaagagactatttaagaaaaaaaaaatcaattcctagcctggatcccaaaaaggtacaggcagcagttgcacatagggttggaaaatttcttttgggaaggggaagccatcccagcctttaccacccaatgtgtctcccatgctgggcatcctaggccactttgcttagagggcattaaaggtgccatgaaaggtagactctgaaccactttgatccctctgaagtaggtgactgatgcctccttatgcccaggctctggcaacagtcttactgaagaacattcccagtgcccctggctaggggcagagggcactgccaggctgtgttcagttagcacagctcacctcattaggagctcagcctctctcctcactctgcctctttgtgtctctttttctcctctctgagcctttgtctattgtgttcctgtcacccaccctttcatcatctttttgccaggcattcctggctgtcacttggagccaacagtaacttgccaccttaaggcagggtcatccccgggccaggaggatgaggttgtcctgaggggctccaaagaagacaatagttcccactcatgattttccgttacaaacaggcagctggggcatggttggcctccaatgatttcattcaaggccaaagtcctgagccccctccgctggtcccagtccagctcttatcaactccccaaaggaaaacccactggttcttagctctgtgggtaggaaggggccctagaaagggcctagttactatcctgtcagttctaacagtagtggaacaggagaatctgggccctaggagccctgtaactcccaggagagaccactgaaaatactggagcaacaatgcccctgcttccatttctccccacctcactctcaccaagtcaccagagggtggttctgtaggacctcttttgttgcttaagatgcagatggctcttaagaatcaggcagtcgcccacttctctccagatgaagggaagacattcataggtcccaaatctgcccattcagatgtcacataatatggtgggatatcaatttacttcttccacacatgtggttgtgcacatgtgagcttgtgtgcttttggagagaatgttgattggcaaaagcagcacagtattaatatttagagtaggatgcagcctcttatgcaccacagttaaatctagaacgaacaaaatttcagagctcaagacatgggacatttaaatcctcaaggagtttggaacaaaataaacagatctaaaaattt

SEQ ID NO: 97505 - DNA, 1698 bp, Homo sapiens
tcaagctatataatcctagactggaagagtagaatatcatatagggaagaaaccttaaacacaccagtgttccatgtcccactcatctcaggctgagccacatctcactttttcgctcaagctatataatcctagactggaagagtagaatatcatatagggaagaaaccttaaacaccacagtgttccatgttccagtcactgatttttacaaatcttacagtccaaggcattaacctcaaggccctcccagcaccccattcttgtatacacatggcaaaatgtgaagaaactcctttcatctcagcaggtagaggaggactgatgacacgagctgccatggcgggaggaggggcagtagttattgatatggtgagccccatctctcagttttcatgacaggtctatatttctacctgggccaggccaggaaagagactatttaagaaaaaaaaaatcaattcctagcctggatcccaaaaaggtacaggcagcagttgcacatagggttggaaaatttcttttgggaaggggaagccatcccagcctttaccacccaatgtgtctcccatgctgggcatcctaggccactttgcttagagggcattaaaggtgccatgaaaggtagactctgaaccactttgatccctctgaagtaggtgactgatgcctccttatgcccaggctctggcaacagtcttactgaagaacattcccagtgcccctggctaggggcagagggcactgccaggctgtgttcagttagcacagctcacctcattaggagctcagcctctctcctcactctgcctctttgtgtctctttttctcctctctgagcctttgtctattgtgttcctgtcacccaccctttcatcatctttttgccaggcattcctggctgtcacttggagccaacagtaacttgccaccttaaggcagggtcatccccgggccaggaggatgaggttgtcctgaggggctccaaagaagacaatagttcccactcatgattttccgttacaaacaggcagctggggcatggttggcctccaatgatttcattcaaggccaaagtcctgagccccctccgctggtcccagtccagctcttatcaactccccaaaggaaaacccactggttcttagctctgtgggtaggaaggggccctagaaagggcctagttactatcctgtcagttctaacagtagtggaacaggagaatctgggccctaggagccctgtaactcccaggagagaccactgaaaatactggagcaacaatgcccctgcttccatttctccccacctcactctcaccaagtcaccagagggtggttctgtaggacctcttttgttgcttaagatgcagatggctcttaagaatcaggcagtcgcccacttctctccagatgaagggaagacattcataggtcccaaatctgcccattcagatgtcacataatatggtgggatatcaatttacttcttccacacatgtggttgtgcacatgtgagcttgtgtgcttttggagagaatgttgattggcaaaagcagcacagtattaatatttagagtaggatgcagcctcttatgcaccacagttaaatctagaacgaacaaaatttcagagctcaagacatgggacatttaaatcctcaaggagtttggaacaaaataaacagatctaaaaattt

SEQ ID NO: 97506 - DNA, 4371 bp, Homo sapiens
gggttcagtagtttgggaagggagctgggggaggcagtggcggctggagtaggtaggcgagtaaaaggaggaggaagggctggggagaagagcgaggctgtagcggctgcctgttgagggaggaagaggtggggggtgtggaggagggggaggagagagagatgacatggggagaggaggaggggggttggacgtgggaggaggaggagagggctcgagggaccgtctgtcgcgggacgggctggccagctggggcgcggagcctggaggaggaggcagcggcagcggcagcagcagccctccgagcagcagcagctgcagcagcagaaacaagtaccagccacaaagcggctcctctggcccaagcagccacagtccccccgccgcgatggcgctgcaaagccaggcgagcgaggaagcaaaggggccctggcaggaggcagaccaggaacagcaggagccggtgggtagcccagagccggagtctgagccggagcctgagcccgagcccgagcccgtgccagtgcccccgcccgagccccagccggagccccagcccctaccggaccccgcacccctgccggagctggagttcgagtccgagcgggtgcacgaacccgagcccacgcctacggtagagacccgcggcaccgcgcgcggcttccagcctcccgaaggtggcttcggctgggtggtggtgttcgctgccacctggtgcaacggctccatcttcggcatccataactctgtcgggatcctctactccatgctgctagaggaggaaaaggaaaaaaatcgccaagtggagttccaagcagcatgggtcggagccctcgcgatgggtatgatcttcttctgttctcccattgtgagtatattcactgaccgtttgggctgccgaatcacagcaaccgcgggggctgccgttgctttcattggcctccataccagctccttcaccagctccctaagcctgcgctacttcacctacgggattctctttggttgtggctgttccttcgcctttcagccatccctcgtcatcctgggccactactttcaacgccgcctgggtctggccaatggtgtggtgtctgctgggagtagcattttctccatgtccttccccttcctcatcagaatgctgggggataagatcaagctggcccaaaccttccaggtgctgagtaccttcatgtttgttcttatgctgctttcactcacctaccggcccctcctgcccagctcccaggacaccccaagcaagagaggtgtccgcaccctgcaccagcgctttctggctcagctcaggaagtacttcaacatgcgagtgttccgccaacgcacttaccgcatctgggccttcggaattgctgctgctgcccttggctactttgttccctatgtacacctgatgaagtatgtggaggaggagttctcagaaatcaaggagacctgggtgctcttggtgtgtattggggctacctcaggccttgggcgtcttgtgtcaggccacatcagtgactccatccctggacttaagaagatctacttgcaggtcctttccttcctgctcctgggcctgatgtccatgatgattcccctgtgccgggacttcgggggccttatcgtcgtctgtcttttcctgggcctttgcgatggcttcttcatcaccatcatggcccccattgcatttgagctggtgggcccaatgcaggcctcacaggccattggctacctcctgggcatgatggccctgccaatgattgctgggccccccattgcaggcctactccgcaactgttttggggactaccatgtggccttctactttgccggtgtgccccccatcatcggggctgtaatcctcttcttcgtccctctgatgcatcaaaggatgttcaagaaagagcagagagattccagcaaggataagatgttggcccctgacccagaccccaatggggagctactgccgggctcccccaaccctgaggaaccaatctaatgcctttcttgccattgtgtgccctttcccagctcttccccttcatcccaccctgctcagcatttacatttttgccaccagcacacttgttcccagacctgcgcacacagcatttcagccacctgacaatctccttggagtcaaagctccaggtgttccaaactcattaactaaattctccccagaatgcttttaaattttccagggcctttctcctcccaggatctgggaaagcttgggaaccacccctggcctttggaacctctccatatactttctaagctctgggggaggaggaggatgggacctcctggacccagcttgttagtcacccactataatcaactgccaaaggtgctactgtgtccccaggagcctaatagggtaggcccaaatctctgtttgctgaggaggtcattgccatccatatttgggagccactgggtggaggggcagggaggcaaaatgagacaagtagccttggttagtcttagagttgctgatgactgtggcttcccaagaactgggtacaagcagtgcccttattgtatggttggttaacagtctgctcccctcttcccttccttctttttttcctctactgacttctctccatactctttcccctctatttctttgtatgactgtcatagacacatgggtgcttgaagaaaggagggacccggaacttgggccaatcagcctcaccttgtcccagtccactcctaacactagcatcagtcccactcatctcaggctgagccacatctcactttttcgctcaagctatataatcctagactggaagagtagaatatcatatagggaagaaaccttaaacaccacagtgttccatgttccagtcactgatttttacaaatcttacagtccaaggcattaacctcaaggccctcccagcaccccattcttgtatacacatggcaaaatgtgaagaaactcctttcatctcagcaggtagaggaggactgatgacacgagctgccatggcgggaggaggggcagtagttattgatatggtgagccccatctctcagttttcatgacaggtctatatttctacctgggccaggccaggaaagagactatttaagaaaaaaaaaatcaattcctagcctggatcccaaaaaggtacaggcagcagttgcacatagggttggaaaatttcttttgggaaggggaagccatcccagcctttaccacccaatgtgtctcccatgctgggcatcctaggccactttgcttagagggcattaaaggtgccatgaaaggtagactctgaaccactttgatccctctgaagtaggtgactgatgcctccttatgcccaggctctggcaacagtcttactgaagaacattcccagtgcccctggctaggggcagagggcactgccaggctgtgttcagttagcacagctcacctcattaggagctcagcctctctcctcactctgcctctttgtgtctctttttctcctctctgagcctttgtctattgtgttcctgtcacccaccctttcatcatctttttgccaggcattcctggctgtcacttggagccaacagtaacttgccaccttaaggcagggtcatccccgggccaggaggatgaggttgtcctgaggggctccaaagaagacaatagttcccactcatgattttccgttacaaacaggcagctggggcatggttggcctccaatgatttcattcaaggccaaagtcctgagccccctccgctggtcccagtccagctcttatcaactccccaaaggaaaacccactggttcttagctctgtgggtaggaaggggccctagaaagggcctagttactatcctgtcagttctaacagtagtggaacaggagaatctgggccctaggagccctgtaactcccaggagagaccactgaaaatactggagcaacaatgcccctgcttccatttctccccacctcactctcaccaagtcaccagagggtggttctgtaggacctcttttgttgcttaagatgcagatggctcttaagaatcaggcagtcgcccacttctctccagatgaagggaagacattcataggtcccaaatctgcccattcagatgtcacataatatggtgggatatcaatttacttcttccacacatgtggttgtgcacatgtgagcttgtgtgcttttggagagaatgttgattggcaaaagcagcacagtattaatatttagagtaggatgcagcctcttatgcaccacagttaaatctagaacgaacaaaatttcagagctcaagacatgggacatttaaatcctcaaggagtttggaacaaaataaacagatctaaaaattt

SEQ ID NO: 97507 - DNA, 3073 bp, Homo sapiens
gtttctgtcctgctccaggaaagtaagcagtaggggattctggatatgcctacagttaaccagtcagctcctctttctcctcctgtttctggggatccttgtgctatgcttttcagatgaagtatgtggaggaggagttctcagaaatcaaggagacctgggtgctcttggtgtgtattggggctacctcaggccttgggcgtcttgtgtcaggccacatcagtgactccatccctggacttaagaagatctacttgcaggtcctttccttcctgctcctgggcctgatgtccatgatgattcccctgtgccgggacttcgggggccttatcgtcgtctgtcttttcctgggcctttgcgatggcttcttcatcaccatcatggcccccattgcatttgagctggtgggcccaatgcaggcctcacaggccattggctacctcctgggcatgatggccctgccaatgattgctgggccccccattgcaggcctactccgcaactgttttggggactaccatgtggccttctactttgccggtgtgccccccatcatcggggctgtaatcctcttcttcgtccctctgatgcatcaaaggatgttcaagaaagagcagagagattccagcaaggataagatgttggcccctgacccagaccccaatggggagctactgccgggctcccccaaccctgaggaaccaatctaatgcctttcttgccattgtgtgccctttcccagctcttccccttcatcccaccctgctcagcatttacatttttgccaccagcacacttgttcccagacctgcgcacacagcatttcagccacctgacaatctccttggagtcaaagctccaggtgttccaaactcattaactaaattctccccagaatgcttttaaattttccagggcctttctcctcccaggatctgggaaagcttgggaaccacccctggcctttggaacctctccatatactttctaagctctgggggaggaggaggatgggacctcctggacccagcttgttagtcacccactataatcaactgccaaaggtgctactgtgtccccaggagcctaatagggtaggcccaaatctctgtttgctgaggaggtcattgccatccatatttgggagccactgggtggaggggcagggaggcaaaatgagacaagtagccttggttagtcttagagttgctgatgactgtggcttcccaagaactgggtacaagcagtgcccttattgtatggttggttaacagtctgctcccctcttcccttccttctttttttcctctactgacttctctccatactctttcccctctatttctttgtatgactgtcatagacacatgggtgcttgaagaaaggagggacccggaacttgggccaatcagcctcaccttgtcccagtccactcctaacactagcatcagtcccactcatctcaggctgagccacatctcactttttcgctcaagctatataatcctagactggaagagtagaatatcatatagggaagaaaccttaaacaccacagtgttccatgttccagtcactgatttttacaaatcttacagtccaaggcattaacctcaaggccctcccagcaccccattcttgtatacacatggcaaaatgtgaagaaactcctttcatctcagcaggtagaggaggactgatgacacgagctgccatggcgggaggaggggcagtagttattgatatggtgagccccatctctcagttttcatgacaggtctatatttctacctgggccaggccaggaaagagactatttaagaaaaaaaaaatcaattcctagcctggatcccaaaaaggtacaggcagcagttgcacatagggttggaaaatttcttttgggaaggggaagccatcccagcctttaccacccaatgtgtctcccatgctgggcatcctaggccactttgcttagagggcattaaaggtgccatgaaaggtagactctgaaccactttgatccctctgaagtaggtgactgatgcctccttatgcccaggctctggcaacagtcttactgaagaacattcccagtgcccctggctaggggcagagggcactgccaggctgtgttcagttagcacagctcacctcattaggagctcagcctctctcctcactctgcctctttgtgtctctttttctcctctctgagcctttgtctattgtgttcctgtcacccaccctttcatcatctttttgccaggcattcctggctgtcacttggagccaacagtaacttgccaccttaaggcagggtcatccccgggccaggaggatgaggttgtcctgaggggctccaaagaagacaatagttcccactcatgattttccgttacaaacaggcagctggggcatggttggcctccaatgatttcattcaaggccaaagtcctgagccccctccgctggtcccagtccagctcttatcaactccccaaaggaaaacccactggttcttagctctgtgggtaggaaggggccctagaaagggcctagttactatcctgtcagttctaacagtagtggaacaggagaatctgggccctaggagccctgtaactcccaggagagaccactgaaaatactggagcaacaatgcccctgcttccatttctccccacctcactctcaccaagtcaccagagggtggttctgtaggacctcttttgttgcttaagatgcagatggctcttaagaatcaggcagtcgcccacttctctccagatgaagggaagacattcataggtcccaaatctgcccattcagatgtcacataatatggtgggatatcaatttacttcttccacacatgtggttgtgcacatgtgagcttgtgtgcttttggagagaatgttgattggcaaaagcagcacagtattaatatttagagtaggatgcagcctcttatgcaccacagttaaatctagaacgaacaaaatttcagagctcaagacatgggacatttaaatcctcaaggagtttggaacaaaataaacagatctaaaaattt

SEQ ID NO: 97508 - DNA, 2520 bp, Homo sapiens
gggttcagtagtttgggaagggagctgggggaggcagtggcggctggagtaggtaggcgagtaaaaggaggaggaagggctggggagaagagcgaggctgtagcggctgcctgttgagggaggaagaggtggggggtgtggaggagggggaggagagagagatgacatggggagaggaggaggggggttggacgtgggaggaggaggagagggctcgagggaccgtctgtcgcgggacgggctggccagctggggcgcggagcctggaggaggaggcagcggcagcggcagcagcagccctccgagcagcagcagctgcagcagcagaaacaagtaccagccacaaagcggctcctctggcccaagcagccacagtccccccgccgcgatggcgctgcaaagccaggcgagcgaggaagcaaaggggccctggcaggaggcagaccaggaacagcaggagccggtgggtagcccagagccggagtctgagccggagcctgagcccgagcccgagcccgtgccagtgcccccgcccgagccccagccggagccccagcccctaccggaccccgcacccctgccggagctggagttcgagtccgagcgggtgcacgaacccgagcccacgcctacggtagagacccgcggcaccgcgcgcggcttccagcctcccgaaggtggcttcggctgggtggtggtgttcgctgccacctggtgcaacggctccatcttcggcatccataactctgtcgggatcctctactccatgctgctagaggaggaaaaggaaaaaaatcgccaagtggagttccaagcagcatgggtcggagccctcgcgatgggtatgatcttcttctgttctcccattgtgagtatattcactgaccgtttgggctgccgaatcacagcaaccgcgggggctgccgttgctttcattggcctccataccagctccttcaccagctccctaagcctgcgctacttcacctacgggattctctttggttgtggctgttccttcgcctttcagccatccctcgtcatcctgggccactactttcaacgccgcctgggtctggccaatggtgtggtgtctgctgggagtagcattttctccatgtccttccccttcctcatcagaatgctgggggataagatcaagctggcccaaaccttccaggtgctgagtaccttcatgtttgttcttatgctgctttcactcacctaccggcccctcctgcccagctcccaggacaccccaagcaagagaggtgtccgcaccctgcaccagcgctttctggctcagctcaggaagtacttcaacatgcgagtgttccgccaacgcacttaccgcatctgggccttcggaattgctgctgctgcccttggctactttgttccctatgtacacctgatgaagtatgtggaggaggagttctcagaaatcaaggagacctgggtgctcttggtgtgtattggggctacctcaggccttgggcgtcttgtgtcaggccacatcagtgactccatccctggacttaagaagatctacttgcaggtcctttccttcctgctcctgggcctgatgtccatgatgattcccctgtgccgggacttcgggggccttatcgtcgtctgtcttttcctgggcctttgcgatggcttcttcatcaccatcatggcccccattgcatttgagctggtgggcccaatgcaggcctcacaggccattggctacctcctgggcatgatggccctgccaatgattgctgggccccccattgcaggcctactccgcaactgttttggggactaccatgtggccttctactttgccggtgtgccccccatcatcggggctgtaatcctcttcttcgtccctctgatgcatcaaaggatgttcaagaaagagcagagagattccagcaaggataagatgttggcccctgacccagaccccaatggggagctactgccgggctcccccaaccctgaggaaccaatctaatgcctttcttgccattgtgtgccctttcccagctcttccccttcatcccaccctgctcagcatttacatttttgccaccagcacacttgttcccagacctgcgcacacagcatttcagccacctgacaatctccttggagtcaaagctccaggtgttccaaactcatttttttcaccactctgtgcatgtcgatggatggccccaagaacacagcatgtgttgattttggggttacaaaatatagcttagtatagtaggcaaattcacaaatacggatagctgtgaataatgaggactgacggtatttgccaagagccacatggagaggcttatttgttagtgcgctgataccatttggtctctgatgtagatgtcaaagggatagaagctagggagtgtgtcactgtgtgtgtgtgtgttggcgggagatgcggcccatcaggtaggcttgatggggttaggcttgaggggaaggacacatctgtgcacactccgaatcacatagaggaac

SEQ ID NO: 97509 - DNA, 476 bp, Homo sapiens
gcctaactgctgggggcaggctactgggacaccgctggattttggtaggagtcactcagtgattgaataaagcccgaatcccacagaccctaaggatgctcctgcacaaaaaaccaactgaaataatgcccaaagaataatgctttgctaaggcagggaagattgcatttgtttttataacagtctaccttcaaaaaaaggtagtcctttctatagctataattaagtcattatttgtgtcattatgagttttaagtgtatctttccctctagttatttgtatggctcaatcctgtatatctagtgcctctctcaggatatatgataaatgtttgtgaggatggatatgttaattagcttgatttaattattccacatttgtattacaaaatcatagcatcattttgtactctataaatacatacaactataacttgtctatttacaataaactttttataacaaggaaaaaaaaa

SEQ ID NO: 97510 - DNA, 2128 bp, Homo sapiens
tcctggaacatcaagagtgtgaagactgaagataacctgaggcctaccagacatcctatattcaccaagattcacattttttggtatgtgtgcctacattttagcaaaaattggttggttaatccttctaaaattagagggatgacattgggtaacaaagtcttcccagcctttggcattatagtaatttctcgcaatagaaattccatacagatattattgccagtgaagagagctattcttgtttattatcagttctatatttttagctgaagcaacttagccctaaaaaaccccaaaatcaacttcttcctccaaattaaactctcccccaaatttaatggtttctgttttcttaaatgtttttctacttgacactgttatgtcagtctcatgtaactgaataattgttcataatttctgaagagcatttagtctttgccatctggcttcagtgccaaatgattttcaattcttgtttttggagactaatgactttttccttaatttattatcaaatttgccacattttagagctcacttttagaagttctgctatggttaatgaaaacaagctagaatgacacagtagaaattggttaatacgtcacattttacatcactattttgtagaagatttttagtaagtttctctatttttattccttgccactctggattttacaaatattctgacctagttgatccatcacatggtctcatatcacaactgttgcatcgctatattcacatagatgtttttctgtttaatttagaagacagtatttctgaaaaagtatgaaacgaccccaaatccaaaagttatggtgcacaatgaaaatgtatgcttttaataatgctggcttctgcagtaggtgtagaccatgtttcaaataaccacagactaatcagaaactccacctgtgaaaggaacttgaaattgtgctattcctccaagcttataacaccagcaaattgggtcaataggttattcctttaaaataggactatgagcctacagaggctcactctgaagaactcagccgtggagttagttctgtactatatccatcacaacagacatgcttcatcccatagacttcttgacatagcttgaaatgagtgaacccatccttgatttatatacatatatgttctcagtattttgggagcctttccacttttttaaaccttgttcattatgaacactgaaaataggaatttgtgaagagttaaaaagttatagcttgtttacgtagtaagtttttgaagtctacattcaatccagacacttagttgagtgttaaactgtgatttttaaaaaatatcatttgagaatattctttcagaggtattttcatttttactttttgattaattgtgttttatatattagggtagtacatttcctaccctacctgaagacttgagattatagtctttggggggatgggcaaagtactctctttttttgcatcttttaaattgtgatttttaaaaacacatataaattttactatcttaaccatttttatgtgtatagttcaatgagattaagtccagtcacattggtgtgaaacagatcttcagaattttttcatcttgcaaatctgggactctatacccattaaacaactcccattttccccttccccacagccttggcaaccatcattctacttttctctatgaatttcactactttagatacctcatataaatggaatcatacaggatttgtccttttgtagctgacatatttcacttaacataatgtcctcaaggttcatccatattgtagaatgtgataggatttcctgccattttaaggctgaataatattccactgcatgtatttaccacatttttttatccattcatctgttggtggacgtttgggttgcctccatctcttggctattgtgaataatgctgctgtaaacatgagtgtgcaaatatctataattttttaacacagtactttattttcggtatttaatcatatggaatttttgtcaattatgttaaaggattttacaacaacccaactatagatttatatatatatgtattattgttgttccttctaagcttaagaagtctctaataaaatccatacttccttata

SEQ ID NO: 97511 - DNA, 2072 bp, Homo sapiens
tcctggaacatcaagagtgtgaagactgaagataacctgaggcctaccagacatcctatattcaccaagattcacattttttggtatgtgtgcctacattttagcaaaaattggttggttaatccttctaaaattagagggatgacattgggtaacaaagtcttcccagcctttggcattatagtaatttctcgcaatagaaattccatacagatattattgccagtgaagagagctattcttgtttattatcagttctatatttttagctgaagcaacttagccctaaaaaaccccaaaatcaacttcttcctccaaattaaactctcccccaaatttaatggtttctgttttcttaaatgtttttctacttgacactgttatgtcagtctcatgtaactgaataattgttcataatttctgaagagcatttagtctttgccatctggcttcagtgccaaatgattttcaattcttgtttttggagactaatgactttttccttaatttattatcaaatttgccacattttagagctcacttttagaagttctgctatggttaatgaaaacaagctagaatgacacagtagaaattggttaatacgtcacattttacatcactattttgtagaagatttttagtaagtttctctatttttattccttgccactctggattttacaaatattctgacctagttgatccatcacatggtctcatatcacaactgttgcatcgctatattcacatagatgtttttctgtttaatttagaagacagtatttctgaaaaagtatgaaacgaccccaaatccaaaagttatggtgcacaatgaaaatgtatgcttttaataatgctggcttctgcagtaggtgtagaccatgtttcaaataaccacagactaatcagaaactccacctgtgaaaggaacttgaaattgtgctattcctccaagcttataacaccagcaaattgggtcaataggttattcctttaaaataggactatgagcctacagaggctcactctgaagaactcagccgtggagttagttctgtactatatccatcacaacagacatgcttcatcccatagacttcttgacatagcttgaaatgagtgaacccatccttgatttatatacatatatgttctcagtattttgggagcctttccacttttttaaaccttgttcattatgaacactgaaaataggaatttgtgaagagttaaaaagttatagcttgtttacgtagtaagtttttgaagtctacattcaatccagacacttagttgagtgttaaactgtgatttttaaaatgtgttttatatattagggtagtacatttcctaccctacctgaagacttgagattatagtctttggggggatgggcaaagtactctctttttttgcatcttttaaattgtgatttttaaaaacacatataaattttactatcttaaccatttttatgtgtatagttcaatgagattaagtccagtcacattggtgtgaaacagatcttcagaattttttcatcttgcaaatctgggactctatacccattaaacaactcccattttccccttccccacagccttggcaaccatcattctacttttctctatgaatttcactactttagatacctcatataaatggaatcatacaggatttgtccttttgtagctgacatatttcacttaacataatgtcctcaaggttcatccatattgtagaatgtgataggatttcctgccattttaaggctgaataatattccactgcatgtatttaccacatttttttatccattcatctgttggtggacgtttgggttgcctccatctcttggctattgtgaataatgctgctgtaaacatgagtgtgcaaatatctataattttttaacacagtactttattttcggtatttaatcatatggaatttttgtcaattatgttaaaggattttacaacaacccaactatagatttatatatatatgtattattgttgttccttctaagcttaagaagtctctaataaaatccatacttccttata

SEQ ID NO: 97512 - DNA, 194 bp, Homo sapiens
atttttagagatcgtcttgctgctttgcccagactggcctcaaacttctgggctcaagcgatccccttactcagcctaccgagtagctgcgactacaggcattctccactgtacctgactgaagtctaaaattttgaatcaagtctaagcagcatttacttatgatggcagaataaagatattttcagacatag

SEQ ID NO: 97513 - DNA, 263 bp, Homo sapiens
agttccacagtccatagcccaaacaaataaatgaatgaaataaccagaatgatttttgccaacatacatcaaattatcactgccttgaatcaaatcgttcagggactccccactagtatgtaggataaaaatgtgcagttcatagtccagcctgtaaggccctatatgatctactacttcatctttcacctcacattttgtgcccttcactctcctcggtctcatacagcagatatcattcagtactttccttccaatctggg

SEQ ID NO: 97514 - DNA, 595 bp, Homo sapiens
cattcctctttcctccatttcacagctatatccttattttcacacatgaccaacaaaagagacagcaagcaaaacaaagatcctccaaaattaccttaaaagacccaaaataaaaagagctcactcttcaaatcaaaagggacaaagaaaccatgaaaggtattcattcaagtgaggcttagaggctgtggggcgaagaaatacacggatgtccagagctgccttatgcagacagagtattttgcaaatctgttccaggcgtctgctgaggtttctgcctccttcagggaatgtattgccgtcattaatgcacactgactggtatgctttccctccaactggttttgcagagaagtaggcagcatgcaccctcataggcaagatgcaaaaggagagcagagaggcaggatgtccatgtatatgcagaaaccttgcccagaagatgacttattacattaaaggtgatcaagcttgggaaggaaccatgaaaactctattatgctgttaggaatattcacagccaagtatgtgataaactgcacccctcccttgtttcttgccaaacaggctgatgtgctgtgctgcttatgattta

SEQ ID NO: 97515 - DNA, 348 bp, Homo sapiens
atcacatatatccatgtatccattcttctacctatcatactcctttttctttgatatattttaaagtaattgcaagtgtgagctaccacgcccagtgtatgtacttttatataagacttctttccctaagcgttatgtttttgggattcatctatgtttcatgtctcagtagttcataatattacacgattaacttttaaaagctcacgataaatattgttaaattgccctccaggaaaatgtgatgaaattttgtaattaaaaaatccctgagtggctgggattataggcatgcactactttaccctgccttgtggtcagatttttatttcataaggagcatgtgag

SEQ ID NO: 97516 - DNA, 809 bp, Homo sapiens
atcagtacacgaatgaacaaagaaaatatagtacatatacacaacggaatactattcagccataaaaggaatgagatcttgttatttgcaacaatatggatggaactggaggtcattatgttcagtgaaataagccaggaatagaaaaactaactttgcatgttttcactcatttatggaagctaaaaattaaaacagttgatctcatggagataagagagtagaaggatggttaccagaggctggagaagggtagtggggtagtgagagggaaatggaatgcttaatggctacaaaagcatagtttgatagaatgaataagacctaatatttgatagcacaacagggtgactgcagtcaacagtaatttattctacattttaaaataactaaaagtgtaataggaatgtttgtaacacaaaaaaaggataaatgcttgagatgatggatactctatttaccctgatgtgattattacatattgtatcctgtatcaaaatatctcaggtaccccataaacatatatacctactatatacccataacaattttaaatttaaattaaaaaatcattttatcattgtcaacaaatggaaatgtatagaattttccatgatgatatttaggagaaaaatcctgggtcaagctataaggatctatctaaaatatattaatatattaactttaacaaatattgaatattatgaaagcatacataataatatatgtattatatatattatatagcatagtgtattactgtgacccccataagtcagcaagacccccaaatgttagtttatatatac

SEQ ID NO: 97517 - DNA, 417 bp, Homo sapiens
gagaaggagaataaggacctcttcaatggtatgatgcagaggttgccgctagagttcgctacagcaggactacacactaggtaccgtgcgctcgttcaccctggtctcaccttgatctcacaggtcttaggaattaatcaaaccaaacttgttgagtattgccaagtaactaagacttacccaggtgagtaataaatggttaagccaggccgggcacactggctcactcctgtattcccagcactttgggagggcgagacgggtggatcacctgaggtcaggtgttcgagatcagcctggccaatgtgatgaaaccctgtctctactaaaaattcaaaaattagctgggcgtggtggcaagcatctgtagttccagctactcgggaggctgaggtgggagaattgcttgaatccggg

SEQ ID NO: 97518 - DNA, 493 bp, Homo sapiens
cccatttgtccacgaccgggttctctcttcatctcccatcttgagttacctatttcagttcatttttgatttgcttaaggttctttctggagtatttttctcagatgggatacctggataatatacttttctcttttcagtgactttattttaatgagttttcagacttacagaaaggtgctcttcagatggggctgtgtcactggtcaaccatcttcactgtggagtcctagtcactacgattttgtgttgcatatcatgaagattcattcaaattgtctcctcttcctttccttcataataggttacatggtctgaaagtacatccctccttctctagtacattgtattcaaagaggttgctgctgcttctccattgtcattaatcttttcatcatcttcttattcctcttagcacagttggggcataatatattatcttctatgcctggggatgggaaaatgcaggcaggtaacaagaagagagaaatca

SEQ ID NO: 97519 - DNA, 657 bp, Homo sapiens
agttgctggcagagctgagctatggcgtcatccacggcacttccatgtctttaacagctttgaatggtggttccacactccggaagccgatgcaggaacgggaagcatctagtcccagaaggagagactcagagccagattcccagggctcaaccccacaaccatccctgcagtggaccaccaacgtctaggggaaggatattctgttttgtcacacaacttcccatgtacgtctgcagagatgtgcaggcgagtcaatggcagtactagattcacaacacttcgtcaatccaacttctgcacaatacagctgaaagatgggagaagtggcctaaatgtctgctccttacttcccatgtaggacagaccctaaataacctagaaaaacatgtctactttttctttcaaatctcctacaatccctcgatggagtctatgttctcagagccctgctggcttcctaaagcctaacttaagttcttgcaaatataactgaaatgcaatcttaggcaatgtgtccttccaagttctctcttcagagaggaagtacccggtgctactattgaatattgaagcaggcctggcggtgagagacggctgggcccgggtatggggagagagaattcattatgctcttctctctacttctgcatatgt

SEQ ID NO: 97520 - DNA, 838 bp, Homo sapiens
ggcacagtcataaatacagagggttttcagaaccacctcagagaagatgtttaaatcgctgacaaaagtcaacaaggtgaagcctataggagagaacaatgagaatgaacaaagttctcgtcggaatgaagaaggctctcacccaagtaatcagtctcagcaaaccacagcacaggaagaaaacaaaggtgaagagaaatctctcaaaaccaagtcaactccagtcacgtctgaagagccacacaccaacatacaagacaaactctccaagaaaaattcctctggagatctgaccacaaaccctgaccctcaaaatgcagcagaaccaactggaacagtgccagagcagaaggaaatggaccccgggaaagaaggtccaaacagttgaccctagaacaacaagaatttgaactgtggtaccacttatccctggattttcttccttctctgccatctgtgagacagcaacacgatctctcctcttcttgctcctcctcagcctactcaacatgaggacaactggatgcagacctttctgatgatccacttccacttaggcaatagtaaatatatggtctcttctttatgattttaataacattttctcttctctggcttgctttattgtaagaatgcagtatgtaacatgtataacatgaaatatgtacccatccatatgaacaagtaaggcttctggccaacagtaggctattagtagttaagtttgggaggagtcaaaagtcatatgcaattttcagctacacaggaggtctagtgcccctaacctctacatcatttatgggccaactgtaatttgcaataaattttgactgctaga

SEQ ID NO: 97521 - DNA, 4343 bp, Homo sapiens
  misc_feature (3643)..(3643): n is a, c, g, or t
  misc_feature (3661)..(3661): n is a, c, g, or t
ggcacagtcataaatacagagggttttcagaaccacctcagagaagatgtttaaatcgctgacaaaagtcaacaaggtgaagcctataggagagaacaatgagaatgaacaaagttctcgtcggaatgaagaaggctctcacccaagtaatcagtctcagcaaaccacagcacaggaagaaaacaaaggtgaagagaaatctctcaaaaccaagtcaactccagtcacgtctgaagagccacacaccaacatacaagacaaactctccaagaaaaattcctctggagatctgaccacaaaccctgaccctcaaaatgcagcagaaccaactggaacagtgccagagcagaaggaaatggaccccgggaaagaaggtccaaacagcccacaaaacaaaccgcctgcagctcctgttataaatgagtatgccgatgcccagctacacaacctggtgaaaagaatgcgtcaaagaacagccctctacaagaaaaagttggtagagggagatctctcctcacccgaagccagcccacaaactgcaaagcccacggctgtaccaccagtaaaagaaagcgatgataagccaacagaacattactacaggctgttgtggttcaaagtcaaaaagatgcctttaacagagtacttaaagcgaattaaacttccaaacagcatagattcatacacagatcgactctatctcctgtggctcttgcttgtcactcttgcctataactggaactgctgttttataccactgcgcctcgtcttcccatatcaaaccgcagacaacatacactactggcttattgcggacatcatatgtgatatcatctacctttatgatatgctatttatccagcccagactccagtttgtaagaggaggagacataatagtggattcaaatgagctaaggaaacactacaggacttctacaaaatttcagttggatgtcgcatcaataataccatttgatatttgctacctcttctttgggtttaatccaatgtttagagcaaataggatgttaaagtacacttcattttttgaatttaatcatcacctagagtctataatggacaaagcatatatctacagagttattcgaacaactggatacttgctgtttattctgcacattaatgcctgtgtttattactgggcttcaaactatgaaggaattggcactactagatgggtgtatgatggggaaggaaacgagtatctgagatgttattattgggcagttcgaactttaattaccattggtggccttccagaaccacaaactttatttgaaattgtttttcaactcttgaattttttttctggagtttttgtgttctccagtttaattggtcagatgagagatgtgattggagcagctacagccaatcagaactacttccgcgcctgcatggatgacaccattgcctacatgaacaattactccattcctaaacttgtgcaaaagcgagttcggacttggtatgaatatacatgggactctcaaagaatgctagatgagtctgatttgcttaagaccctaccaactacggtccagttagccctcgccattgatgtgaacttcagcatcatcagcaaagtcgacttgttcaagggttgtgatacacagatgatttatgacatgttgctaagattgaaatccgttctctatttgcctggtgactttgtctgcaaaaagggagaaattggcaaggaaatgtatatcatcaagcatggagaagtccaagttcttggaggccctgatggtactaaagttctggttactctgaaagctgggtcggtgtttggagaaatcagccttctagcagcaggaggaggaaaccgtcgaactgccaatgtggtggcccacgggtttgccaatcttttaactctagacaaaaagaccctccaagaaattctagtgcattatccagattctgaaaggatcctcatgaagaaagccagagtgcttttaaagcagaaggctaagaccgcagaagcaacccctccaagaaaagatcttgccctcctcttcccaccgaaagaagagacacccaaactgtttaaaactctcctaggaggcacaggaaaagcaagtcttgcaagactactcaaattgaagcgagagcaagcagctcagaagaaagaaaattctgaaggaggagaggaagaaggaaaagaaaatgaagataaacaaaaagaaaatgaagataaacaaaaagaaaatgaagataaaggaaaagaaaatgaagataaagataaaggaagagagccagaagagaagccactggacagacctgaatgtacagcaagtcctattgcagtggaggaagaaccccactcagttagaaggacagttttacccagagggacttctcgtcaatcactcattatcagcatggctccttctgctgagggcggagaagaggttcttactattgaagtcaaagaaaaggctaagcaataaatgtttgattatctttagatgtgatatagctagttcccaaagtgattgtacctaggattgtaacttaaattaacgaggggaaacgacatgctgggacccttgagaaacgaaaggcaaatccctagcttagtttctaggacttatctgagagtgtgatttcatgcagtggtaataagaagattattaaaagccatccctattctccgttttcattaactttatgcaattgctatatcttctaattgtatgtagtaagtttccttttcctttggttctttcctgatgatgtctcttccttccagttttattagcttgctcttggctgtgatgtgattcactaaccttttctcttaatttttattgtgtttaatttcttctttggcactctaaagcctggctaattgttctaggtttatgaatttcacctcttacatgtaaagggtataagattttaatgtaataggtcaaaaatcagattattttcattcaaatgaggatgatgagtcactgtaatatcaaaaaatccccagcagctgggactgaagggaagcagagatcatgaagctttctgaatgagaagtctgatttttggaacagtcccctgaagaccaatgttggtcggcagaattagcaaactggcaaaatcacattgcaggaacatattggaaaaattgtaccctttactaaagaaataaacttcaatattttctcttctaaccaacttaaaagacaccaatctacctaactcatctggctcaagggacttggactggaggatacaggctaaagtgacacttatcagaatcttcctcaagcacttgctggaaaagatatcagattggaacttcttgtttaaaattaagctttagtaaaacaaagtgatgaggttaggaaggcagactctacacatgtcagattgacatatccccacaatttccggaacctacatgtatagctgtttacaaaatctccaagttaattaagggcactttagaagttgtcctcatgaattagctagcattagcataattaccgacgttgcatgctgtgaggaggctacaaaggccaggctggtgtcggaagtaataatacatatagaattccattctaataaatgccattagtgtataacatcaagttctgtgtaatgaggctatttccaagtcnccaaagatggtcactgtnacagcactttgctgagagggttttaacaaatcatattagccaaaaagcctacaacatagatgcatttagcaaaccatgtacaaatcaatcactataataaactgcatcatttgatagagtcaccgtttttgcatgtagtgttagagtatcacaaaatataacaagttttactaaaggatggttggttttttcaggatttaagggaatatggacaaattgttaaatagtatttatttgataaatgggagtttgtatgcagaaagagtgaattgcgtataaaaagggtgatttaaaaacccagaaacaaaaggtagaatagggctgaagcatctgataataggaaaagaaaaggacaaaagtcctcaacttgtgagcaatatgctttccctttacaccctgtaatttattcaaatgatattaaaatacaagaccattgcaatttatgcttttcgcctggcagttattttcccccccaagctatcctgtttcagataatatcaatttatttccaatccatcagactaaaatctaagaaaattcaagaactcttttattgttgatttggtgccaccaaattctttttctttttaaatctttctaattatcctttctttttcaatcccattgctaacacccagaacatattttctgttcaatgcaaataaacattcactttttacct

SEQ ID NO: 97522 - DNA, 2376 bp, Homo sapiens
ggcacagtcataaatacagagggttttcagaaccacctcagagaagatgtttaaatcgctgacaaaagtcaacaaggtgaagcctataggagagaacaatgagaatgaacaaagttctcgtcggaatgaagaaggctctcacccaagtaatcagtctcagcaaaccacagcacaggaagaaaacaaaggtgaagagaaatctctcaaaaccaagtcaactccagtcacgtctgaagagccacacaccaacatacaagacaaactctccaagaaaaattcctctggagatctgaccacaaaccctgaccctcaaaatgcagcagaaccaactggaacagtgccagagcagaaggaaatggaccccgggaaagaaggtccaaacagcccacaaaacaaaccgcctgcagctcctgttataaatgagtatgccgatgcccagctacacaacctggtgaaaagaatgcgtcaaagaacagccctctacaagaaaaagttggtagagggagatctctcctcacccgaagccagcccacaaactgcaaagcccacggctgtaccaccagtaaaagaaagcgatgataagccaacagaacattactacaggctgttgtggttcaaagtcaaaaagatgcctttaacagagtacttaaagcgaattaaacttccaaacagcatagattcatacacagatcgactctatctcctgtggctcttgcttgtcactcttgcctataactggaactgctgttttataccactgcgcctcgtcttcccatatcaaaccgcagacaacatacactactggcttattgcggacatcatatgtgatatcatctacctttatgatatgctatttatccagcccagactccagtttgtaagaggaggagacataatagtggattcaaatgagctaaggaaacactacaggacttctacaaaatttcagttggatgtcgcatcaataataccatttgatatttgctacctcttctttgggtttaatccaatgtttagagcaaataggatgttaaagtacacttcattttttgaatttaatcatcacctagagtctataatggacaaagcatatatctacagagttattcgaacaactggatacttgctgtttattctgcacattaatgcctgtgtttattactgggcttcaaactatgaaggaattggcactactagatgggtgtatgatggggaaggaaacgagtatctgagatgttattattgggcagttcgaactttaattaccattggtggccttccagaaccacaaactttatttgaaattgtttttcaactcttgaattttttttctggagtttttgtgttctccagtttaattggtcagatgagagatgtgattggagcagctacagccaatcagaactacttccgcgcctgcatggatgacaccattgcctacatgaacaattactccattcctaaacttgtgcaaaagcgagttcggacttggtatgaatatacatgggactctcaaagaatgctagatgagtctgatttgcttaagaccctaccaactacggtccagttagccctcgccattgatgtgaacttcagcatcatcagcaaagtcgacttgttcaagggttgtgatacacagatgatttatgacatgttgctaagattgaaatccgttctctatttgcctggtgactttgtctgcaaaaagggagaaattggcaaggaaatgtatatcatcaagcatggagaagtccaagttcttggaggccctgatggtactaaagttctggttactctgaaagctgggtcggtgtttggagaaatcagccttctagcagcaggaggaggaaaccgtcgaactgccaatgtggtggcccacgggtttgccaatcttttaactctagacaaaaagaccctccaagaaattctagtgcattatccagattctgaaaggatcctcatgaagaaagccagagtgcttttaaagcagaaggctaagaccgcagaagcaacccctccaagaaaagatcttgccctcctcttcccaccgaaagaagagacacccaaactgtttaaaactctcctaggaggcacaggaaaagcaagtcttgcaagactactcaaattgaagcgagagcaagcagctcagggtcagttcttacctgtgtccttcactgctgggatattcttaggtcacctgagactctgaactggaataattgactctcttgctcctttcctctgccgtaggagcagcacatcccagataaggctgttccttcagcctgagtcccaatataagaaacatggagagaactccagcctagctgcatgtaaaatgagcaagaaataaactgttgtcattaaagccactga

SEQ ID NO: 97523 - DNA, 966 bp, Homo sapiens
ggcacagtcataaatacagagggttttcagaaccacctcagagaagatgtttaaatcgctgacaaaagtcaacaaggtgaagcctataggagagaacaatgagaatgaacaaagttctcgtcggaatgaagaaggctctcacccaagtaatcagtctcagcaaaccacagcacaggaagaaaacaaaggtgaagagaaatctctcaaaaccaagtcaactccagtcacgtctgaagagccacacaccaacatacaagacaaactctccaagaaaaattcctctggagatctgaccacaaaccctgaccctcaaaatgcagcagaaccaactggaacagtgccagagcagaaggaaatggaccccgggaaagaaggtccaaacagttgaccctagaacaacaagaatttgaactgtggtaccacttatccctggattttcttccttctctgccatctgtgagacagcaacacgatctctcctcttcttgctcctcctcagcctactcaacatgaggacaactggatgcagacctttctgatgatccacttccacttaggcaatagtaaatatatggtctcttctttatgattttaataacattttctcttctctggcttgctttattgtaagaatgcagtatgtaacatgtataacatgaaatatgtacccatccatatgaacaagtaaggcttctggccaacagtaggctattagtagttaagtttgggaggagtcaaaagtcatatgcaattttcagctacacaggaggtctagtgcccctaacctctacatcatttatgggccaactgtaatttgcaataaattttgactgctagaaataataagaaatattagtttttatgatatttattctttcttatagtgtaatttacatgtccacaatagtaaatttgaaaaatatcacaaaataaaagtaaaaatgacttataatcactcagatataa

SEQ ID NO: 97524 - DNA, 570 bp, Homo sapiens
gctgttattctaccttttttgttacatatagatttgtaattattattcccttggccagtttaacagtgagagaaaagttattttcacacaattagcagtactttgtttctctctccccagtatgtcagccacctccagatgtcctgcatgctgagcgtacccaaagggacaaggacaacttttcacccgggcaggaagtgttctacagctgtgagcccggctacgacctcagaggatctacgtatttgcactgcacaccccagggagactggagccctgcagcccccagatgtgaaggtgactagactcttatctggcttggtatttttagcttgcgtctttattctccacatgccagttatttctgttcgtttttctttttttccagtgaaatcctgtgatgacttcctgggccaacttcctaatggccatgtgctatttccacttaatctccagcttggagcaaaagtggattttgtttgtgatgaagggtgagtatgagcttgcctgacctgctggacattgaaattggggttaggaattagtccaaaaaggggagatttgatgtgg

SEQ ID NO: 97525 - DNA, 331 bp, Homo sapiens
tccagcacagactcttatctccagccctgactgccgaaaccctccagccccagctccagcccctcaggaggggactgcgtgggaggaatgactccagcaagccggcagctgacccgtctcctgcctgcacgcctcccgctgtggtccactgccggtggtcttcagctctctcctcgtcccacccccatggtctgctgacagcccagctcagtgcatccctgccatctctgctctaccgctggtcctcccaacaaccaacttacaggtttgggggcacacgtgaaggtttgacatatagtaaacacatgtcatggtggtttgttgtacagat

SEQ ID NO: 97526 - DNA, 357 bp, Homo sapiens
gagcccccagcgctggggagagctgtgcagaataggactggaggtggaagtgttggagattaacagccaggtggaggggacgggggaggccctgggtcagtcctcagggaacccccattgtgaagggggaaagggaaactcaggcccagtcctcaggggcccccagtctgagaggaaggaggacacacgagccatatttgcagagaaacaccagcctgcgagaggagggcttgaccctggggactgagaggtggagaagacacagtcccatctgtctcacggcagagacaggtttgggggcacacgtgaaggtttgacatatagtaaacacatgtcatggtggtttgttgtacagat

SEQ ID NO: 97527 - DNA, 660 bp, Homo sapiens
gctggagcggctgcaggagggtgagtggacagaagggaggcaatggctgaagtggaaacgatcaaatgaagcaatgagcagcagaattggtcagcctgcagagtggctcgaggggagaggacagagtcttggaggggaggaagtcaagacacagagaagccagcatttgaaggtggggatggctacaaatgatggaatgatgacagggctgtgctgggaacagcaagccagccggagctgaccacagcaaggaggagtgttcggggatccgaggaccacagcagtgaagtgagtcagactggcacagtctgatggcgtggactccaaagctgggggtcctgggtgggggaggtagaaggtctggaaatggaaaagaagatcaagccgtacagctccttgtaatgcatcaaaaatacctcagcacaccattggttccattgacaatactacaggttgaacatacctaatccaaaaacccaaaatccatattgctccaagattcaaaactttttgaaatggttaatcagtaagtataatgcaaatattcaaaaatctgaggattaaaaaaaaaacaaaaccaaatctgaagcacttctggacctaagcattttgaataagagatactcaacctgaagtataaatgtaattttaataatcatg

SEQ ID NO: 97528 - DNA, 305 bp, Homo sapiens
tagacacagttgaaaaaatgatgtagtgctgaagacagggattcagtgaaagttaatccctggaatgttgaggccttaaccttcttcccagatttttaaagcacacataaccagactcatagcttctaggcaggaaatagggtgtatcttccctggagaatatgaccagtccaaggaaaaagatatcaagataccaacgtcagaggctcccagatgcaatggtcaccctagaaaacctaagactggccgggcacggtggctcatgcctgtaatcccagcactttgggaggccgaggcgggcagat

SEQ ID NO: 97529 - DNA, 259 bp, Homo sapiens
gggaatctttgtttttataaaaaatagaattcatactgacatttccagtacaattaacatcacagggtttttatttaactttttggatttttataaatgtatcatttctcggttttgttgaaaatcctcattcctaggccaggcacatggctcatttctgtaatcccagcactttcggaggctgaggcaggtggattgcctgagcccaggagttcgggaccagcttgggcaacgtggtgaaaccctgtctctacaaaaa

SEQ ID NO: 97530 - DNA, 628 bp, Homo sapiens
gttttttttttcaaattatttaagcaaaggatcagcaatgtcagtcttgaaacacaagtcttacttacactgctacaaggtaaatatcctttgcccttactgaatgcagcccccactaagttattaacattgtagaaaagattcgagagcaaaatttaagtgctcatgcaatttaaaataggctgaattaaatggaaaagaagaggggctcctgaaaatagggtaagagagccatggcctctttatgtcttcaattcagactgctcaacaggagagtccactgagccacagaaaaacaaatccggattgttatgaactgaatgtctgtctccaaaattcacattttgaaatcctcacctccaaggtgatggtgttaggagatggagttctttggaaagtaattatgccataagggtggagccttcatgaataggattggtgcctttccagagatttattttcaccttaccccttgcaccacatgaggacgcagtgagaaggccctgtctgtgaaccagaaagcagaatctcaccagaagctcaatctgttggcaccgtgaccttggacttgccagccaccagatctgtgaacaataaattcctgtcgcttataaaccaaaaaaaaaaa

SEQ ID NO: 97531 - DNA, 517 bp, Homo sapiens
gtgttctcccagatccttctcagaggtgcatgtgaacattgccctccccaagcgcgctcatcacctggtgagcagagtcagccagggcctggggaacagcctcacaggagctctgggcctcccaggcatagggcgtgggccatgtcaggctcagctctgcaggataggtcacagtttaacagactctgttgaaagctctttcctgtcccgcatgcaggcttctcactcacagtttactaaggacttaaaggtaggccatgtttgtgatcactgccatgaaaacattgagcaacagatcctcggtcaggagcctaacctgctattacaacgttgttcctgtggggaaatctgcttctgtcttttcaataaacattagccgtcccgagactgtagcacacagtctgagaaagtgaggaatgaggatgggaataatctcctccccagtcccccaccacctctctacctattcacctaagacctgcatgccaataatacccaaaatttatacagccaggcc

SEQ ID NO: 97532 - DNA, 869 bp, Homo sapiens
acccagaagagacagcacttctttaggtcctgtacggaaaccatccagatgcttccatgtgttgcagaggggatgttagctgagatctagaaaatacctctgttctgggtgttttcataatccagcaccccactgggggctcaagtcacatatttctgcccaatagtacagatgagaagaccaaggcctagaggaaaggagaaaactgccaacggctaatagcaactgctgaaaacccgtccttggctgccagcaggacctgaagctgaggtcacttctctctctggaaagactctgaggatggaaaagtacagccagcccccagactgggaatcctggaagacataactcatcccagtgccccccttcccttggagtccttggagtccctttccctaaggaagtccacttgacagccagttcacggagccagtggcggcgaagaaagagatcaactgattgttcgtgcaaagtcccttttggaaaacagaacccctgaccgagatctggaggacagactccggttgctggccaggtccctgtggcagctgtgatgggatcagattcccaggaaaggaggaggctgccacatttgcaaagggagcaaagaggacaggcaggcagcctctgaaaccagagacagacacagagaaaaacagagagtgagaaaatgctcccccgaagacatagtgagattattttctgtaaacctgtaagggaagacaaagttacacagtgagtccaccttctgaaaagcaacaggcagacaggaccgagggccatgctcttaaggggagccgtgatggagccgggaggagaggcgcatcctcagcagagcttccctcccttgcacacgagctgacggcgtg

SEQ ID NO: 97533 - DNA, 704 bp, Homo sapiens
gagggaagggaagcggctgaactattccagatgcacagccatctccctgcctccccacgagatacctctctgaggctctctaaactaccactgaccaaagagccctgtgtccatcctgcaaagctaatggagtataacagtcaccccagcaaggtcagaacacagtatcaaaccccagcattcagaactcacagctgtgatcctttgccaatcaaacctaggtgtagcgtgcctggcgaaaatttaaattcccttcatataaatgaccaatattaaacaaaaactccctcctttgtatttctttagtctgtgatgatgcatacatttatcattttcagggtgttttcataatccagcaccccactgggggctcaagtcacatatttctgcccaatagtacagatgagaagaccaaggcctagaggaaaggagaaaactgccaacggctaatagcagtgagtgagtgactgggtggcagggctagggtgagaacccgtgcaaccctaccccaccactggtatgtctctacctctgcacactatttcccttggcagctacccgctcccaggtggtcacctgaatggggctcagttgggccttgaactggcctgagttcctgggaacgtgcaagcctccagtcaagcgtgaggaagatccgccatatccccacgacatgatacgggtacgagctcgattcgtatcga

SEQ ID NO: 97534 - DNA, 342 bp, Homo sapiens
ttatgttcactgctcttcaacactatcgcttattgtcttttgctaataacagtgcagacattttctttttcctaataacactgtaaatagtgtttctttttttttttgagatgaagtctcgctctgtcaccaggctggagtgttgtggcatgatcttggctcactgcaacctccatctcttgggttcaagtgattctcctgcctcagcctcctgagaagctgggactgtagacatgtgccaccacgcccggctaatttttgtacttttgtacttttagtagagacggggtttcaccatgttggccaggatggtctcgatctcttgacctcgagatccgcctg

SEQ ID NO: 97535 - DNA, 269 bp, Homo sapiens
actgggtctgcaggggcaggcctggagtctgagacaaccagggatgatcctggagcccggatccgccagggtgagtctggaggccaagtctgctggggtgggtttggaacctgagtccatggatggtgggcctgggtcctgggtccactgcagcatggagccatggagactagtatgtgtacatatatattaggtctacataaactatcaatcaagttaaagggcataatgacatttttatacatggtgtattcataatttcctactac

SEQ ID NO: 97536 - DNA, 328 bp, Homo sapiens
  misc_feature (27)..(27): n is a, c, g, or t
  misc_feature (35)..(35): n is a, c, g, or t
  misc_feature (37)..(37): n is a, c, g, or t
taggaataatacaagaaaactaccagnacccgtgnanaggccgcttgtaggagttggtatggacagacgcaatctgcatgctatgaaagttggcagcctggcaagcaacagattcatactgaaatatttacagattacattatacaatacttgaaattggcttcaaaataatatggaagaggagaattggacaggcatatagatgaagcagggtggccatgagttgatggctgttgaagatgggtgacaggtacatggggattcattatgctatactctctacttttgcatgtattcaaaattttccataataaaaagtttaaaagaa

SEQ ID NO: 97537 - DNA, 168 bp, Homo sapiens
ctcatagaagttagcaaggacccagagaactgagttgccataacatctctctaagacctgcttcaggcagtgcatttcagcaaggagcagaccatggaggatcacagggatctgaatttgcaggtacaaatacagtcagttcagagttgacactcactttcaaggatg

SEQ ID NO: 97538 - DNA, 739 bp, Homo sapiens
ggattagtgcctgtgaaagagctcaaggttgaagggatcaccctctcgcacttttgccatatgaggacacagcattcacccccctttctttgcctttccatcccttctgccatgtggggacacagcaagaaggcccttaccagacacaaaacctgccagtgccttgatcttggacttcctagcctccacaactataagaaatgaatttctgttccttatgaattacccagtctgtgatattgtgttttagcagcacagatggactaagatagtggggagcttcctcctgggcctcctggagagcccacaccctccctgccctctcccacactcctgcttccctgactctccaatagatgtctctgcaggaatccccttctcaggctctgctgctaggaagatcaacctaagatacattgccttgtccatcgtatgcacctcttgcctgcctgtaaagctttctctggcgatgtaagactggcaagtgcagacaacataggaagcacccggggccaagtgggttcctgcagtctggcaggtatggagggagtgccatagagtgggcatatatgaaagccactctgccagggcccagagctgaggaaaccagcgcatggccttccctggggcactcaggcatacaccaccactccttggtgagctggctctcctgatgccaatactcactccttagccttccttccttacttctaatgccagaagaaaaagtagggggagg

SEQ ID NO: 97539 - DNA, 361 bp, Homo sapiens
taaaaagatcaagtagtgttcctaatattttgtcccttctaaagtctctctcaatacttataaggagatgacagaaactttgaagaggtcaaagcaactagattcaaggctctagagtaattatctctggttctcctactgaactgtatcttcttactctcatccccagtgcctagtacaatgtttgggaaataacacacctttaatctttaatgagtaaatgaatatctatgactataatgtcttccctctatagttcagcaatcttcattttttttcccttcatgcaggaaactcatgaaaactcaccataaaatttattatcagtaattcaaagagatggcaacagtaacttctcagt

SEQ ID NO: 97540 - DNA, 504 bp, Homo sapiens
ttttttttaacggagagagtttctctagacttcaaagggggaatgtgtgaagggagaactgggttttatctttctgcctcttacaacattgggtcactagaatcttaccagcaagaaagaggagtcactgtgtgagtaaagagaaagcacatctggaaaatatcaacattttagttcattaatggtgtgtttggaaagcaaaagtgcatgttgtattatcttttttttggtcagtggaggcctgaaggaggggggcactgaaggaaagaaaagaggggcaagacatcatctcgtttccccttgtacttgctccccattatctcttcttccttcatcttggtgagactgcccccacagagcaggccaagccaatctccaaaacattaggtttccaggcagggcttttaggggcagctatcccctagatgcagattggcttagaggtccctgagcatctgctgtttgccttcctggaaggcagccctaatgcacaatccatcaatc

SEQ ID NO: 97541 - DNA, 395 bp, Homo sapiens
aggtccaaaccctccatgagattctttgatgacttcccaaaaggcaagagaacctctaactttactgagtgatttttttctggaagaaccaagaatgacattccactgttcttcaccaataaagtcctgcttggcccttttgacaggcagaattcagttgtcccctggtgcactgcgcataatccctgggactgtaaatatgatggattttactcctgtggttgtgtgatgttacatgccacagttgactttaaggacaaggaactgccctctatgggtatgatctaatcaggtgatcccataaaagagacagggctctcttcctgaagtcagagagtccaaccatgtgggtgattcaatccaagggaaattctccatcactggcttcaaggatg

SEQ ID NO: 97542 - DNA, 536 bp, Homo sapiens
aattggtttagatgcagttggggggaggattcagatggcaattgtgagaaactattccagtgaaggccaagctagcactcattgttttgttctggcctcatgtatactaagttaaattgtggacatcttttctgagtgtgagttggagatgctagtgccttaactttttaattccaggagtttcagtataaaacataaacctgagatgaggccaatgtaggaatgaaatgaagaggaagagggcaagatggcagtctttttggttctcttaagtttaccagaatgaaaattaatgatgaagtattaatagaacttactacattttacttggaagtaaatgttaatgaaaaccagatgataatgaagattaaaaaatgcttacttatccaaaggaagtaatttctacttgtgaatttctatgatctaatgaggaactattttctaatttgaattgtaatagtgtaccaagtgagaacataaatgacgctagtataatctgagtccacagtatagaatttttactaagccagttccaa

SEQ ID NO: 97543 - DNA, 470 bp, Homo sapiens
tattgcggcgcctttcccagacctgagactcttcagctacttcctatttcaggctgattttgagacagtgaaatacatcaaggacaagttctggggtgtcccctagctcattttccctactctgtgaaccaagaacttttctcagcccctccagacctgacctactcctactttattaaaaaaaaattggaggctggcaatacggccaaataggaacagctctggtctgcagttcccagtgagatcaatgcacaaggtgggtgattgctgcatttccaactgaggtacccggcttatctcatttggactggttagacggtgggtgtagcccacagagggtgagctgaagcagggtggggcgtcgcctcacccgggaagtgcaaggggttggagaactccctcccctagccaagggaagccatgagggggactgtgctgtaacagtgcattctggcccagatactacactt

SEQ ID NO: 97544 - DNA, 260 bp, Homo sapiens
ggcgtggtcatgtgactaagtttggaccagtggttgtgcacagaggcaatggatgcaacttgactacagatcctcacaactctgagataagctgcttttctactcgctgcctgtttttcctctcccgagctggaagtaaggtgcaccagtgttacccatgcagataaggactatacctcagggaatggcagagcaatagtatggaaggacattagggaggagaggtgctctgccaactggagctgactggactgttagtg

SEQ ID NO: 97545 - DNA, 226 bp, Homo sapiens
aatcaagcaaaaagaagtaatagcttccaccttttgtctaatcacaccaatccgttttatgtccatcctggtatttatcactaacctgtatatcctttctacatatttattttagcgtcgttattatatgcccccacatcagagagtaaactccatgaaaggagagtctattttcttcaataccgtcctgtattctgcctctcatgtacctctaacagtgcctaca

SEQ ID NO: 97546 - DNA, 115 bp, Homo sapiens
gtgtatatatatatacatatatatatatacacacacacatatgtaattccaaaatgttgtggtacagatacttctcaaaaatttgtattgtgaatatgatcagatctctggtgag

SEQ ID NO: 97547 - DNA, 185 bp, Homo sapiens
cctagggtacacgtggacatgcctatgacttttctgctttgtcttatgtttaaaaatgtccttcagtcattgcaggtcacaagcaggctatcagctcagtaattaaaataattcggttcttcatagtgaatgtaattctaaattagattttaagttgtaactccctgcttcagcaatggtgatgg

SEQ ID NO: 97548 - DNA, 606 bp, Homo sapiens
acaggtgaaaaggttgaatgtaggaattcgactacagacagacactagttaagtattgtagggatatatagcatactagagactgagctcataagtactttgctacactgaatggttatgaatcatttatttctgaatttgccattgtatcatctagacaaatatttaataatctctctagcaaatgctaaaagccattgtgataatgaaaatgtagcaagattcaggcaactggtaaattgtagtagagttcattggtttcttgttttatgaccagtcaaatacaaatgtcacaatttctgggttgccaattttggaagccttcttcaaacgcctttataattattataattatacacttcccactggcccccccaccacccacatttattccaggcaatgtctgtttcccactcatggtacacaagcacagcttaaaaagcaatggactttggaaggctccatcagctttgcaggcccaaaatagtacatgaaacctttgcttgccctaaggattccctctttaaaagtctttcttcacatagtgacagtgaaagctccagctcatctttgatcttgctgtattctattaatttgaagtaagga

SEQ ID NO: 97549 - DNA, 425 bp, Homo sapiens
cattctgaaatctttgccctatgttgaagaaatgtataaaggctccacatggaacccagaatgtatgtaattgcacactcaggattactatgaaatctggcactaatcaaactgatacggtgctcctttcaagtcagctgtctcttcaatcaagtccttcactgaagaaatttcaaatcacaagtataaatctctgtagttgtacttctttacaaagtcgtacaactgaatctctttataaaaaaaaaaggaaggctttttatttctagacctctacttcaagtgaaaattaaacaattcaattcattaggctgctttttggcagtctacctataggtttcacaaacgacttttcagagaggtatctcaggagttcatcgactggcagacctagttagcaggacaaccgaactacagggcactca

SEQ ID NO: 97550 - DNA, 478 bp, Homo sapiens
atgccatcaggacgcacttgtgtgcatgtgtgtgtgtatgccatcaggacgcatgtatgtgcgtgtctgcatgccatcaggacacgtgtgtgtgcatgtgtatgtgcatgccatcaggacgcgtgtgcacgtgcgtgccatcaggacgcatgggcgtgggcatgtgtgtgcgtgccatcaggacacgtgcatgcgtgtgtatgcgtgtgcatgccatcaggtttgaggagcactggcctctgtcctcccttgggctccctgtacaacagccctgccccaatgcgagtccccaaatcgccacgggctcttctgctctagaacccaccctgtgtaaggatgcagcacccctgcccctcgagtgctttacatcttgcaggaacgctcatcatcttaggccgcctcggcatccactctgaatctaggctggactttctctgaccagaagcggggctgccacccgcaacaattttcagttcac

SEQ ID NO: 97551 - DNA, 694 bp, Homo sapiens
tacaggcaagtcatctttgcactcataaccacatcttttatggaacatcaagcctactctgaggtacaggctttcagaagcctgaatttggaggaccatgcctgaaccaaatggagtctccagaatcaaaactgctcaaaataatcattcatggttctcagaccaaataagatctacttagaaacatttctcgacagcacgctgccatgccgacgcagaccccactctgcacgccagcccccctgcacccaccatggccacagttcagcagctagaaggaagatggcgcctggtggacaacaaaggctttgatgaatacatgaaggagctaggagtgggaatagctttgtgaaaaatgggcgcaatggccaagccagattgtatcatcacttgtgatagcaaaaacctcaccataaaaactgagagcactttgaaaacaacacagttttctggtaccctgggagagaagtttgaagaaaacacagctgatggcagaagaactcagactgtttgcaactttacagatggtgcattggttcagcatcaggagtgggatgggaaggaaagcacaataacaagaaaactgaaagatgggaaattagtggtggagcgtgtcatgaaccatgtcgcctgtactcggatctatgaaaaagcacaataaagattccatcatcactttggacaggagttaacc

SEQ ID NO: 97552 - DNA, 368 bp, Homo sapiens
aatagagttactagattgttagagctgccaaaaagaaatgtaataggtggtgtcctggggctacaactaggcttgctgggcctggatcaaacactttatatttggcaggcactttagtattatgcttggtaaattctcatggttgccttgtttatttaagttcttagaagttttaaataataaaaactttgagtgggctggtcacagtggctcacacctgtaatcccagcactttgggaggccaaggcaagctgatcaacttgaggccaggagtttgagaccagcctggccaacatggtgaatccgcatctctactaaaaatacaaaaaattagctgggcatagtggcacacgcctgtgatcccagct

SEQ ID NO: 97553 - DNA, 473 bp, Homo sapiens
cccaggccagactaattcacaattgctgggtaatcaagaaatgcccctccatagtacaagtgagttgaagcaggcagacacaattgcagctagacctggcaagccagaaatgcacttccaaagtgcaggtggactgaaactggtaggcagggaactagagctggaactacagctgaaactaacaagaaggatatccccctccaaggtgcaggtgggccacagctatggagctgactgctgtagtgcttacaagactctctaggaatgcattcatggcggtatgaatggaacttgacaggaagccatccacagaattaccacttaaactcgaaggggatgagtactactagatgcctctcacgtgtgtcactggcaaacaagcatgaggagcaagaagcagcatcaagaaacacattggaatagcagagaaaagccccttcttcctcactgttcctccagtgccctctattgac

SEQ ID NO: 97554 - DNA, 355 bp, Homo sapiens
tccatcttcaaagccagcaacattgcatcattgaatctctctcactctgatcctaaccctctggtttccttcttataaggacatttgtggccacattgggttcaccaagtaataatacaggatgatagtcacatccccaaattcttaacgtaattatatttacaaaatcccttttggttaacatattcagattctggagattagagcatggaaatctctagcagggaagaggtgttattctacctaccacacagtcaatcaacatgctcaatagctttatagttaggagctttgattttatatttatactgacctttgtttaattccagtcctgtaaaaaataaaaaatataaaa

SEQ ID NO: 97555 - DNA, 287 bp, Homo sapiens
tcttgcaaataaacagcttagttaaataaactcaagacaccatcattaaacaattcaataattaaggtctaatactccttttattattaatcataatcacttttttatttgaattgagctttacttagtttattgcctctattattgtctgagaggagcactcttatattgtctgctttatgcaggcaagtgtggttttaagatgagcttgggtcaaacatcaaagcaaaaaagatttgactataaatcctagcttcctcattaaccagcttggtcacctatcacaa

SEQ ID NO: 97556 - DNA, 319 bp, Homo sapiens
aacattctcaaagatagagcatatattaggccataaaacaagtctcaaaatcatatgaagtatgttctcagactgcattgtaatgaaactagaaatcaatccgaaagacttttgaagctacacaaatacatgaaaattaaacaacatcctcctgaatgatctttgagacagtgatgaaattaagatgaaaattgaaaaagttctgaactaagtaaaaatggaaacacaacatgcccaaacttctgagatatagcagatacattcctaagcaggaaatttatagcattaaatgcctacatcaaaaaatttgaaaagatca

SEQ ID NO: 97557 - DNA, 398 bp, Homo sapiens
tctgaggaatgagatctaaaggatgaaagatagctgggtgaagatgggatggtgaggggcaagggaagagttctggtcagaagaaacctgtagagaggcccttgagctgctagtaactggctcatgagaaagcagtgaatcgtccagcttgcagagagggagcacacaacagagcgaggtgggcctaggaaggacctgcagaagctagagagctgcccagagtagtatttgcaggtgtaatccaggcagatttctccaggttccaaagactaatgttttgaaagaggcttacctgtgtgttgctctttctgagcccaaccccacactgtagccccctttaacttctagtgtctgatggttgcaattggcccaactttgtccctgctgaagacatcccc

SEQ ID NO: 97558 - DNA, 584 bp, Homo sapiens
aatgcaaggaaacttgttccttagtgggcacaatgagaacaccagcagccaagggaggaagcgaggagtccttgaattctctaagaacctactgcagactgccttttggcaagtgttcatggagctgtgctctaggaggagttcctggtcgagcagtctggcctgggaatggtggtgaagcaccagccctgtcttcttgcatcctgacttataactgggagtctccagtcttccttctgccacagcccagtgtgccttgtttcgagccaggcaaaatggctcaccatccctgaagaaacagcccacttacactgtcccaggttcactgtcacaccctttctttctctacatatctgcgcatccttcaaaggcctgatcaaatgtcacttctttggggaagcctgccatcatggatacctactttttgctgagctcatattacttttacctgcataccttcacacctaacttatcatcatacgttttataggtgcccagtaaatatatgttggtaaaatgaatagtcctgatgtactttaatgttattttggataaaagtcatacattaaataaacaaataggat

SEQ ID NO: 97559 - DNA, 404 bp, Homo sapiens
cctcctgaaacctttttgaacatgatataaaaaagaattttaaaaagcaaaaaggcataaacccgtaagtacagaaaaaaaatgggagaataaacaatagtgacaagaatatcaacgaaacttatttttttgaacaggacatacatgtagttcacaaaacaaaatattaaaatatggagtaaaaaggctgattctcatttctctccccgtcttccctcattatcctttgtccttgtgtccccatttagagtcttctagattttctttaggcatacacaaatttttttccacacaaaaggtgcatgctatagacttctggaccttgtttttttgtttgtttgtttgtttaaaaaatgtattttggattgcttgagcccaagagttcaagactgtggtgtgctatg

SEQ ID NO: 97560 - DNA, 309 bp, Homo sapiens
tcctgcattattacccatgaggagaagccaggaagctctgtatcaggatcaaagcagatgacttataagagttagacaattcagtcaatccttaccctgggagaggaagaagggatggatgaaaggattacaatggagatggcatttgccagtgttcagggagggaatatcgtagttacttaagtcagatccagttataccttcttatcctgattatcataatcagcctgtctcactagaatttgcaagctcatgttaattgtgtagaactttccatggcacctcggtttctttgattgaaagctatta

SEQ ID NO: 97561 - DNA, 797 bp, Homo sapiens
agacacattctaagcaaagcttaaaccaaatggatgaatcaggctcctcttctgtttctgtggttaagaatacctacttctatgtcatggtaatgcccacactacaagatggattgccagaagacagaagaagccatttcagtgttttgtttctttttaaacttttctcctcggcacaagacaatctcactagagaactgcgtctataaatgtgcacattccccgacacaaccagagttgcctcatcctcaaggtctatttttcagtttggccttggagcagggttccagaatttgttcaactcctgctaatttagcaactgtttcttgatgatttctgctttggtgacaggcacacttgatgactgtcccatagagatacacaagcataaattctgtactggaaggctccagtctggaaagtgtgagtactgcacagaaaacatagcaatggaacaaaagcaccatggctctgggctgttgcatggcctgttctcatgtgtggataatttatatgacagggcagatggagaccctgttttcagaatgtgtgtaactccactcttggtttgctaagagaatgcttatctagtcccagcatgcaagtgggttaagatattttacttagatttatttatgcatttacacatccatacatgcagtcaaaaatatttattgaacacctgcaatgtgtgaggctctatgtgccaaagatagagcagtaaataaaacagaaaaatccccatcctcatgaattacacattgatggaagacgtggggacaatacgcaaaataaat

SEQ ID NO: 97562 - DNA, 423 bp, Homo sapiens
caccataacgtctcagtacctcagttctctgactgtaaaatggagatgatgataataatattaatatctcatagagttgttgtgagggttaaattaataaatgtaaagctcttagaatgatgcctggaacatattaatcctcaataaatgttagctacacataaaagccttctttggaccgtctcggactagttagctttgctagcaccaacatggtaccttgtaattgccttcattacagcacttatcacacctgatcatattcacctgattgtcttctcgtccccctttgatactgagtacaggagcaatgtctgatatttcttaccactataaccctagactccagtatccagcacagagctgacaccaataagggaagtgaacattttttttaaagaactcttcgttggccagtcgcag

SEQ ID NO: 97563 - DNA, 375 bp, Homo sapiens
tatttttagtagagacggggtttcaccatgttggccaggctattcttgaattcctgaacccgtgatccgtccaccttggcctcccaaagtgctgggattacagatgtgagccaccacaccgtccatatttgtatatctttgaaccatcaccacattgtcttaattactgtagctttataaataaatcttaaaattaggtagtgttagtcctccaactttgttcttcatttacaaaattggttaggctatgttaagtctttgcagcttatcagtcgctacaaaaatgtaatttcgattgggattatttttacacaatacatcaattggggacaattgagatctgagcaatattgttcaatccatccatctttgtat

SEQ ID NO: 97564 - DNA, 348 bp, Homo sapiens
atcagtgagttcaaagacaggcaatgtgaaaatatgcaaaggaaaagaaagaattaaagaaagaaaaggaatgaagaatgcctacaagatatagagaataacctctaaagagcaaatctaagagtggttggcattcaaagggagttgagaaagagcaatggttagaaagattatttaaagaaataataacagaaaacttttgaaacctagagaaagatataaatatctgagtcaggaaggtcagagatcaccaaatagattcaacacaattaagactaccccaagacatgtaataaactcttaaaggtcagggtcaaagaggattctaaaagcagcaagaaaaaagaa

SEQ ID NO: 97565 - DNA, 466 bp, Homo sapiens
tagcaaatacagtaaacactgaagaagaaaagatcactgaacaacactcttactaacttgatctagttgacaattataggatacaacaaccacgagaagcagaatacacagttttcagttacacagttgtgtgtaagcaacactcaccaagatagaccatattctgtgccataaaagaaatgttaacgaatttaaaagaatagaaactatacaatgtatatttttggatcacaatacaattaaattagaaatcagtgacaaatatatttgggtaatacttacatatttggtgactaaacaatacactttaggctggtcatggtggctcatacctgtaatccctgcactttgggaggccgaggcaggcggatcacctgaggtcaggagttcaagaccagcctggccaacatgatgaaaccccatctctactaaaaatacaaaaaattggactgggtgcagtggctca

SEQ ID NO: 97566 - DNA, 275 bp, Homo sapiens
ttttttttctctcgcgatacattttatttattatgtggtgtggtggcctagctgctgactgtgggtaacagcttcagcaaagaatttgacctcaagcaagatgaactccaaataacgcataaagtaacatcaacatgatgcagtgtgtgtgaaacagatctcggtcccgtaagagcaaaagagaaggacaaatcagatcatcacacgggatgtcttttttgtgcgattttgcattttcccattcaaaacaaaaaataaataataaatttgaagct

SEQ ID NO: 97567 - DNA, 153 bp, Homo sapiens
tggaatgagttagccaagtcaccgtgccaatgagtggggaggcagggcaaactcagctccggaggctctgccagctctgggtggtgctgagtgaaccctacccccacatatcctgcaaaggcactgggaacaaggggttgggtacccctggac

SEQ ID NO: 97568 - DNA, 181 bp, Homo sapiens
cgcaccgtcagccaagaccacagccccacctcctcaacagctgggcccacgccatcgggggggcgttccaagagacttaaaaaaaccataacccaaccccgaggaggtgccctctgaggtggggtgtcccatactagagtcagggtgacctgaggacaggccaggcacacagggccaccct

SEQ ID NO: 97569 - DNA, 125 bp, Homo sapiens
gcagaacatgacttctttcccgttccagctcttggaagtcgctcaggaaatggagctgctgtgtcagtgccttcctgatccagtctccgagcagccagcatggccattgttcatgagtctgggtg

SEQ ID NO: 97570 - DNA, 491 bp, Homo sapiens
cgggacccacatcccgggtcgcataatgatagacttaggatgtgaagcaaagaaactgagttgccatcattaaatcttatttgggtggaaagaacttatggagtaatgcaacccaacaggacttcccaagatgatgaacacattctatatctacgtggtccactatgatagctactggttacaagtggttactgaatgcttgaaatgttgccagtgcaaatgaagaactgagttttaaattgtatttcattttaaccaatttttttatttaaaaattttatgcaaaaggactgaggccaatccaaaatatcttacttaacccataccttgttgaaatactgcaatagagaatagtggaaaacatcttttttttttttttttttttttttttttgggaaacggggccccccttttttcccccaggggggggggggttggggccattcccggcccggggaccccttgggacccggggggggggggggaccccc

SEQ ID NO: 97571 - DNA, 389 bp, Homo sapiens
tcttagccacaccgtccccaacccattccaaatttcaccccagttgaatttttcctctacggaaacttcctcttcctgaactcctgaattaataatctgcaccacacactcacgtttaatcctttatgacttttcagggtttcctgcagctgactgatctttagccagtttgtaccagtttggccgtgagtctgagtggttcagtgcccacgccacactggtggttaaatattttgaaaatcacttccctggtttcctgtgtcttcagtgaaatggaacacactcgtgtgttagtgctcaaacacagagcctggctctctgcaggcacaacacaaatggtagcagtagcagtagcagtggttgttactgtttattctgagtcagatggt

SEQ ID NO: 97572 - DNA, 442 bp, Homo sapiens
agcttctccggtgggcagcttttcatatgggttctttggggaatgtgtgtgtgtcctgtgtaatgccatttggagatgacacttggaaacttacacccgattttctctggactttgttctgtgagactttttcctttgctgattttactttgtatctttttgctggaataaaccatagccatgagtacaactatataacgagtcctccgaatcttcctagtgaatcatccaatcaggagtggtcttggggacctgaaaaatagtgacaatagccaatgttggcctaagtgtgggaaaacaggaccaccaaaactatttatggaaaggcaaattggtaccaccattttggggatgaattcagaaatgttaagataaatcaaagatatctatgtccattttcaggtttagataatctagagggaaaaaccccacacatttgcta

SEQ ID NO: 97573 - DNA, 258 bp, Homo sapiens
ctgttggcagtgtgttggattttggccattttcataggtggtatcttgtgtttgttttaattcacagttccctagtgattcataatgtggagcatctttttatgtgcttacttgccatctctatgtctaatttggtaaggtgtctggtcaggtcttttgtccattttaaaaactgggttgtttgttttctaatagtgaagttttctacagctctgttgtgtggttacttcttttttacatcaagatgagtcttactac

SEQ ID NO: 97574 - DNA, 685 bp, Homo sapiens
tgcattgggtcttaagacttccccttaaaggtgacacatatcccctccactcacatttcatctggaaaaacaagtcacgtggtcacaatgggcaaagaagtgcccatggacccagagggaggagatttggaatactagtgaccatgtcaagtgactaccataccatataaagaaactttgcaggattttttcactttaatttaaaggttaaaacatgcagctgtgaaaagtcctgggcctgattgcttcactggtgagttctaccaaacatttaaagaacaaataccaatccttctcaaacttttctaaataactgaagaagaggaaacatttactaacttatttatacaagatcagcattatcctgatacggaagccagacaaagacactacagaaaagaaaattatagatcaatatttcttatgaacattgatgcaaaaatcctcaacaaaatacaagcaaactgaattcagcatagtaaaaagattatacaccatgaccaagtgggatttattcctagaatgccaagatggttcaacatataaaaatcaatcaatgtaatataccacatttacagaataaagggaaaaaaacataaccatcttaattgatggtgaaagagcatttgacaaaactcaacaccctttcatgataaacactcaacaaactagtagtagaaggaaa

SEQ ID NO: 97575 - DNA, 583 bp, Homo sapiens
ctcaccgcggaagtctgcagcttcactcctgaagtcagtgagaccatgaacccaccagaaggaagaaactctggacacatctgaacatctgaaggaacaaactctggacacaccatctttaagaactgtaacactcaccgcgagggtacacggcttcattcttgaagtcagcgagactaagaacccaacaattccggacacagcatgatcttggttcactacaacctggatctcccagagtcaagcaatcctctcgtctcagtctcccaagtagctggaactacaggtgtgtgccaccatgccccactaatttttgtatttattgtagagacggtttcagcatgttgcccaggctggtctccaactcctggactcaagtgatcctctccacctaggcctcccacagtgctgggattacaggaatgagccaccacgcccggcctaattggaagttttagagtgcagtggggatcacgtgcgtagaggttactgctgccttaattaaaggagacaacatgtttcataaaacttggaaattgtagagggtgtggggaaccactcaaattcagaatatcaaaacaga

SEQ ID NO: 97576 - DNA, 508 bp, Homo sapiens
tatggaggcccactcaaaccctgcgagtgtatggagccccgcttgcatgtttggagccctggcagcccccacctgatgtgcctgccccaggcagcatggagcacttcctggaggaagtaggtctcagccagccttttctagatgggcacgggcaggcactggatggctatttaggcatgagggtgccacgagcagagacctggaagctcaagtaaggtgcagccattagggtgccaggagaaggaggcctagtggcccagccagcccctggggttgccctgtccagagcctacacccaccaggtcctcactctgaactggcagtggcagaaccacgacttgagaaaaaaagtcctttctctgagctctgttcctctttccattgctcccgctcttagagtcttcctttttttaatatccaatttggtcgccttccttggggacagccacagaaggggtccagccctgttggcagcctcttgcccccgcctccactaactcgcctccag

SEQ ID NO: 97577 - DNA, 260 bp, Homo sapiens
agaggtcacaaggtccggccaggtcataggagcagggagaaccgaggtggaaagccagccacctcccaagctgggctcgaagctgctgcggcccccagacccagacccaatgccgcttccggggcggtctcccctggagaagcagccgtggtcctgacgaaggcccgtgccgcgccacaggaatccgggagtcacggctgaccacctgcgcctgtgccccaagatggcgggaacgggtgggctctaaggtagcaaaacgc

SEQ ID NO: 97578 - DNA, 349 bp, Homo sapiens
aagagtgctcatactctacccaataaacttgcctgggggcatgctctggtgctctggatgtttgggagcataatgtagactcatataccaacggttcttgggtactccactgctcttctgagactgtgaagaacctgacctccttgtcaccaagtgtgctggccttgcctcccattccttccttccacctcccattgttgcctccactggaacagaccttcctcccctgcagctgagctccctcctgcccagcatacacagacctccatcatgcccacactttgccccaaatgggcctctctgtgctgttctagtcctgcttttatctttccagctgactcatctgtat

SEQ ID NO: 97579 - DNA, 686 bp, Homo sapiens
aaaaattctacagtaaaaatcagtcctaaatgtagaagggaagatcatttaataacaaatcacaaaccactcttcatctctatttgctctgcattttcagaaaccatagaactttatattacaagttaatcaatccacatcacatctctggagagaggatcagcataaaaaaacaaacaaaatggaaaacaggagccatgtgtcagaattaggctagtgtcacaggatcttctatggaggtgacgaagcctcttcattattttctagaggcaattaagcacattttccataaatctacatggcacaaaactttctaacatgaaagtaaagtttagttgctgttgacagggttaggtctctatacattgtatctcatttttatattaaatttgtttttatcaacatcattaaataattgatattctcgcagctcttttccatttcctgatgcgtttttaaattgcagcctcttgtctgtgacaccttcccacctagtttctgcacaattcctgcacaaggaccctctgcgttaacatcggtcctggggaaacccactgtgcctgcttccaaatggaaatcagggcggcgaactggggctgttttgctagaggtgctcctggtcataccatgcaaaacgccttgtctgtgtcatagtcatttacctaatggcaaagttcttggaccat

SEQ ID NO: 97580 - DNA, 360 bp, Homo sapiens
  misc_feature (349)..(349): n is a, c, g, or t
gtggatatatagatgtaaatatatatgagtaaatgtatatatatatgagtgtgtatatatatatgtgtttatacatatatcggcatagatatatgagtgaagacaatttctgaaataaagatgaatacaaagtattatttctatgactcagatatttttcaataccgttttaatatattatgtttagtctttttgtctatgtatttctgtttctgtttgtgtgtctggtggtatgggtatgtaattgaaatttacatagtatttatatagtttcatatttttgtttaatttctatttcatgctatatcctaagcatatttatatcattaaaactgcttcaaaacagganaaaaaaaactt

SEQ ID NO: 97581 - DNA, 420 bp, Homo sapiens
cctgtaatcccagcagtcggacgctgaggcaggaagaatcgcttgaacccagtaggtggaggttgtggtgagccgagatggtgccactgcactccagcctgggagacagagtgagaccctgtctcaaataaacagataaattaaataaataaataagctcactctcaataaaaaggaaacagaaaataagaattaagtattctaacactgcaggctgggcacagtgactcacgcctgtaatcccagcactctgggaggccaagacgggtggatcacgaggtcgggagttcaagaccagcctggccaagatggtgaaaccccgtctctactaaaaatacaaaaaattagccggacgtggtggcaggtgcctgtaatcccagctactcaggaggcgacaaagcgagactgtctcaaaaaaaa

SEQ ID NO: 97582 - DNA, 708 bp, Homo sapiens
tcgagtaaatttactctatattttttagagatgtcgcatgggtgggaatttactcccactaaatgttttgatggaaacattacatttttggagtgaacatgtgtcaacatcactgtggagaaaaggttccaggattctctgccagccaaagtcatcaccataagacactggttgggggcctggcaggcggaggtgatgcgaccaggctggtagtggggcagaggtagccagatgggtaggagtctgcctggctggtctggagggagaaggggatctgagctgggggaactgaataggtggtgaggaggaagggagtagggaggctgtgggctgatgacatacattaaccacccacacagctcaaaactaggtgagtggggagcttgaggggcaggaacagcgagcagaggctctgaagtgttgaacactggcagctcagacccgagggacaggctggggccagattgttgagggtcctagaatcccagctcccaccagtaactagcgatgtgagcttgggcaacttttccaacctttctgtgcttctgcttcatttttagtaaaatgtagcatggatagccacagcttatggctctttggagaattaaaggagataatgtctgtaaaatacctagcgctgggcctggcacatagcaggtgccaggacacatttgctgtttgttggtgatgataaagccacacaagtat

SEQ ID NO: 97583 - DNA, 636 bp, Homo sapiens
tgagactttcagttgtaatttggtgctgttttgaagtggcatcaccttttaaaatttattatttatttatttatttatttattatttatttatttagagacagactcttgctctgttgcccaggctggagtgcagtgacatgatctcagctcactgcaacctccacctctcgggttcaagcgattctcctgtctcagccttccgagtagctgggattacaggtgtctgccaccatgcccagccaatttttgtatttttagtagagatggcgtttcaccatgttggtcaggctgatcttgaactcctgacctcaagcagtccgcctgccttggcctcccaaagtgctgggattacaggtgtgagccaccatggctggccaaagattttatttttaataaaagcaaaacttttttaaaaactaaaaatgtagaaaaaaatcttagacacttagttttacatctccaagaaagcttctgttaaagagtttggtatgttttctccattaaaaaaaaaaaaaataagcagctaggctggcttatgcctgtagtcccaggactttggaagtctgaggaagatggattgtttgagctcaggaatttgagaccagcctgggcaacatggcaaaactctgtcact

SEQ ID NO: 97584 - DNA, 611 bp, Homo sapiens
gggtgcagcatctaattttattgagtaacacagaacagctctcaacaaagagaggatgcagaggtagtccccacccccacagttgggtggtttctctctcagtggctgagtccagggcttttatgagctcagataggggaatacatgctaattggtttgtgagaaaggctaaagcaaaggtgccactcaaaggtgagcatagcagtgtagaaaatcaattaggaaacagtagttatgtgtagggtggggagacatcagaggaaagtgtgtcacaaaggaagacagattctcaatctggtctgtgtatttgactcgttgcttggctttcaggctttgtcttcagcttgaaggtggggtttcactggagaactgcccctatttgcctaggcatttgtctgcctcctgctaatatcaaattccccctctgaagaggtacatctaattgccattaggataaggacagtgacagatcttaactgcttcctgctgacaggggtcaccattttgggaagatgggaagtaatttctcctcagaggcctatctaacggtccccagtaaaagggagccatcatccaaggctccagttgcatgactgtttggagttcgatgg

SEQ ID NO: 97585 - DNA, 424 bp, Homo sapiens
ttcttagagtttctggtagcactaatctttcttaaattcaacaggggatttaatgcttttgttttcagttaagttagatgtacgtgccttccacaaaataacaaggtaatgtaatttaaatacattgtcagtgcattcttggcgtagttttgtctcttccaaagtatcctatttcacaattttgattaatgtgaaaaagatttaattgcaaacctggattgtcatctacatcataaattcctctatgctgtgaaagtgagtgtattgctgtaaatttaaaggatcttccagagttcctaagtcacagaatctaagatttttatttcaaggtttcttgattggtagcttcccaatgactgaggtaatttctaaagagagcatcaaattaattttgggttccttttgcaataccgataagtgttcc

SEQ ID NO: 97586 - DNA, 504 bp, Homo sapiens
atccccccgccgcctttccagagagggttctgcccatactcagaaggagggaatgctgctcagagacaccaagaagaatctagacagacaggccttgctcagtttccccactcagtctattagcattaagtcattcccgttttgtcaaatcatatttatatatagctgtccatacttttatgtccataagcataaaaatggacaatctcccctgtatctttgggtcttcattctgaaggctcctgtgtacatgttaaatgggtttggatgccttttattctattaatcaatctgccttatgtcagtgattttcagggaacatttaaggttcgaagggccttagcccctacaatagcatccagcaaacctatacttcaaaggatgaatgaaagcagttaaattcttctgacatcctcccacaaagcagattcctaagacacatgagttcacatcgcctctcagctgaagatcctacaagcttttgcagtcaatcaattgagctgg

SEQ ID NO: 97587 - DNA, 281 bp, Homo sapiens
cttcctgctccctttccatctgcagctttacttcctcaggtcaccacccccactgccttgtagtccatccccaacaacctaaaccaaggaccactaaatctgcaagtcaacagttcatgctttccttggaaagtggggagcaaagtagtcaaaatagttctcatgcaagtgcctttctaatagagcttcgatgagatgaaacagtttcttgacatcgcctctatgtcctgctgcattcccaaacaacaagcaatagaatctggggaaagggcggggcacgg

SEQ ID NO: 97588 - DNA, 739 bp, Homo sapiens
  misc_feature (17)..(17): n is a, c, g, or t
  misc_feature (22)..(22): n is a, c, g, or t
ccagtggccctgaatgnttttnacttggatcttatccttaaaggaattatgtgtgactaagcatttcaatggcaagaatgccattgactaggaagacagatttcgtcttattatgagaaagaacttttaaagaaaacgatccgtctcaaaaaaaaaaaaaaattaattactaataatattaccaaataataacaatgaactgtttattacataccagaagactaaaaaatgttatctcattttctcctcacaataaccctctggggtaggtggtattcttaccttctaggtgggaaaccgaggttgcagagaggggacttgcccaaggccacatggctagtaggtccccaaagcagtctggcccagagtctctgctctctgttgacttctctggctgactttacagtttccagagtgcttttttaacacactttccagaaagtctggaaaggactttacactttccagaatgctttcgcccagtgtgatctcagcccagagatgaagagaattcaagtctactccatggtggatagatagagctgaacccttagttctctttgaacaaggttcccttctaacccctaaagtgtgcttgttttaagagaaaggagccggctgggcatggtggctcacacttgtaatcctagcactttggtgggccgaggtgggcggataatttgaggtcaggagttcgaaactaccctagccaacattggtgaaaccccatctctactaa

SEQ ID NO: 97589 - DNA, 369 bp, Homo sapiens
tgagacagggtctccattacccatactggagtgcagtggcaccatgatagtagcctcaaacttctgggctcaagtaatccactcccccgccactcccccacgcctcagcttcctgagtagctgggagtacaggtgcacaccaccatgcctgactaatattttatattttttatagagacagggtcttgtttttttgcccaggctggtctcaaactcctggcttcaagccatcctcctgccttgcctcctaaagtggtgggattacaggcgtgagccactgagcctggtggatgttttttgttgttgttgttattgttgttttgagatggactttcgctctgtcacacaggctagagtgcaatggcacga

SEQ ID NO: 97590 - DNA, 180 bp, Homo sapiens
cgcggtgccccctcaccccattgtagatggatttggggcgcatctacttttatttgatccatttgctagctctttgaggattcatttaccttgatgtcgcaccaatcaagttatatgttggagccagcaatgttcaccataagattccatacaaacagctacacttctcacttctttgta

SEQ ID NO: 97591 - DNA, 262 bp, Homo sapiens
ctttaggtaacagaacattcaatgggactacagtgaaatttgggagtcattgacatagccagcaatggatacaatgactgttggaactatatacatctccttactgttgggaaaagtgagaattcctcaccagcaagaaggatagttgtatcttataagggtggaaatacagagttatttacttgttgtatgaaagttgaaatgtgtgtaaaagggtgtatggaatctgagttgtcaaaagaataaacaatgacattaattt

SEQ ID NO: 97592 - DNA, 214 bp, Homo sapiens
tcacgcccacaagactggaccacctgctctgctatatcataactgaatcttgggcatattttctaagaatttttttcttttagagacagtgtctcgctctgtcacccaggttggagttcagtggtgccatcatagctcactgcagcctcgaatttctggactcaagtgatcctcccacctcagcctcctgagtagttgagactataggtacatg

SEQ ID NO: 97593 - DNA, 408 bp, Homo sapiens
agcctgtagcagggagggaatgaaggcatgcagggttggcgtgtgagtgaggaagagggcttgtccccctttcccctctgtccctgcccccgcctctcctggggacctccttgcagaccctctgcagctgtgctcacatcccactactcagcctcactgctgttctaaaaaggcagcattactgcctgctgatcaggtgatgaggaacctgcaacccttcccaaatttataaagaaaacagaggaattcagtaaattctctttctgctcttggagtaggacagaccagtggtcagttctggggacagtgctcctggtgtggagacagtgttggctggacacacccagcttgggtgcactggggtcaggtggtcaggtctaactgcatccccctcctgtcactccatct

SEQ ID NO: 97594 - DNA, 353 bp, Homo sapiens
ctctgcccccgttaacaataactctatgaatttgactattttaggtacttcagataggtggaatcatacaatatttgctcttctgtattatttttaaataaaaactcttttgatgagataggtcagagaaaatccattttattgccctagtttttagtacattttattcaaacaagaacccagcaatagttaacttgctgcaatgtctactgagacgtctaaaccaaaacatgtcttgctgatgccagcttttgccctcttcacaaatcctgcttaggaaaggttcatgacactgccacagtaggcctgaccctgccagggaaaggcatcaccgcggttctgggtagctctgg

SEQ ID NO: 97595 - DNA, 805 bp, Homo sapiens
tggagctgctcgtgtggaggccagggccgtgaggcagttgagttggaagcattttctcaggctttttggactgggggctcacctatgaggaggcctggtgtcgatggggtggggtgcaccaggcatgtctctgggatgagcagaggctgagggagccccctgcctttcccccacaatacggccttctccatccacactgggaccccttccaaggccactttctgacctgaactttgtgctccagaagatttcacctctttggaaagagccagagacacttatgggcaggctcagccttcaggctgcctgagagcagcagagatggggacttgaggacagaccacttctcccaccaggacaggttctggctttggaagccctcgctttatggaagggccgaggcagccaaggggatctagtggggccctgagtagaccctgcccccagtcccctctctcagctccaccgtagcagcaggatcaggaccagccacccccgacaccccctgctgccctgcctccgtcttccttcttctgctggttcctgtgggggtctcccgaggaggagctccttgggctttgtgaggccagccgatgggcttggagtgaaagtgaaggcagtccgattcagtgaggctgcaccttttctcctggatcaagagccaaccccaggctgggtggtggtgcacacctgtaatcccagcactttgggaggccaaggtgggaggatcacttgaggctagaagtttgagacagctgatcaacaggaactctataactaatgtgctttttctgttttcttgttt

SEQ ID NO: 97596 - DNA, 459 bp, Homo sapiens
gttgggacgtcagctgggtcagctgaaggacttgtgagtgcagctccctgagctgcagctgaccacacaagtgggcaactgaatacagtccccataaagcatgtttatcttatctggggctggagattagctgtgttgtgcagaagggaagaggcattccaggtctttccagctgtcttgcctgtgaacatttatcgtcccctagttccgacgtttattatccccccgggtggatagcactaattcataccagtctgtccgatggcagcaacccccatagatgtatgggtcatggcggaagagggagaaaccccagactcttgctatttggagggaatgagattctgatagtcacagccctcagcaaactgttctctttggaaccaatacagttgttttcctgtaagaacacagagaagacccaggcaactctgggttccagaaatgaaggcctccttg

SEQ ID NO: 97597 - DNA, 845 bp, Homo sapiens
tgaaaagttttccttttattggttttgcataatggttgcaacaattctcaagtaatgaaaaaagaatgaagaatgcatgtcctttccagtacatagccacaatgttaatgctaaggagaagcaaaacaaaacaaaacaaaaacccaccctaaaagtggtcttggacacccagccctcctctcagctcccttatttggattcatgatgtttcctatcttttctcctcttttttcaaaataaactatttatgctcaaagaaaatctgtcatctaggacatctgtgataatgttcttgtggcctgggttggacccttgctccactaccaactagtataaaattaatgggggacatgacttaacctttctgggcttatatttgtctcattcgtaaactaggaataatggagtttacttcactatattgttttgaagattaagtaagagaaggcatataacagtgcctcacacactgtgaattgaacctacatatattaatatatctattgtctaatataagaataaaaacaccattctctgcccccattgcatagttaataggcaatgtatatgaataaaactgagtcttaactcattttggtatctactgtggcacataagagacactaattattgtctgcagaattttttactgtcaacacatgtaacattgtacatagcagcagcctattgtataagtcagtaaactacagcctgtgggccaaatttggactactgtctatttttataagtaaagttttattatgacagagccacgcccttttgtttaagcattgtttatgctgtctttgtgctacaatgaagagttcagtattttcaacagagac

SEQ ID NO: 97598 - DNA, 175 bp, Homo sapiens
gaacagacattccgcagaagaacggccagcggatagaacatgaaaagaatgctcgctctcagaagtacacaaagaaaggcaagctgaaacaagagacaagtgttgcctctcaacttctgccaaagtcagactgactgtgtggcctggccctgacctcgctgggcagaggccggca

SEQ ID NO: 97599 - DNA, 370 bp, Homo sapiens
tggtacagacagcaaagaaaactgtaacaaagtaaaccaggcccaacttgcaacagccctcaaccgagcccaaaaaggagatcaataatgttcatccctttctatgatctaactctgtgaagtagatacttattttatggctagggttactgaggcttaaagaggcagagtaccttttccatggtcatataacaaataaatggcagagctgggcttcaaaccctgactgtttcaccacaggcctgcacccccatcatcaggacacaccaatggcattctctgcaaacagcacaacttacgactgtgggcaggcagggtgatgcaattggtgtaggtactagggcaatctaatttaatgatcttttctatc

SEQ ID NO: 97600 - DNA, 392 bp, Homo sapiens
cctaaaattatacccattcaggacattttccttttattactttagagctatttcatttccatactttttcagtttctacttcatcaatatctacaaaagattataaaataagaatagcaatggctaaagtttattgagcatacattatattccaggcacaattctaagagctttatgctcattgatttatttcctgatctcagaactcttagaggtaagaactattattatctctatgttgaagaagagaatactgagacttagggaggttaaacgacttttcaaggttgttcagctgctcagcatcatacccaggacctgaagctaagcagtcttcacctccgttaactccaggtttaaatataaatatgtacagtccaatctgacagtca

SEQ ID NO: 97601 - DNA, 379 bp, Homo sapiens
  misc_feature (357)..(357): n is a, c, g, or t
tagtaagactgtatctcaaaaaaaaaagagggtaaaagataattgaactgaaattgttacctgaacattcagaataagcttaggggcaagataaatttggttacacacatgtcaaatttaaaatgcctattagtttctaaatggaaaagatgtgtcaacatttggatatacaaagacctggaatccagaagcatgagcatcttagcccagctggcattggggcatgactttggctcttgttttgacaacttaccctcccttttatcctatttcccatgccaggctctccaatgtgagctacaaaatacactttaataactcctttctcaaactcctggcctcaagtgatccaagcgnatcaccggttcgggtaccgagc

SEQ ID NO: 97602 - DNA, 264 bp, Homo sapiens
ttttggggtgatttgttgcacagaaataaataactttaaaaaggctctaaaactctagctcttcagatatttcatggcatttcctaaagaacctaaaatctcaaaatctcataatttttattatttaggtatgtgtttcttcattattacctattattgcataatttttcttagcctttttaaaagatacatattgctttacaaacccattaaaaagtgaggtagtttggctcagcacagtggctcacacctgtaatcccagca

SEQ ID NO: 97603 - DNA, 255 bp, Homo sapiens
tccaggagatgaggttggagctcatgctgcccatgaagggtgcccagcccaagagtcaccatcagcccccaggcccctgctcctcaaaagagcaaaagctcacccactggtcctgcacatggcactgcctctcccttctgtctaaggagctgggctgggtaactccacctccccttcccagcacccaggaagagctgctgatcaattatctcctgggctggcaactggccaggtaccatggcttccaagcatcat

SEQ ID NO: 97604 - DNA, 300 bp, Homo sapiens
aaacctgaggcaacagaacccctctagcttaaaaaaagttaagcttctcatttacttgcatgtgaggcctctaatttttttccttctcaccctgtcttacggtgctgactctatctaatcttatccccataaagaatgacagtgtgttagtccctgaacaatgtgcgtgaacattatttttgttagagatggggtgtcactctgtcacccaggctggagtacagtggtatgaccatagctcgctgcagccacgacctcctgggctcaagtcgactgagcagctgagactacaggtacgtg

SEQ ID NO: 97605 - DNA, 1099 bp, Homo sapiens
gtaaaggtaacgggaaagagctatactctgacaacggccacgcgtaggaattagacacagacttctttaaggagaagagctgctcatcatctgtctgtgtgcctcttaccacacagaattaattccatggctacttgccattaccattgcctaaaagttcgccagatttgggagacagtgggagcaactgcaggaggctgcatcctgtacaggtagccttgggccatggtggctgtaggaaacacttggtcatgaggtggcttccccaagtggcagatgcagaaaccagtgagaagtaattttagattacggaattttttttaaagacaggaccctgctggcgatgtcatattcacatacagaaacaactgctctagtgaatctgaagatggagaaagtaaccaacctccttcctcagtgattgataagagcaatgtacgatgttgcccctgtggaagaagccttttcttgctgatggctgagttttctatttgtcccttttatttttactatggcaaaacagttttaattaaaatgagacaaggccacgtggagtggatccagcactttgggagggatcacctgaggtcaggagttcaagaccagcctgaccacaatatggtgaaaccccatctctactaaaaatacaaaaattagccaggagtggtggtgcatgcctgtagtcccagctactcaggaggctgagacaggagaatcgcttgaacccaggacacggaggttgcagtgagctgagattgcgccattatactccagcctggcgaccgcgagaccgcatttcaaaaaaaaaagagaaagatctcatctagatacatgtctcctgttaatttaaatccacagacccttgttgactcaatctaaagacacttgaagccactgtaccccagaatttaactcaggaatccacttcactccatggtttataaaaatgtgactttcttttgtaagcctgattgattgtttaaaatgcagtgtcctcatgaatggtaatatttgttttcttgacagcctgagttctccaaacctccaaacattaataatatagctaccctgatatccagtaaagtcatcctcttcctta

SEQ ID NO: 97606 - DNA, 745 bp, Homo sapiens
agcaaccagaggcagaccctcgaccttggacttcccagcatccagaactcataagatttacctttattttttaatattggagaacttgccatgtaaatcctaacatgtggatgaactaaatacctggggagttcatcatctctcacaaactaaatccagagaaaaaacttcctgacacaagaaaaaactgcagttaaatggaaaacaaataaagcaaatgaaaattggaatgtggagcattttgcatgccagataagaaagggcatgtgacaaaggagagccatttcttccatttgagattggagggggaagagtccaaggctagaatcatgtggctgaccaggctcctgggacttccacatctgcacaatggatcatgcaaaggtccgcagcttcactcctgagccagcaagaccacgaacctaccagaaggaagaaactccgaacacatcccaacatcagaaggaacaaactccggacgcgccaccttaagagctgtaacactcaccgcgagggtccgcggcttcattcttgaagtcagtgagaccaaaaacccaccaattccagacacactatcctgggggagcagcctggccctaaaagagacttgtgcgtgaccccaggagacccactgacatggatcaggaaactgctttagaatcccaggaacagggctacgaccaaactccgtactctcccatttgcctatcgtgtcagtatctctgtattgtcactggtgtattaa

SEQ ID NO: 97607 - DNA, 264 bp, Homo sapiens
cggagatggagcacattcccgaggcttcgtgagtaccctgtgcacactcggcatgaccatcacccctggggggaaacagagactcccagacaccgcatgaccatgccaaggtttcaggatttattttacaattgtgttggaaaccttgcttggggcctcagctcttgctggaattcattgagggtatatgtggacagggctatgtggtgataaattgtggtgggttgaaattttactggtggtgtctagggttggaatagcttt

SEQ ID NO: 97608 - DNA, 143 bp, Homo sapiens
ttttgaagtaaatattatcctatccccgtaattcaagagaaaaaatggaggagagagtttaagtgttttgtccatggttactcagccagtaaattctggaattgagattggaatccaagctttttgaactattctacctatct

SEQ ID NO: 97609 - DNA, 279 bp, Homo sapiens
aacagcagccactgaaccagtaacctgaatgcgaccggagtaattggctccagggtggcgggggccccgtggctgtagtactaccaaaggcaaggtggacgtgctgaccctattggacagtggagtcaaagcagaaatcagtctgactgctgcagacctgtggtgttggctggttgatcatgatgttcctcgaagtgaaatagacaggaagcctactaagttcgtacttaatctgtataagcagaaaacttctaggtcaagcaaacaaaagtctatccc

SEQ ID NO: 97610 - DNA, 853 bp, Homo sapiens
agctaactggtgaaattctaaggaggaacaagtttctggacagacgttggtaatttgtgatcattattaacaacagccctatttcttgtaggcctcgtgaaagcttgtttgattcggtcagtaaactccctgttgttttctctgtcaagagcttccagtcaaagctctcggtgtggtccattaagaggtgtccctttcagctggctaatcaggaaaaatataattaaatctaactgatgagtaaggttgtcatctaacagggcaggggttaggtgagaataacatgaatttccaagatctcactctataaagaggaaatgaggagccagaaacacagtggctggaaatttaaagtatccatgcatttaaaggagcaaataatagtgtgctaaaggaagtgcacagagcagattccagtggaacagagtcaggtaggaaagcttagcactgaagaaaagcactgtccaaactgacttgaagggcgggcagccgttgtgtaagtcaacaccctggagtagggagggactggatgcatgccactgaggcccaaactaagaatggtcaaaatcttttgaccattttaaaagagttctttatgtgttctggatctaagtcttttgtgagacatgtatttcaagtattgctctctccatctataacttcccttttaattatttaacagtatcttttgttaaataattttaattcaatgaaatccgatttattgatgttttcctttatggtttatgccttcagtgttctacggaatctgcttaacccaaggttatgaagatgtctttttaggtttatctctagaaattttatagttttagttttgtaaatattttggtca

SEQ ID NO: 97611 - DNA, 428 bp, Homo sapiens
tgcccttgcaaagagcaggccttgtcctggcccttagcatgggtgtgcccaccagcccctcacccagaccatggtcactagagaggccccaacacccttgttttgggtgaccccagcactcagtggaaagaccgctggaatgggagtcagaaggcctggatctaaccctttccctgacttttgataactgatcttaggtgagtaatttcttttcgctgagcctcaagtttccttatctataaaatggagatttgctgggttattgctgaaaataacgagagacaacagatgtcaagatgaaggggtatgacaatagcataaatttattgagcatttattgggtgccaaacacttggctaaacactgtccatgcattggtcttcaaatagccggctgaagtgggtactgtcatttattatgatcatttt

SEQ ID NO: 97612 - DNA, 136 bp, Homo sapiens
tgaccacttctccttcctggagatcttcatatctccttaccttgctttgctttgatttttgtttgtttgtttgttgtttgtttgttttgttttgagacagagtcttgctctgtttcccaggctggagtgcagtcgc

SEQ ID NO: 97613 - DNA, 138 bp, Homo sapiens
atagcgtgggatttctctaagattgttgatattaattccattagactcttatgtgagtgaagacgaagacttcccctgagtaagttcagacagcttctgataacatttctacatcgattcctcaggatttaactatat

SEQ ID NO: 97614 - DNA, 357 bp, Homo sapiens
gagcttataaagccccattttccatttttacagtttgggcactcagaatatttgggctgtctcccaggtcctacaggagctatttgcttcctttaaagggactgtgaattatcctgcctttcctggtatattcctagagtagttctatgtagttttagcaatgcaacaagatttaacaggttttcttttgtttgagataacacttagagttttttgttttatttttatgaaaattaaaaagtacgaacacaaaagtgaggttggagtgaaagtttaataagcaaaagaagaaagctttttgctagcagagaggggtttctgagtaggagttccccctgtgaggctggggttcagggt

SEQ ID NO: 97615 - DNA, 397 bp, Homo sapiens
gcatacctttaataattgggacaaacacacacacacacacaattgggccaccatttgttctaagtatagttgcataacaaagctgactgctttaaaagctggactaaatcatgctgattgcttgaaagtccagactacaagaacattggggctaagaactgtattttcttcataacctttggctaaatttgtcaaactgaactccaaaattctcctaaagattctagttctgtctcctattcatttattgtagatgttaaagtgtgactagatgcacgtcatatcagatacagattgtttaaacaacatgtgacggcaattctattatgtgtcaaatagagatttttggtaagcaggcaatcatttaccttagagcaaacaagttagaaatcaagaa

SEQ ID NO: 97616 - DNA, 208 bp, Homo sapiens
atacatacaagtatgtatatgtttatacacataatatatgttaatcgtctacctccccattggaattaagctctacaagggcagattttgttttgatcactgttttgatctagggggccatagcacctagaacagtgtctagaagataaatgctcaacacacatttattgaaggaatgactgcatacaccaactctgttcttaaatct

SEQ ID NO: 97617 - DNA, 495 bp, Homo sapiens
cttgcagggacatggatgaagctggaaaccatcattcacagcaaactatcgcaaggacagaaaaccaaacactgcatgttctcactcataggtgtaaattgaacagtgagaacacatggacacaggaagaggaacatcacacaccggggactgttttggcgtgtggggaggggggagggatagcattaggagatatacctaatgctaaatgaggagttaatgggtacagcacaccaacatggcatatgtatacatatgtaacaaacctgcacgttgtgcacatgtaccctaaaacttaaagtataataataaaataataagtaataaataataaaataaaattaaatttttaaaaaaagaagttaagagctgggattctcacaatatggcttgcagactacaagtgtgaactgaggaggtccccaaagtcacttcttactaaggtaatattttctttgtttttttttagagagagggtcttgctctgtcacccag

SEQ ID NO: 97618 - DNA, 493 bp, Homo sapiens
tctaggtctctcctgatgccatgtaagatgtggcttgcttccccttcaccttccaccatgactgacaagaattcaaatgctctttctttgtggatgacattatctgatacctagaaaacctgaaagactgccaaaaggcttctggaaccaataaacctcagtgaagtttcaggatataaaatgaatgtacgaaatctagtagcatttctatacaccaataacactcaagctgagagcaaaatcaataatgcagtcacatttacaacacaaacacacacacacacacacacacacacaaaacctaggaatacatctaatcaaggtgatgaacgatctctacaaggagaactacaaaaaatgctgaaagaaattacagatgacaatccatgtcacggattggaagattcaatgtcattaaaatggcatactgcccagagcactttacagattcactggtatttctatcaaataacaaatatcatttttcagggaa

SEQ ID NO: 97619 - DNA, 952 bp, Homo sapiens
agaagactcttccagctgccagaagtttaggggcaggggcagggaagaagactgggagttcacagctttcaggacacatgcttccactcaacacccctgttttcagtacaggaccccagccctcaactaagtctgcgaactccccatccagagaccctctgctttaccctctccagggaataacactccaggcttctgtcagagcagggaagggccagcccctcactggcattgacagcaggaggggatttggcaatgaatctacttcttaaaagagttttcaaacagccttcattattttgatacccaccccccttcacttccagaggtaactccacttccagagttaccttggtccagcctttgaagattcctgggggtgaggagtaaatcaagttagctttttgcttttcccactaaggtctcagaattcctagtttgtggccttcttggatctgctaagtcagttgccactcatccatctgttcttcagcatccaaaatttagttgttgcctcctttcctgttcttcaaccctttttatttcatcttcactcctatccttctaatcctttcaaaaatcacatttgtagcagttccagtggggttttgggagatggtgaagttagatgtggaagtatgtgctccaccttaactatgcatcatcacgagcatgggtgtctgcctgcctgtctcattgattctacacaccttcattaccacaccactctccctaaaactctccagactcagcttttctcatctggctctctgacctgttccctgaccattctgttctttcagctctcagccttcggactgccaaaaccccaagccaacttcctatccaggaaccctccggcctagaagttcagatgtcttgccaatatatctgtgcttcacaacttgcctactctctctgacccctaacattttcacatacttttccaatt

SEQ ID NO: 97620 - DNA, 346 bp, Homo sapiens
ccaggtaacagcgtgccttgctggtgagaaggcctcatgcaggaaagaaccggctctttgagagactgaaaggaggccatgacggcagggcctagtgggccacaaaagagagaaaatatttaggcagcatgttttcttttagatgaagacatggaggcacagagaggttaaatggctcgttcaaggtcaccagcaggttagcaagaagaagaacccaagtgctctgagtctgggctagggcgcttcctgcagcccttgctacctatgggctggatttagggtaacagaaggtgacctgggaggctgctgggtgtggaagcagagctggaagccttgttctcacaac

SEQ ID NO: 97621 - DNA, 367 bp, Homo sapiens
agctattacacattttctgatctatttgtctacaggttaatttatgtttaaatatgttttaaactgccactgaactgacttagtcacatatttaaactttgcagtaggtctgtgaaatgtgctttgtttctggtcagcatggacacccgctttaatagtggcttcagatgaggcaccttgtgacagaggagctcttcccctgcagcaaccttgaagatgttgtggaagacaatagccattcttacttcactctgaggatcacgatggcgtgcaagggtgtgccaagcacattgctatctttggccattctctctcacattagtacacctggatgtgaatggcacgttatctatgtaagcagtgatgg

SEQ ID NO: 97622 - DNA, 817 bp, Homo sapiens
agtccgtagtttacattaaggaagactcctgatgttgtacactctatggattctacaaatgtataatgagacaatcaaacttcagataatcatgcaacaaggtttccagccagttccaggtgtagacaccactcccagccatcaagaaactactgtcaaggcaagggttctgtgatcctcaatagggtaaatgctggaggggctccaatttggaagtgttacattatcaagttaaatcataagagcaatttataaaagagatagcttggaattaaactacaaaagctgcttaaggtaaaatatgcgagggaactctcttgttgccattgtgagaccctggagaacagatggaaccaactctcaagcttctgctcgggcagaaataaagatgttctttgaaaccaacgagaacaaagacacaacataccagaatctctgggacacattcaaagcagtgtgtagagggaaatttatagcactaaatgcccacaagagaaagcaggaaagatccaaaattgacaccctaacatcacaattaaaagaactagaaaagcaagagcaaacacattcaaaacctagcagaaggcaagaaataactaaaatcagagcagaactgaaggaaatagagacacaaaaaacccttcaaaaaattaatgaatccaggagctgcttttttgaaaggatcaacaaaattgatagaccgctagcaagactaataaagaagaaaagagagaagaatcaaatagatgcaataaaaaatgataaaggggatatcaccaccgatcccacagaaatacaaactaccatcagagaatac

SEQ ID NO: 97623 - DNA, 269 bp, Homo sapiens
gaggagccagagatacaggaaagaaggccagagatacaggaatgaagacggaaccaaaattggagttttgctgccacaaacaaaggaataccaggaggcactagatgctggaagagaaaagaaaccattgtcaccctggagtgtgagcctgctcataccttaattttagacatctggtatctagagctatgagaaggaatttctgttattttaagccattgactttgaggccatttcttgtggcagctataggaaactaacacaccagg

SEQ ID NO: 97624 - DNA, 375 bp, Homo sapiens
gaggggtggggttggggaacctgtgcaggcaaaggcatgtgagggggaatcaggcagcacagcatggcaggagcttggggctgaaacaagcagaggctgaggctccaggcaagctgcactgtccactgtcctcagaggcttgaagctgcagcaaagagacaggaccgcttagggggtatgtgaggtgaggggtaccactgaggctccccactctccagcactggggaggtgtcctctccccagagagggagaggatgggttgaatagaaattagatgagccagagaagaatcacgcttccccatctcagtacccgttcatcaccaccaccaccaccgccatagtcaccatgagcagcatcagcagcatcactgtt

SEQ ID NO: 97625 - DNA, 1322 bp, Homo sapiens
agaaaatagaatttcaacaatatacgaaattgtgtatgtgtacgtttataaagtatatatacatcatggccacatggggtttattccagggatgcaaggcttgctctgtattcaaaaacaaatcagtgtactccaccatttaatagggtaaagaagagaaaccacgtgattatagcagttgatgcagaaaaaccatttgacagaattcaacacccatacatatttaaaaactctcagaaaaataggaattgaggaggacttcctcaacttgttaaagagcacgtgaacacacaccaaaaaaaaacccacaactaatgttatacttaagggcaaaaggtcgaaggccttgttccttagattaggaacaaagcagtaatgtctcttctcaacattaatcaacatattgatggaagttctagccagtgcagtaaagcaaaaaaaaaaaaaaaaaaaaaaaaaaaaagaaaaggcatacaactaagaaaggaagaaataaaaagtgttctatttgtggatgatgtaattgtctcagtaggaaatctcaagggatttgcaacaaaaaaaagtgagttcagcaaggttgcaggatacaaggtagacataaaaatcaatcgtatttctatgttttagccatgaaaacatgaacaccaaaactcaaaatatatcatttttaagcacacaaaaaataaaatgaaatacttaggggtgaatctaaaaacagcatgtgcaggccatgtattctgaaaactacaaaactacttacagtggtgaaagaagtaaaagaaaatctaaataaatagagaggcatactatgcctactgtttggaatattcaaccttgtaaaatgtcacttattcacaaattgatataaatgtttaacacaattcatatcaaacttccagtacaatgttttgtagatatagacaatattattataaaatatatatggaaaggcagaagaactaaagtagctgacacagcttagcaaaggagaatacaatgggatgaatccacccattgatttcaagttttgcttagccagtcatcaggactgcgtgatactggtaaagggatagacacatagatcaatggaacagaataagtaacctggaaacacgcgtacaaatatgcacaactaatttttaacaaaggtgcaaaagtagttaaatggaagaagatagccttttcaacaaatggaactctagcagttagaaatccaaaataaatgaacttcctcctaagtctcacaccttaaaaaaactaacacaaaatcctggagttaaatgtaaaatatgaacatatttatcttttaggggaaaaaa

SEQ ID NO: 97626 - DNA, 1190 bp, Homo sapiens
ttcggcacgagctcgtgccgaattcggcacgaggtgattatagcagttgatgcagaaaaaccatttgacagaattcaacacccatacatatttaaaaactctcagaaaaataggaattgaggaggacttcctcaacttgttaaagagcacgtgaacacacaccaaaaaaaaacccacaactaatgttatacttaagggcaaaaggtcgaaggccttgttccttagattaggaacaaagcagtaatgtctcttctcaacattaatcaacatattgatggaagttctagccagtgcagtaaagcaaaaaaaaaaaaaaaaaaaaaaaaaaaaagaaaaggcatacaactaagaaaggaagaaataaaaagtgttctatttgtggatgatgtaattgtctcagtaggaaatctcaagggatttgcaacaaaaaaaagtgagttcagcaaggttgcaggatacaaggtagacataaaaatcaatcgtatttctatgttttagccatgaaaacatgaacaccaaaactcaaaatatatcatttttaagcacacaaaaaataaaatgaaatacttaggggtgaatctaaaaacagcatgtgcaggccatgtattctgaaaactacaaaactacttacagtggtgaaagaagtaaaagaaaatctaaataaatagagaggcatactatgcctactgtttggaatattcaaccttgtaaaatgtcacttattcacaaattgatataaatgtttaacacaattcatatcaaacttccagtacaatgttttgtagatatagacaatattattataaaatatatatggaaaggcagaagaactaaagtagctgacacagcttagcaaaggagaatacaatgggatgaatccacccattgatttcaagttttgcttagccagtcatcaggactgcgtgatactggtaaagggatagacacatagatcaatggaacagaataagtaacctggaaacacgcgtacaaatatgcacaactaatttttaacaaaggtgcaaaagtagttaaatggaagaagatagccttttcaacaaatggaactctagcagttagaaatccaaaataaatgaacttcctcctaagtctcacaccttaaaaaaactaacacaaaatcctggagttaaatgtaaaatatgaacatatttatcttttaggggaaaaaa

SEQ ID NO: 97627 - DNA, 1113 bp, Homo sapiens
gcatctcagccatggctaataaggttaaaatgtttgtatgagtattatatcataatttaagaaaaaacacgcactaagtgacacaccccgaaaacctcagaactaatgttatacttaagggcaaaaggtcgaaggccttgttccttagattaggaacaaagcagtaatgtctcttctcaacattaatcaacatattgatggaagttctagccagtgcagtaaagcaaaaaaaaaaaaaaaaaaaaaaaaaaaaagaaaaggcatacaactaagaaaggaagaaataaaaagtgttctatttgtggatgatgtaattgtctcagtaggaaatctcaagggatttgcaacaaaaaaaagtgagttcagcaaggttgcaggatacaaggtagacataaaaatcaatcgtatttctatgttttagccatgaaaacatgaacaccaaaactcaaaatatatcatttttaagcacacaaaaaataaaatgaaatacttaggggtgaatctaaaaacagcatgtgcaggccatgtattctgaaaactacaaaactacttacagtggtgaaagaagtaaaagaaaatctaaataaatagagaggcatactatgcctactgtttggaatattcaaccttgtaaaatgtcacttattcacaaattgatataaatgtttaacacaattcatatcaaacttccagtacaatgttttgtagatatagacaatattattataaaatatatatggaaaggcagaagaactaaagtagctgacacagcttagcaaaggagaatacaatgggatgaatccacccattgatttcaagttttgcttagccagtcatcaggactgcgtgatactggtaaagggatagacacatagatcaatggaacagaataagtaacctggaaacacgcgtacaaatatgcacaactaatttttaacaaaggtgcaaaagtagttaaatggaagaagatagccttttcaacaaatggaactctagcagttagaaatccaaaataaatgaacttcctcctaagtctcacaccttaaaaaaactaacacaaaatcctggagttaaatgtaaaatatgaacatatttatcttttaggggaaaaaa

SEQ ID NO: 97628 - DNA, 490 bp, Homo sapiens
gagaggcaggagaatcgcctgaaccaggaggcagaggttgtagttagccaacatatcaccactgcattccagcttgggtgaaagagtgagacttggtctcaaacaaaacaaaacaaaaaaacaagcagcatatttgctggggctccagtagtgaggaaatgcagaggggagtgagcggaagaaatccttgtcctcagagtttttagtgacagcagacatctcgatatgttctattgaagacaatggatgatggtattaaaataaacagggtagaggtaagtcaaacagagaggcattgattggctagacttatgctggtcatttaagtcctcttttggaaagtgatatgaggaaagaaactgaaggatggtagatcatgaaccagcatgctaactgggggagggaatcttgtaaataaaatactgagctagtgagaaagtagaatgatttatggctcataacttacacgaggatcccccataaggccctg

SEQ ID NO: 97629 - DNA, 779 bp, Homo sapiens
attaaatgtcagctgaaggttgaatcgggcaaaaactgaaagaagacaacagtttgaaggcttccctttccatttccaaacataataccaaatgacttaaaatgaatgaagatgctttagagctctgggtgtcacgataaaacataaacttacacattcactttgacccacatattgtcctttctaagatgtttcaaaatgggaaaatcctctgtgtcattttatttgaaaaaaaaaatcaggaagcaccattgcatgcatgtgagccgagcagatgtgcatacaaacatgcgtgtgtgtacatgaagcacaaccagcatttggaatatcctccctcaggcaaagcaaggacctagaggctgactcctgcgtattgaatcaccctggctacctggccaactggcttcaaattgggcttgaccactgggaggtcctgaaagaagactggaggacaacaagaggcagatactgggggttttcctttcttcctactgagggccagattgctggccctggctgtgtccttccaggacacagcttccaaaaagagggccctcctcttggccccatttttattgtatttgctaacaaacttaaattcgtccctctagggcttggaatgggaacaccttgccatttttgctgcctctgagtgcctaatttcccgtttttttgcttttgctcattccaaatcgagaaatatttttctataaagcgccctgaccaactgggcttgattcaatttttatttttcagtaataatagttgattgcgcgaac

SEQ ID NO: 97630 - DNA, 363 bp, Homo sapiens
tttctttttttttttttttttttaagaaataaggtgtcgctctgtcacccaggctggcgtgcagcagcacaatcacagttccctgcagcctcaaacacctgagcacaagcaatctttccacctcagtctccagagtagctggaactataggtgtgtgtcaccaggcccagctaatttttgtattttttgtagagacgtggttttgttatgttgcctgggctggtctcgaactcctggactcaagtgatccttctgcctcggcatcccaaagtgctgggattacaggcatgagtcactgtgcccagccaaaattttttttatctattggttcctactataaatatgatataactctcttaaact

SEQ ID NO: 97631 - DNA, 452 bp, Homo sapiens
tccacacaaaaaccagacgtctacagcaggtttattcataactgccaaaacttggaagcaaccaaaatgtccttcagtaagtgaataaatattcatacaatggaatcttattcagcagtaacaagaaatgagaatgacatggaggaaccttgaatgcatattacttagtgaaaaaaaaaacagtctgaaaaggctacatgctgtctaatcccaactatatgacactctgttaaacgcaaaactatagaaacagtaaaaagatcagtgactgccagggattaggagaacaaagcatagaggttttttgttgttgttgttttgttttttccagggggagtgggggcgggggcagtgaaactattctgtatgatataataatggtagatacctgtcattatccatttgtccaaacccatagaaggtacaacacaaagagtgaatcctaatgtaaa

SEQ ID NO: 97632 - DNA, 321 bp, Homo sapiens
ttagtagagatggggttttgccatgttggtcaggctggtctcgaactcctggtctcaagtgatccacctgcctcggcctcccaaagtgctgggattacaggcatgagccaccacatacccagccaaaaagatattaaagaagaaattagcactcataaaagcaatccaacgggccagaaaagccaaggattttagaataaaaactagataaatatttgtacctaaaataaatctctcttttataaaattagcaccacacaaatttgtgaacttttctactcttaaggattatcccctatgaaaccagagggtatcctacaa

SEQ ID NO: 97633 - DNA, 528 bp, Homo sapiens
attacaggcatgtgccaccgtgcccggcccgatatacttttcttctagcagttttaggtttacagaaaattaaacaaatagtatagagtttccacataccctttctctctcccccagtcgttttctcctgttattgatatcctgcattagtatggtacattattacaactgatgaaccaatattgatatataattattaactaaagttcaatatttacattagggttcactctttgtattgtacagttctgtgggttttgacaaatttataatgtcatgtgtccagtattatcatgcagaatagtttcattgccctaaaaatcccctgtgctccatctgtcctccactcccccaactcccttgcaactgctgccacccccgactgtcactgcaccgaccggccctcgaggacctgctcttaggttcagaagcgaacctcacgtgcacactgaccggcctgagagatgcctcaggtgtcaccttcacctggacgccctcaagtgggaagagcgctgttcaaggaccacc

SEQ ID NO: 97634 - DNA, 710 bp, Homo sapiens
ctagatactaggtccaagtatgggcgtctgacccagttctggaaaatgagacgctcagggaagtctacttggtgcttctgggaaagctatttctccctagtaagagagagacaccctcttccttactgctggatcattgtggtgaggatctgatgactcacttagaagacatcacctagcgtgctgagaatgatggagcagacagatcaagatctgggtctaggacaacatcactgagtggttgaaacagatctggaagtatctgctttcctgttcactaacaatcaacctccttactctttaagccactgctagcaggttctctgttacttgcagccaagcatatctgtattagttatctactgctgcataaaatgaccacaaatatttcagccaagaaaaggaaaaaaatgaatagaataaacatggtaattatttaatatgagtgatggatctataaatgcattatactatctcaactgttaattatattcacattttttatgatttttttaaaaaaaaaaacacagaataaatcacccgcaaccctaaaaaaacaaaaaatgggcccgttggccctaaggggggggacctctgcgggccgctctcctttaaggggggggaaattcaatggacctcccttcattactcgctggcctcggccgttcggttgggggaggcgggtttcacttacctcaaggggggattcc

SEQ ID NO: 97635 - DNA, 397 bp, Homo sapiens
agaatagaaggaggtgccttccactagataaccaaaaggtcagacagattataaggccttttaggcaattgtaaggatttgggactttttttctgggtagcttctgggggcttctgagcagaggaatgatatgattcgatttctatgttctcaaatcactctgacaggcaaggtaaaaacaggctatatgggagtcaggctggcagcagggagactgaaagcaattgcaggcttctgtgtaatactgctgtaaatcatttcaaggttccaggtgcagcgaaattacaccatagggcatcaaatgaataaataaatgagactgaagaagctatgattgtcatctttaagaaactgcaaaaatgaaagtgatatgcccagtatacatgtttctaacctg

SEQ ID NO: 97636 - DNA, 470 bp, Homo sapiens
accaaagaacaggggagaaaggaatgtttaaattaaaacatcacaaagcatgttgttcttaatgagatccagccacttttcttgaataaacactctttggatttttccaaaattttagataattcctagggttcacaaaaacttaattttgacatttttggcaagtgcacttgttggttttatggaagactgattttcttttaagttcttattctgctgttttagaagtgcatccctcctattcaattttttagtaatatattttttctccacgaaaatttccaatacttttaaactatatgcaaatagtagttatagctgttttagagcttggatttgaaactattatctcgagtgcctatgatctgttttgtttgttacttcctcattggcccattttgttgtgttttgttttgctgccagtgttgtctttgctgaatcatttctacaaataagatatgttgagctgt

SEQ ID NO: 97637 - DNA, 373 bp, Homo sapiens
ccaggcaccagctaatgcagtacatctgtgagcagtcgcttgctcctcacagcaggaccatgggattgatgccgtcattaccatcctccccatgttatagatgaggatattgaagagaggtgacatctaaatgcaagctggtatcctggattagatcccagaacagaaaaaggacattggtggaaaaactggagacatctggataaagtctggagtggagttaatagcagtgtaccaatgttaatttcttagttttgatgaatgcactaggtaatgtcagatgctaacattaggtgacactgggcaaacagtatatgggaactcttgctgcaactcttttgtagatctaaaattctctcaaaataaaatgttt

SEQ ID NO: 97638 - DNA, 410 bp, Homo sapiens
taggcttcctatgctatcatggcctcagcaagagtcataatgcctacctagggcagctaaaggcattaagaatgaatgttcaagctagcaaggtggaagctgaattccctaggctctgaagacaccatcactttccctgcattccactggtgaccagtgagtcacaagctatccaaattcaaagggagagaagttagactttactttctccccctcagttttagtaaggtatacttgacaagtaaaaattacatatatttaaggagcagaaggtaatattttgatatatgtatacattgtgaagtcaataccacaatcaagctaattatcatatcatatctatcaccgcacatagttaccattttgtgtgtgtgtgtgtgttgagaacacttaagatcagctctcttagc

SEQ ID NO: 97639 - DNA, 653 bp, Homo sapiens
gtaggggagcagggtgataataaggggaaggtcaacaaaaacaacacaaaacaaacacgtgagcaaaagaatccatatcattattaagttcaagggaaggtactatgcctggacgtgcacgtaggccagatttatgtttctctccacacaaatatctcagcggagtaaagaataacaaggcagcattactgccaacatgtctcgcctcccgccacagggcagcttttctccgagctcagagttgaacaaatgtacgatcgggctttacaccgagacattcagttcccaggggcaagcaggagacagtggccttcctccatctgaactgcaagaggcgttcctctttgactaatccacctcagcacagacccattgcgggtgtcaggctgggggacattcaggactttcccatcccacgaggccatatttcagactgtcacatggggagaaaccttggacaataccctgctatcaagggcagaggtccctgtggctttccacggtgcattgcgcccctggtttattgagactagagaatggcaatgacttctaccaagtatactgctcgtaaacatttggttaacaaggcgcgtcctgcacagccccagatcccttaaacctcgattttatacaacacaggtttttgtgagctc

SEQ ID NO: 97640 - DNA, 609 bp, Homo sapiens
cactttagtaaacagtctggcagtttttaaaaaagttaaagttaccatttgactcagaaatctcacttctacatatacacccaagagaactgaaagtgttcacatgcaaacttgtacacagattgttcacagtagtattgttcatagtagccaaaaaaacacccaaatgttgaataaattgctgaataaacaaatcatggcatacccatgcaatggaatatttggccattaaaaggaatgaagcactgacgcatgctacagcatggatgtgtcttgaaaacatcatgctaggtgagagaagtcgaacatgatacagcaactccatttatatcaaatgtccaggacaggcaaatctacagaaacagaaaagctcctacggctggggaaaatggatacactgggagtgagagctaaagatatgacatttattttcagggtgatgaaatggtctaaaattgattgtggtgatcgctgcacaactctgaatatacaaaaaaaagaaaaacccattgaattgtacgctttaaacgggtgacttgcatggtgcgtgaaatatatctcaataaagctgctacaaaataacaattatcggggatgacagggaaggtt

SEQ ID NO: 97641 - DNA, 725 bp, Homo sapiens
ctgatatgatcagattgctttgaggactgaagttgacttttgtggagccgataaaatgtcccttggagagactggccttgtaccttgtctacatgattcccttacaagcttcctgattttgtgatcgcttgccactggattactaatctgatttctctctccatagctaccaatcctactttaatatgtgaaaccttttgaaaataaagcttcaaacaggagactaaaaaatcaatatttcaccccaaaatattgctgatctaaagaagcagctcaagttctaactccttcccccatctcccagtcctctgtcctccccaaagcataggataaagctgttctctaaaattccctcatctatctagaaactggacctaccaaagaggaacacaattgcctgcctcgaaattttattaaccagagaagactaaaattcatatcacagaggaagaatcccaaaccatttcttctttctgccccattccaatttccaaatggttagtaaatttccaatttactaaccattgtcggaccattaggcccatttatttccacctaaaaatcatttattatccctcagattgccacacttcccccattttcccttcccctgtgaagaaggggctataagtatctgtaccccattgggttattgggcaatcattctcctgcaactcccctgtgctatgcacattaaaataaagtattggcctcgttggcctcaa

SEQ ID NO: 97642 - DNA, 593 bp, Homo sapiens
gagccaggcaatgtcatccaagacagataaggaaaggacacaaggccaagggctggaaggtatcaaatcgcaacacaatgtccaagattccactagttatttatgccccacttttgctaaaacttcagatgaacctcgaaggggcagacatcctttcttcctcacttatcttggctttataaccacagcttgatatttctttgggaaaagtaagaatctttctactatccaaagttcaatgaactatcgagcagttcattataagtgaacttgccttcttaaagctaacgttctctctaaaatcattgagttccaagaaggtggtacaaaaggattgtattttgtgagcttgctgcatcaaaagtccccaaatttcatgtgccctttcccaaattatgctgttcacttaaatgcattttaactctccagatatttattgagctgagcactgtgttagaaaaagacctggatgctgccctcaggaaattcacagaccaaaagatgagatagatgaataaacagatcatgtcagtccagcatggtaaatgagatgttagaattacatacaaggtggaacttttcttttttgagac

SEQ ID NO: 97643 - DNA, 667 bp, Homo sapiens
agcggagttaaggagaggcgggcgggactgaagcagagcccgagaacggggctggaggtcccagggtcccgggttggtgggggtggagcagcacttcatcgccgcgggggtgctgggactccggccgcagtgccgccgccatcatggacttcctgtgggacaagcgcacgggcctggccgccagaaagatgcctcatcctcgaaggtaccattcctcagagcgaggcagccgggggagttactgtgaacactatcggagccgaaaacaagcaacgaagaagccgttcctggtcaagtagtagtgaccggacacgacggcgccggcgagaggacagctaccatgtccggaggaggtgcagccggacatttagccgctcgtcttcgcagcacagcagccggaaagccaagagtgtagaggacgacactgagggccacctcatctaccatgtcggggactggctacaagagcgatatgaaatcgtcagcaccttaggaaaggggaccttcggccgagttgtacaatgtgttgaccatcgcaggcgtggggctcgagttgccctgaagatcattaagaatgtggagaagtataaggaagcagctcgacttgagatcaaagtgctggagaaaatcaacgagaaagaccctggcaagaacctctgtgtccaga

SEQ ID NO: 97644 - DNA, 148 bp, Homo sapiens
ctgtaaaatggacttaatcatagctgttgtatcacagggctgctgtgagaagtcattgagatgatgtatataaaatccttagcacagtgagctcttataaaatggtagggacaacaccttagccccggggttgctgattcctccattt

SEQ ID NO: 97645 - DNA, 756 bp, Homo sapiens
tggggagatctgactctgcagccatccctcaccactcctgcttggacatcgccaggctcagctagagaaggcagaaaaagttcctccaactccttccccaggcacctatgcaggctccacactcctgcctgaacagctatgattttaaaagccatcgagtcatgaagagaagtgtgccagtgtgtgctggactcagtttcccctgtgcaccattttccccagtcagccctgcaccttccaagaactatgacccgaaggcacaccctagtcagctcaggccccacattcctgcaaaaataaggctccagggctccctcatcgcagcatgggttctgcaggaagccccagtgccaagtggctttcaaaactagcctcagctagcaacgtggcggctatttcagcgaccgacaaaagcagctcccccagcctcccttggtgtttgtggtcccttttgttccagccaggcaccatgaggaaaatgcagcaaccgtttggaaacaaaggctcgggcaggctctctccagtctgaaaagcccactttcacttgagtttcaggtaatttgctgtgcagcctgaattcgttagacaaattaggctcacttggacttcaggtggctcaattacctgggtgatttgcatgtttatgagtgaaggggactgcacagtagcagaaagcaaatttgaaatcctgactttgggggccctggagcccctttgctgcacctttactttccctaccagaaaggaggaaggaca

SEQ ID NO: 97646 - DNA, 138 bp, Homo sapiens
gaagtctcgagagaactgcaaatgtctcctggcattgacaaattagaccattttgttttcagtggatcaactaaggttaaacttaaacaaatatgagcagctgggagattttggaagaagcaagatgtgcacattctc

SEQ ID NO: 97647 - DNA, 491 bp, Homo sapiens
cacacatgctcttgctctacacactgcagccacactggcctttttgcagtatgatgtgtgtgctacatgcccacccacaggcagctgtgtacaagctctcctgctgcctgagatgttctcctctcttctctcttcactgaggccacccttactcaaccttctttagctcccagatcagggaagctttgctcacatagtttctatgagacaataacccctcagtaattcagcccatactgattgattgcctactacgtgcaaggcattgtcctagacaccagtgattcagcaaggaatcaggcaaagtcgctgctctcctagaggtcatgggccagtgagggagaaagaatctcgaaagaaacagttacatgtattgttaggtggtaatgggcactaagaaaagcaaaccagggcagggagatagagaatgaaagggcagagctgctattttagacaggtggtcagggaaggttctggaggagaggacatag

SEQ ID NO: 97648 - DNA, 260 bp, Homo sapiens
ttaaaagaaagtgcatacttatttgcaaggaaaacaaatggaatagacaaaaattttagaatataaagactttttttcatttatgtatgtgtttacaattcaaaataataaagctagttaaaagtcaatacatattagatatattcaaatattttaccaaataaatttcgatcttatcagttaacacccatagcaaaagactaaggagtatttgtataacattagggtatttgaactcatattctattcatttgggttta

SEQ ID NO: 97649 - DNA, 533 bp, Homo sapiens
tatctaaggatccccaagttacagcgttcagggggggggcatctgctctcctctctgccctaggccaggaggaacagtgttctgtggccctgggggagggccaggaggtggctctgagcatgaaggtggaaatgagctccggggacctagacctacgccttggctttgacctctctgacggggagcaggagtttctggacaggaggaagcaggtcgtgtccaaggccctgcagcaagtgctgggattgagtgaggctctggacagtggccaggtgcctgtagtggctgtgttgggttccgggggtggaacccgagccatgtcttctctgtacggcagcctggcagggttgcaggagctcggccttctagacactgtgacctacctgagtggggtctctgggtctacctggtgcatctccacactctacagggacccagcctggtcccaggtggccttgcagggccccattgagcgtgcccaggttcacgtctgcagcagtaagatgggagctttgtccacggagcggctacag

SEQ ID NO: 97650 - DNA, 690 bp, Homo sapiens
aaagggtagagggcagcaaccgacttgtgcgaaaggagggaacgtgtgggtctgccagggtcctgcaggggggatgagaccctcgctccgctccggcgatcccttcgctctccaccctcggccagcccctcctgtcctccatcaggcctcgctgaggatacctcctgggttccaaagcgcgagttgaacctgagcttgacattcattccgtctcgtacaaaagccatgcctgcggggagagggagaaaatttcctacaggagcctcaagactgcgtttcaggaagccctaggacccactgatcctgcagctgcgcctctcactcgcctcaggctttggtatcaggatgatgctggcctcataaaatgagatagagaggattccctgtttttctgttgattggaatagtttcagaaggaaaggtatcagctgttccttgtatctctggtataattcggctgtgaatccatctggtcctggactctttttggttggtaagctattgattattgccacaatttcagctcctgttattggtctattcagagattcaacttcttcctggtttagtcttgggaagtgtatgtgtcgaggaatttatccatttcttctagattttctagtttatttgcatagaggtgtttatagtattctctgatggtagtttgtatttctgtgggatcggtggtga

SEQ ID NO: 97651 - DNA, 325 bp, Homo sapiens
cccaggaacctcaagatattttggggaccttgatgattggactccggtgaagactccaagatggcgatcgccacctcacataccctgactcagcatttccgggttcacctttcctgttcccgccaccccgactaacgcgcatgcccactagggcgtgtcacactcagaagcgcgaaactcaaccgaccccacccctaccccgcccactcctcacccagcatccataaaagcgcgctgcacctttggcacagcgcgacttccctggccctccccctgcgggccagtgaacctcgcccaagagctcaataaagatttttgccctctt

SEQ ID NO: 97652 - DNA, 326 bp, Homo sapiens
tattccattatcttaactttacagagaaaaaatcaaaattcaaattgttggttgtaacgttgtataattgacaatgtttttaaaagttcccctttaaacatctgaggaaattatgaacaatgagataaatgacaaggccttctagacacagaaagtcagcttaaaatggagcaaaatatatcccaatgcatttgagattcttgtttttgattaaaatagcatttcaaatcagtggtaaaacactggattactcaataaatacagtggactaaagactagacatttgaaaaaaatttaagctagatgtttatctataccttatagca

SEQ ID NO: 97653 - DNA, 135 bp, Homo sapiens
gacctgaaggttctcccaggcttctcctgctcccgtgccaataagtctcctacatatctaatccaatctttgtattgtcctggcagacctgaacatcatagatgaatggatggatgaataaattgagatctatat

SEQ ID NO: 97654 - DNA, 310 bp, Homo sapiens
gtaactgggaaccctctcacaattacctagccatctttgaaacatttgagaatatccagagcagaattttatcaggctgacaagagtggttaatgctacttctttctcagtgtaaaagaaatgagtcattctgtgtttgttcctccctcatacaagagataattttggttggtactcagatgatagtttccccagttttcttgtacttgggtgaaaaacaaggaagaggtctagaaactaaaacagataaactgattgctttcatttcatattatcattagaaaaataggtagagcagttatggttctta

SEQ ID NO: 97655 - DNA, 445 bp, Homo sapiens
  misc_feature (75)..(75): n is a, c, g, or t
acattcggaacgaggaagatttcttgactttataacaaaatactaaaagtgttgttgctgttggcctggggctgntagttggcccaggggacagagcagcttcccagcctcctgtaccttccagccgtgtgtgcacagacagtcattctcctcctcctgtccccaggtgtcctaaccaccccctctccaagagctgactgccaagtccagtccttcttctgctgggcacacagaggccacactatctttctgagggcctgcggaggacttttcatgggggatgagcctctagggggtgaaataaagcacatggcccacgctgggagacagagatcccaggatgttggatgtgtggctgcctctcttggggaaagggtgggtaccctccaacaactggacgctcacctgagaagccttgccaaagccaggggctcccaacccagtg

SEQ ID NO: 97656 - DNA, 146 bp, Homo sapiens
gatcaggcatgagctgatattcactggaactaagtgacaggtagataggaattcatcagactctctgtctagtttttgtttgtttgtttgtttgtttttgagacagtctttctgtctcccaggctaaagtgcagtggcacgatctc

SEQ ID NO: 97657 - DNA, 533 bp, Homo sapiens
ctgcaccatccatgtgaatactggcttccaatgtctctttccaagattgctactgtgcttggttcatggatgatgacaacaaatgtaaatcttacccagagtatgtatgcaaatgtagacaacaatttgttttctggtcatgttaaatttactgttcagaaccttatagggtaaatgtagaacaacacatcttccagccatatcttctgcattctttaggctgtaatccctgcattcctgcaatgtgatctctttcagtgccggctgtatggatgctttccacacatgacaccaacagggaggttaggagggtcctatggtcagagtgataagagtggtcccactcacgcacggatcatccttccctcaccctcggcagcttaaaactgacctgagagagcctgatgtcactacatcgggtggaccctacaagagagggcatggattgatagggtcacttgtaatttaggagtgattgtcttgaaagcccttgagggagacaggcacagccttgctcaggtctaagaatggta

SEQ ID NO: 97658 - DNA, 503 bp, Homo sapiens
  misc_feature (12)..(12): n is a, c, g, or t
  misc_feature (32)..(32): n is a, c, g, or t
  misc_feature (37)..(37): n is a, c, g, or t
tttcgagcaagntactcactctgtcacccagnctggnatgcagtggctctatcttggctcactgcaacctcatccaaccgggttcaagctattctcctgccttagcctcctgagtagctaggactaaaggcattcaccaccacgcccaggttatatgcagtacagaagagcaacttcagctattgagttacacctcaatgcaacatcctggcagaccagccttaagcccagccgtcccaccatgcatctaagctgcgttctcatcagacccaacttcaatgataaacaattgagatgatgccagaggccagaatccctgagaacccaattggctgtcatcaccatggctgaaacaaggcgcttggcatctagaaaagctgatctgtaggaaatttccaatagagttcattttttctaagtttaaagtgtacaatatcatcaaggtcagacactcgagataaaactaggcttgtgtttaaatataataaaaatatttgaagaat

SEQ ID NO: 97659 - DNA, 406 bp, Homo sapiens
ctagagagcgtccctgtcagaggggagcccagcctggcttccgtgtgaccccagagatggtgaggacggcatggggtgggctggctaggagggggcacctggaggaagatgaagccttggaggacggagtagggacaccctgagcaccttgcaagcttggccagcctcggagctgtcactcctcatacagagccttgtttcctcctcaccaggatcctgccagagataggagatcctcactttacaaaagaggtatctgggcccagggagctggtccaatgccgtacagctgggcaggggcacaagtgggtcccacacacctgcagggaaagctggcgcctttgacaaccctgctcccagctcatccccacagccgcccccgggaaggaggcatgactgtcatcag

SEQ ID NO: 97660 - DNA, 572 bp, Homo sapiens
tgggattataggcgtgagccactgcgaccacagctcattctcatcttaactaattacatctcaaagacagtatttccaaataagttcacattctgagactccaggaggacatggattttgggaggacagtgttcaacccagtacaggagtggagcccacattcattctttcctcattttatgaatccagtgataacctccatcagcaattgtccatacactgtgttgcctcggggtctaattgctgtatgtgtgtatctttttttattttttatttttggacaggatctcactctgtggcccaggctggagtgcagtggtgcgatcttggctcaaccttccaggcacaagtcattctcccacctcagcctcccaagtagctaggattacaaacatgtgccaccatgcccacctaatttttatattttttgtagagacgaggtttcgccatgttgcccaggctggtctcgaactcctgagctcaagcgatccacccacatcgacctcccaaagtgtgggattacaggcgtgagccaccaagccctgcctgtgtgtgtgtatcttaagtcccaa

SEQ ID NO: 97661 - DNA, 472 bp, Homo sapiens
ctcgcgtgcccctcctaaccgaaggagttttgaaaacagaaacccctactctcaaaagcaggaaggcctccctggagtccccgtgaaccaccgagcagcctggtggtctgggggccagcaccccactttcactttctgggtcccatgtcttctgaatgtcagtatccatcctcttctccttgcccactactaagaggtggctgtgcatgtgtgctgaggaagccttggaaccgaggacaattccagagttctccgcggaggtcaacatgccttctagctaatctgatttcagaggttgtcactcattgtcacagtgtggcctgacatactggggggaggggtggggacagccctggtgccaccaaataacatcataagcagcaaatccacacttgaatggttcagagtgcagagctttcttgggcgtcatacataaggatgagcctcccgtaactcaattctcaaacacaag

SEQ ID NO: 97662 - DNA, 389 bp, Homo sapiens
ataattctgagcagataccaaatatctggctgttaaagtcttctggatgactttcaagagaagttatttaacttctagtgaaatgtaatataattagtaaaaaaattttaattaaataggaaatggaaacctcgccaaagtaattcctggacatggctcagaacgacactatcaatcctaaaagtgttaaagatcaggaagagcagcatttgctacagtgcctatggcccaaaggaattcagaataatccttagaaaaattctcctcctcccccaagaaaagtgttttatttttccaaaaagagacattaaaaagttgttatgaaatcaaagaatgtgccttacaattgatgagcttttagaatcgagaaaatatagtaatatgcatga

SEQ ID NO: 97663 - DNA, 549 bp, Homo sapiens
gcatgcctatagtcccagctacttgggaggctgaggtgggaggattgcctgagctggggaggtcgaggctgcagtgagttgtgacagcacccctgcactccagcctgggtgacaaagagagacctctgtctctaaaagaaaaaaaaagacatcaaccagttgggatgtgtggacatcataagacaattaaggaaatgtgaacaatgtctctgtgtttgattattgttaaaattataaaatgtgatattaatggtatagtggttgtttaaaaaggtagtcctggccaggcgcagtggctcacgcctgtaatcccagaactttgggaggccgaggtgggcgggaattcgagaccagcctggccaatgtggtgaaaccctgtctctactgaaaatacaaaaaattagctgggcgtggtgctaggcggctgtaatcccagctactcgagaggctgaggcaggagaattgcttgaacccaggaagcagaggttgtagtcagccgagttcgtgccactgcactccagccctggcgacagagtgagactccatttc

SEQ ID NO: 97664 - DNA, 469 bp, Homo sapiens
cagatgagaaaacaggcccagaaaagggcaatgccatgctggtctccatctacagtcttgcttaagcctggtggttttattcctgtagtaccaatattcaccacacatctcagcttatgcttctggtcagctgttgattccagttatcagaaggatggaccttctctgccctcaaaacgatctgagtgttggaaagaagagcaggccaagagtctagttctttttcctttatctattgcctggcaaattcctgcttatccttcaaggcaactcaaatgtcacctcatctctgaacctctgtaaaaagtgaagtagaagttcctcttcaaagagactttcctccgcatctaattaagaacaaatgtaacttctcttagaagcaaaatttattcaaagacctgtgctaacattctaaaatatctgctagccgtaataaagaaatcaatatactttgtgttcttaactccca

SEQ ID NO: 97665 - DNA, 441 bp, Homo sapiens
aatagtttgtgtccctgttgtaggctcaggtatttcacaaaatccttctcatcttccccactgaaatttagtctcgtgtgaaatgaaacacagaatttactactttactcctaggtaattcccaagatcacctgcctcacttcctccccagggcacaaaatcagagatgtgccaacagaaggcatccactgcagaccctgtaatcttgccaccaccattcttcatgagccatggagaagcttatagaagctggactcctctccccagaaaaataaacacacacacaacacacaaggatctgtatgtaatctcaaggtctcaccccaggaaattcaccccagggtccatgaattcaaagtaagcccccctcagtaaggatgcttcagcggacccctctgattcacaggggtctccattctcacgggcttgctggtttcgctg

SEQ ID NO: 97666 - DNA, 165 bp, Homo sapiens
tcctagagtatccccctggagcggttttcctcctacagattctgcctgtgcacttattccttcagagaagccctatattcacagccccagctatcaacattctttttattttttagttagggggaacagagtctcattctgtcacccaggctggagtgcaatggc

SEQ ID NO: 97667 - DNA, 1063 bp, Homo sapiens
gtgctctgccttctgggagcgtttggtgctggcacctcctgaacttgcctgttgtcacctgccccagtgtgtcagggcaagaccatagacagaagtcctctgacaaatgctgaccgtgacaacagtcttggcaaacttcagtaggcagagatgggctgtccccattgggaaaaagaaccacaggcctgccacttctctgtgaggccgcctggactagatgcaaatttaatactcccctgtcatgttgctaaaaccctctgagactcaggtgacagctacttgcttcatttgactgtatggcctacctggagtgggaggctgggaagatgggcttcttctgagcagcccctcccgcagcctgtgcagctgcctgctaatagctaaagcatgtaagtgtgcgggctgtggagactcctgataactgcggttccatcgtgtccctccaaagtcctggaatgacatgcagctcttgaaagccagcaactcgcagcagacactgaagtcctgcctttccccacaggggtttgtttctgtgcatgtttctcactttggccttaattatgatgagtacgcgttataatctgtccaggtgtggggtatgatggccagtgcttgagtaatgagatgggaagaaactcagcacacaccatcatgaagaggctgaggctcaaggagtgaacaaatgagcctaggctcatgcggtgctgggtggagagctcagggccctgagggctgtatgttctttggcctaagagtggatgaagaaacagtttgctagaagtgcttgcaccaggccaggcatggtggctcatgcctgtgagcccagcactttgggaggtcaaggcgggtagatcacttgaggtcaggagttcaagaccagcctgaccaacgtggtgaaaccccatctcaactaaaaatacaaaattagctggacgtggtggcacacgcctgtaatcccagctactcaggaggctgaggcaggagaatcgcttgaacctgggaggtggagtttgcagtgagctgagatcaccccattgcactctagcctgggcaacaagagtga

SEQ ID NO: 97668 - DNA, 392 bp, Homo sapiens
gaggttagaatctcagcttgaggtttaacttggtagaaaccaccaaatttgaaaagcaaggagaaaaaagactgaaaaaacaaaagaaaacaaaacccagaacagagtatccaagaactgtgggataactacaaagggtgtaacatatgtgtaatggaaattccagaaggataggaaaaagagtaatacatgaaatttctgaaacaataatgacaaaagaatttccccaaactaatgtcagacaccaaaccacagatctaggaagctcagagaacgtcaaccaacatcaatgtcaaaagcaaaacaaaacaaacaaaaaaactatacttaggcatataattctcaaaactacagaaaatcaaagatagagaaaaaatcttgaaagaagctag

SEQ ID NO: 97669 - DNA, 450 bp, Homo sapiens
ttgctgaggtctccaaactttctttgtagagctacttccattatatcccagtgctctaaaaagaattttatgtgccattgcaaatattgaagtacttaactggctgactgaggttggatttattttacagcattttgaaaaatctctggtaagttagtaagactctaaaactcggccacagtctgacacattactggctgaaagagtaaaagggaacagacggacagtgttgtgtgcagcaaaacagtaactgtcctagtccaaaaattgtaatagtttgtggcctagtaaagaatgcaatatgtcactttttctttttactcatgacaattttcatgtatatattttgagactaatttctgagaatatacatattaagcgatatgcttataaaatgtggagtatcagtattggagatagcatgaacctctcaatctgtgaattgagatt

SEQ ID NO: 97670 - DNA, 441 bp, Homo sapiens
gttcacagttatttgtgaaaaataattatatatgacagaagtataaaaatttctaaaagaaaaactatgcagctaacagtagttaagagaccagctggctatcttctaaaaagcttccaacattggtattaccttagtaattcacatgaactccttaccgctaatgatgaaagagtaggtttttagttgactaaagacaatggtatgaagatgttcagcctctgtggctaactataaactatatatctaaagaaggttactactgttagtatagattatgatgaaagaaaacaaacctaactattttcccaaagctgtaactcagataacaacaaaacaggtcaacaaacaaaaacagttaactcttgtttcagaaagaaaaggccacagcaggagcaggagtttttaaaaaagaagaggccgggcatggtggctcacgcc

SEQ ID NO: 97671 - DNA, 825 bp, Homo sapiens
caaactcctaagagtggaatccagctccactcttcaccagttgtgtgaccttgggcaagtgacataactgcttagtgcttctgaacagaatcttaatctataaaatggagcccatacatagttgtgacctcacaatgttgttacgaggataaatgagttaatattttaaaagagcttagaacagttcctggtacatagtaagtgctaccggtttgttaagttaataaaatacacagtttgtatggttggcttgttttgctgttcccctcctccatgtacccctgcaatccttttgtcatttccttttgtacccagtgaacttcctagtgcccatgttcacctttaggcttcagttgtgttttagtctgcttgggttgttccaacaaagtaccatagactatgtggcttataaagagcagaaatatctttcccacagcctggagaaacctgagttagggtataagcatggccaggttttggtaagggcccacttcccaggtgcaaagagctcacttctcactgtgcctcctcacatggcagaagaaacaaaggaactctcgcaggtctcttttaaaagagcagtggtctgggtgtggtggtgcacctgcagtccctgctactcaggaggccgaggcaggagaattgcttgaaccctggaggctgaggtttaagtgagccaagatcacaccactgccctccaggctgggtgacagaataagacttcgtctcagaaaaaaaaagaaagaaagaaagaaaaagagcactggtcccaaaggccccacctctggatatcatcacattgtgggttaggaattgaacatatga

SEQ ID NO: 97672 - DNA, 355 bp, Homo sapiens
ttctaggtgcttggaatatatgatgaattaaagagaaaaatatccctgccctcatggagcttatgttcttgcagagagagacaaactacaaacaatacacataatacatataagttatttggtcttttgcaaggtgataaatgctacggagaataagaacagagagagggctctgtacacggagaggggcagagcagtccatggttgaacaggggtctctgaaggtgtgtgtgtagcagtgagggaaggggtggaaatgccaatggaaaggaagtcatatgtaagaagggcacagcaaaagggcttggtgtgacgtatggcatcctttcatgacaggaaagagtgggccgatgca

SEQ ID NO: 97673 - DNA, 470 bp, Homo sapiens
tgcttatgcaattagttaaaactttttttagtcggaaaggacaggctgtgttaggtcattgctgtgtgtagtgcctttttgagtaacttgtatttacttagagtggacttttcaaggaatagaaaggttaaaatgaattttgtgtgctaggatgtatatggggatctgtacacctgtttaaaaaaatttcaaaactaaaatattaaaatatgtagccatttgtctttgacttaactttggtattttgctgttaatcagtagttactctatccctaagttagtagtctttgttactctttaatttgtgttcaaagggtagacagttccctaaatcttttaactagttctagtgtcaattggggaacctgtggtttgcctctttatttccagtggactctgttttagtgagatgatgagatgaaagttggcacagctttatggtcttcaagctaaaagttaaagatttggca

SEQ ID NO: 97674 - DNA, 605 bp, Homo sapiens
tccagaacccttggctgcagggcctctcccaagactggctgctcatggtcacctctagaatgtggcctttccatgacagggtgaggaggctggagcccagggttacctcacatgctgagtcccagggcaagagagtttgagacatgtcacagagaaagggaagggccggtcaccaaacaatgctgggcatggcgggggcagaagggtggcactaaggagaatgtgatgcagttgctggtggcgtctgcacgtcggggcttcttgggactctggctcccgccgacatgtgctcagtggctctggggcatgctctgagatttgtgacttgtcctggagagtcaacactgtcttcctgacattgggaccaggggcctggggagtgcaggtgagagcccgcccctagcacctaggagctctgggtggctttcgcctgccacctgttggctccctgggctggcctgtctcaaaggagcacttcctccacctgatcttgagtcccctcctcccccagcgtcctgtgagtgggcgagcaggtctctgcttccctgcatggcttggagcttcgactttgtctcgggcaggcaggggagtgtggggaggggctg

SEQ ID NO: 97675 - DNA, 435 bp, Homo sapiens
gctatgtaaatatttaccattgtgtttcaactgtctacattattcactacattaacatgctgtacaggttgtagcctaggagcaataggctagaccatctaggtttgtctcagtacaccctgtgatgtctgcactgtgaaatcacgtaacactcagaacatacctccttcattaagcatagcatgactgtgtattagcaaaaatcagtggctaaggttctgtctgagtccccatgctctttctgacctgggtgagcaaggtgcaggtaatgtacatatacagtacatattcaatagagcattttttttgctcatggtctgagtggaagttaggagtagcctcagggtttttccttcatctgttcaaaacccgtctccctacccatacaatctggcactgaaagtgttggtataaagaatacttgaaagaagaaga

SEQ ID NO: 97676 - DNA, 306 bp, Homo sapiens
gctatgtaaatatttaccattgtgtttcaactgtctacattattcactacattaacatgctgtacaggttgtagcctaggagcaataggctagaccatctaggtttgtctcagtacaccctgtgatgtctgcactgtgaaatcacgtaacactcagaacatacctccttcattaagcatagcatgactgtgtattagcaaaaatcagtggctaaggttctgtctgagtccccatgctctattgaatatgtactgtatatgtacattacctgcaccttgctcacccaggtcagaaagagcgtcgacg

SEQ ID NO: 97677 - DNA, 258 bp, Homo sapiens
ggtcgacgcacatgggcatttaatttgtgcatcgtcatctagacacacactgcaaaaagtaaaaaggagaaatgtaatgtaaatagcagggactattttctcatcatatctgttggggatgtacatttcaaacatcaatgatggtgtatattttcactgactttcactgggacataaacagagcaacttagatgtcagcgattatccaatcccagtctcaccattttatagatgagaagatggtgagccagagaggag

SEQ ID NO: 97678 - DNA, 745 bp, Homo sapiens
ctgggctactatatctatatagagatatttggcttttagaactcacttctaactagctcatttttgtccctgtttctttatggcttttatacgttcaatgtccagttttggagatgggatctcactatgttgtccaggctggactccaactcctgggctcaagcaatcctcctgcctcagcttccttagtagctgggactacagccatgtaccacggcacttagctctgtgtccaatgttttaattaccacctccaggtgtttaagtaaaacgttcgctggttttgtttgtgttttgttctgctagaaaagaatttggaatcaagtaatttctgagctatcagtttcatcactaaaaatctcttgataatctaccattgatgggagcagaaaaaccacctttgaggaaatgtgcaggcttagacctccctgctgcgactgttacaagtagacgcttgcaggggtttccctgaaagggtcacagcaaggccactgatgccttgtgacaccaggcagcaggccaaattgtggtttgcactcctgcatatacttggggtgtgattttctgtttgagacatttttctttgatttataaatccttccccactcgtcaacactggctacatctccttctcttccctgaacaaaacaacccctcacccatcagggtgcaggatgagaaaaccaggatatttcttaaatgggaagtaaacagcccaacagaatcaagggaaagacagtaaaac

SEQ ID NO: 97679 - DNA, 552 bp, Homo sapiens
  misc_feature (498)..(498): n is a, c, g, or t
  misc_feature (522)..(522): n is a, c, g, or t
  misc_feature (530)..(530): n is a, c, g, or t
tttgtacgctcatctgtacaaatgggatttaaggctgtgtaaacacattatgaattattttttaatcattcgttgataaaatctccaagagaagatttggcctctcaatttgatgtgtcattatgtaacaacccatggtagaaaaatgtgcacttaggtattgtgaaggcagcttaggctgggttcaggcttctctgtgatcacagtgcatttagtctgttggcaacagatctttgatttcttccctctgatcaccttatcccaggaactgggcattgggtaagaacttgggatcctcagaaattgaaagcagtcttgggtgattcatctacggttggaatcaagacctgggcagtaccttgttttgcagactgacctaagccaatttgggtatgctttaattagtgggtttagtttggtagcaacaggtaattgccaaagcttagaagtaacctttctgccaagatttactcatcgagccaagatttactcatcggncaagatttactcatcgggccaatnaccatcgncaagatttactggggatcctct

SEQ ID NO: 97680 - DNA, 1090 bp, Homo sapiens
tggaaccagagacatcagcactgtccaggctctctcatgatcttcaaccttcgccagtggcatttcatgaaataaatacagtgtctccatggtgcattgttgctgtgatatttgccttcctttatttaatcgctctggtaatagttgcagctatggtagctaagattcattgtcttaaagagatcctgaataaggcaaccattgagactgcacattgcaacataatatcacaaaacaaaggtaattggtcttcctttgaagaaaactgacattttatatctactgaaaataaaatcttggcatcaaggaaatttgttctgaagcattgagctccagtcccatcaagaccaataatgaagaattggaagtgtataatgtggtattcattcttacattttcttacacatcagataattatcaatagagaatttttaacatattgtgttcacttaagcatgctaaactcaacattttataaattggagacatctcaatcaaactcaaaagattaaaatatgaccttaaaatgattttagattttaaatatatttgcatacagaagtaaatgcaaatataagaaatttcaaatgttggctaacaatgggggaaaacatcacatagacacagaaactaaagggaatctggtcacaagtggcaactaaaaaagagctaatattctgttgattgcttcaaatattcctggtactacatcaatgattgtgggcattaactcacgtgttttcccattaatcttatgatacaagtattaccactgccattgttgtattaataagaaaaccaagacccagagagaatgatactttttttctgggtatcagaaatagtaagaattagaagcttaaactatgatttaagctaaaagagtctaactctaaagatcaggaacatagtcattatgctttgctgatcccagaacaaaaaatcataatgaatcaaattgtaagaatattgcttctttgtaaatagtcagagctgcttatacaagcagatttacgtttttctaccctgcatgtatcttctaaagaggaacagtgagaaaaagaataatagctcttcataaggactattt

SEQ ID NO: 97681 - DNA, 157 bp, Homo sapiens
gtcaaattcctaaaccagtacttttggcttttctggggggctgggggagagacagagggagagacggagagagtataagtgggtgtatgtgagttgcagagaagaggagagttatgatagaacgagatgtgtatattagaagctaaggaaaatttaa

SEQ ID NO: 97682 - DNA, 523 bp, Homo sapiens
tcactttatataaacttttattaataaaaaattttaaataaacatttcaattccaaatatacacattatgtaattccttgtctatggagtggcttttaccttgcccaatattacattttacaaaattcgtatagatgaaatcagaataaagaagatatgtgaagttagattttcccattagcatataattcataaactcttaattaccatgagataatctaaaacaagatattcttaagagaatcaactaaggaaaatttagcataaataaattttatttatttaataatgagtcagcattgctgagggacaaacctgagatttgtagtactgaaattattcatatcacttacataatccagaatcatgaagagggttgagtctgagatttgagatcctcatattgattctagggaaccttaaggcacccaggcctctctttagaaactgattacgctatagggagaagacactcagaccttaaccaagtctcctatctgaatttaaacaagaatgtctaaag

SEQ ID NO: 97683 - DNA, 347 bp, Homo sapiens
agccagagacactagctagaggaattgatgtgtatttataattcaccatatgaattttgggggacagatgtcaatctggaacatgtgtgtaatgatttacttgctcttctcctggcatcaaatgttctttccatagttgtttccagttttcttttattatgaatgctgtttctttgtaagcatgaaatctatgttcatttgatatgcaaaagtagaatcatgttttaatatgccttttaaaaatgaagttgaacattatagaaaaatgttgactttccctgttccccttttttgggagatggaggaatttgttgactgtttccttggcctatctttgttgttagagg

SEQ ID NO: 97684 - DNA, 618 bp, Homo sapiens
  misc_feature (37)..(37): n is a, c, g, or t
tactgagacatgtattatacagggtttatagtattanatattaaccagctggaatgcaatggtgtgatcttggctcatgacaacctccacctcccggattcaagtgattctcctgcctcagcctcctgaatagctgggaatacaggcatgcaccaccacacccggctaattttgtatttttagtagagatgaggtttctccatggtcaggctggtctcgaactcccgacctcaggtgatccgtctgcctcggcctcccaaagtgctgggattacaggcatgagccactgcgccagcctattttattattattttttgagacagagtttcgctcttgttgcccaggcacaatctcggctcactccaacttctgcctcccaggttcaagcgattctcctgattctcctgcctcagcctcccgagtagctgggattacaggcgcccaccaccatgcccggctaatttttttgtattttcagtagagacggggtttcaccatcttggccaggctggtctcgaactcctgaccttatgatccatccacctcagcctcccaaagtgctgggattacaggcgtgagccaccgtgcctggccctaattttgtatttttagtagaga

SEQ ID NO: 97685 - DNA, 3679 bp, Homo sapiens
cccacacgcctggagccgagggtctgtgtcaagagcggcaggggctgcaggagataagagaaacgggctgccgtggggtgtgtgtaggcttcagagacatgggatcacggaagactgaagcagaaacagtggattaagacttcctgagcgatagctggcactgccttccccacaatggcagaggtggtggctgaggtggccgagatgccaacacagatgtcaccaggggcagtggagatgtcaacacctatgtcggcagagatgatggagatgtcaacagaagtgactgagatgacacctggggaggcccttgcctcatccctcttcttccagcatcaccagttcatgtgctctgagtgtggcagcctctataacacactggaggaagtcctctcacaccaggagcagcacatgcttgctgtctcagaggaggaggcactgaccacacagaatgttggcctggagccggagctggtgccgggtgctgaggggcccttccagtgtggtgaatgcagccagctcatcctctcccctggggagctcctggcccaccaggatgcccacctccgagagtctgcaaaccagatccaataccagtgctgggactgccaggagctgttcccctcgcccgagctgtgggtggctcatcgaaaggcccagcacctttctgctacggtagctgagccaccagtgccacctcctttgcctcccccaacaccactgcctccaccttctcccccatccgaagtcaagatggagccctatgagtgtcctgagtgctctaccctctgcgccacccctgaggagttcttggagcatcagggcacccactttgactccctagagaaagaggagcgcaatgggttggaggaggaggaagaggacgatgaggaggatgaagaagatgatgaagagatggaggatgaggaggccatggcagaggtcggtgatgatgctgtgggaggtgacgagtccacagctggctgggctcagggctgcggggactgtccccagcaccagccctcagcaggggctcgccggcaacaccggcggacggctcacagcccggcatctgccacccaccccttccactgcagccagtgtcagcgcagtttcagctccgccaaccggctgcaggctcatgggcgggcccatgttggtggcacacatgagtgtacaacctgctccaaggtcttcaagaaagcagcatcgcttgagcagcacttgcggctgcatcgcggggaagcccgctacctctgtgtagactgtggccgcggctttggcacagaactcacgttggtggctcaccggcgggcccacactgccaacccattgcatcgctgtcgttgcggcaagacgttcagcaacatgaccaagttcctctaccaccggcgcactcacgccggcaaaagcggggcacctcccacaggagcaacagctcccccagctccagcggagcccacccctccaccaccaccccctgccccacctgcccagctgccctgcccacagtgctccaagtcctttgcctcagcttcccggctgtcccggcaccggcgtgcagtacacgggccccctgaacggcgtcaccgctgtggggtttgtggcaagggcttcaagaagctgatccacgtgcgcaaccacctgcggacacacacgggtgagaggcccttccagtgccactcatgtggcaagacctttgcttctttggccaacctcagccgccaccagctgacccatacgggtgcacgtccctaccaatgcctggactgtggcaagcgcttcacacagagctccaacctgcagcagcaccggcggttgcacttgcggccagtcgcctttgcccgcgccccccgcctccccatcactggtctctacaacaagagtccctactactgcgggacttgtggccgctggttccgcgccatggcgggcttgcgactgcatcagcgggtccatgcccgagctcggactttgacgctacagcctcccagatcaccatctcctgccccacccccacctccagagcctcaacagactatcatgtgcacagagctgggggagaccatcgccatcattgagacatcccagccactggcgcttgaggacaccctgcagctgtgccaggctgcactgggggccagtgaagcaggcgggctcttgcagttggacacggccttcgtgtgacgcagctgaaaagcaacaacaaaagggtttggttgcaacagccagtgtgggtacctctggggagagaggacctcctctgacaaactggtctggtacccaccatgtgccaggatccaccctggcctctttttacccactgactccccagaacaacccttccaggcttctcttgtcatctttctctgcctgaggggaaactgaagctctgaaatgcgatgtgatctgtaccaggtcacccagctatgctgcaaagtgggttggccaaggccctttgcactgcatcaccctggtgcccagcaacatcaggtaaccttcactgagcaccaagcttatgccaggtctgtgctggccactctcatatacctcttcagatcctctgcttgtacccccagcccttgccttccctggattttgggcacccaggactttgctctgcctggtggagggtacttgatttctctgggcttccttcatctcaattctgacagtgtggaaggaaatctgtaggtacccaggtcctcagctccagactgggtgatgctggagacccaggagcaagtcagcacaggctctgcccacaggaggcatgcacaatctggtaggagaaacgcacaagtacagatagcttgctctctgagtgtgtctcattgattcattcagcctgtgtgtcctaaagcctcccttctcccatactgggtgatgctgggggcagagatgagtcaggcctaaggcttctctgggctgtgatggggatgtgcagggacagtgggatcccaggaaacagacctccatggtgggagatcaggagttaaggacttcctagagaaggtagtccctgaaggaaaagtaggaatctggcagtgaaagaggaaaagaacattccaggcagacagcactgcaagagggtgagctcttggtgtatttggagaccatccagttattcatctgactgcctacctgaggcaagcaccacacttaccactgtatgtgtactatgatcccaacaggcttgtgacatagatttcatattatccctgtgtatagatttttaaaactggtggctgggcgtggtggctcacgcctgtaatcccagcactttgggaggccgaggcgggcagatcacgaggtcaggagatcgagaccatcctggctaacacggtgaaaccccgtctctactaaaaatacaaaaaattagccaggagtggtggcgggcgcctgtggtggccagctactcaggaggctgaggcaggagaatggcgtgaacccgggaggcggagcttgcagtgagccgagatcgcgccactgcactccagcctgggcgacagagtgagactccctctcaaaagaaaataaaaataaaaataaactggccaggtgcggtggctcacgcttgcaatcccagtgctttgggagactgaggcaggaggatcacttaaggccaggagttcgagaccagcctgggcaacagcaagacctcatctctacaaaactt

SEQ ID NO: 97686 - DNA, 577 bp, Homo sapiens
tttcttcctagttttaacccttttctagaaaaataggctcagtctgcctactgagaggtgaagccatctggacttccggggtcgagtggggacttggagaacttttctttcttacaagaggattataaaatgcaccaatcaggcgctctgtagctagcaagaggattgtaaaatgcaccactgcactccagcctgggtgacagagcaagactccatctcaaaaaaaaggaacagagtcaccaagacatacacatactggaccaatttgggaaagtacggaagtttgctttgaatatatagcaaaggatatgtgagggatagctgtggaagatccaactgtcaaggaaggttaggaccagactctgaaagtagagtgctggtgggagatgtggaacaggggacaagagatggaaggttttgagttggggaaaagtattctggcagcaggattgaaacattaaagaaaagtaaccctgttaagtggttatcacaatcaaacatttaccaagtaatcactgcaagtggattcaatttgtaaagtcacataaaagttgcttatctctccactttttttttt

SEQ ID NO: 97687 - DNA, 405 bp, Homo sapiens
aagaacctatgtggttttgtatgtatgtatgcatgccctgggtgagaacatgtacatacaagcttgcctttggggcaatgaaaatacccaccattatatcactgaaataacaccacacccatttgttggaaccctgatcttttcacagtcatgtgtcaaaccataaaaatattatcgctacccatcactattgactcttctaactcaattttttttatatttcatggaacaaaacctattattctatgataattattctactaaaagaccaaattatataatgttctttgctcctctgaaaattaaaggccaacacagaattgatacctgatgatattgcattgtgaagttcacaaatggaaacatgaattgaagttcacaaattgaaacacttaattgttgatg

SEQ ID NO: 97688 - DNA, 956 bp, Homo sapiens
cggcgttactatcaagcaaccaaactgcaagctttgggagttgttcgctgtccctgccctgctctgctagggagagaacgccagagggaggcggctggcccggcggcaggctctcagaaccgctaccggcgatgctactgctgtgggtgtcggtggtcgcagccttggcgctggcggtactggcccccggagcaggggagcagaggcggagagcagccaaagcgcccaatgtggtgctggtcgtgagcgactccttcgatggaaggttaacatttcatccaggaagtcaggtagtgaaacttccttttatcaactttatgaagacacgtgggacttcctttctgaatgcctacacaaactctccaatttgttgcccatcacgcgcagcaatgtggagtggcctcttcactcacttaacagaatcttggaataattttaagggtctagatccaaattatacaacatggatggatgtcatggagaggcatggctaccgaacacagaaatttgggaaactggactatacttcaggacatcactccattagtaatcgtgtggaagcgtggacaagagatgttgctttcttactcagacaagaaggcaggcccatggttaatcttatccgtaacaggactaaagtcagagtgatggaaagggattggcagaatacagacaaagcagtaaactggttaagaaaggaagcaattaattacactgaaccatttgttatttacttgggattaaatttaccacacccttacccttcaccatcttctggagaaaattttggatcttcaacatttcacacatctctttattggcttgaaaaagtgtctcatgatgccatcaaaatcccaaagtggtcacctttgtcagaaatgcaccctgtagattattactcttcttatacaaaaaactgcactggaagatttacaaaaagaaattaagaatattag

SEQ ID NO: 97689 - DNA, 1061 bp, Homo sapiens
cggcgttactatcaagcaaccaaactgcaagctttgggagttgttcgctgtccctgccctgctctgctagggagagaacgccagagggaggcggctggcccggcggcaggctctcagaaccgctaccggcgatgctactgctgtgggtgtcggtggtcgcagccttggcgctggcggtactggcccccggagcaggggagcagaggcggagagcagccaaagcgcccaatgtggtgctggtcgtgagcgactccttcattcctgatgattaaaattacatagtctggatgtgcccatgggattttttgaaaatattacttaaagttatctttgtgatttaaacttagagaatgggcagtactggaaattgactagatggcattttattacagagtgctcttgtaatcaaaggcaaatgaaggaagcaggattgtgcagaggagaagctgaattttgttgccatcttatgaatgacagttctcaaactagtatggtgcttcagagctgctttccaataggagtgaggagaacagacctttccacctgcatgttggatggccactggttgtgggctgctcctagaatggggcatggtgttgggcaaagcagctgtcttcagcagaggcaattgttcattcctaaaagggaatccgaatgtggatcacaacatcccagaaacttccaaagatgactgagatatataggtttgttattttttttagtgtagtatgaatgcatagatttttctatatttgtgcttaaattttttgcattcacggccgggcgcggtggctcacgcctgtaatcccagcactttgggaggccgaggtgggcggatcacgaggtcaagagatcaagaccatcctggctaacacagtgaaaccccgtctctactaaaaatacaaaaaaattagccgggcgtggtttcgggcgcctgtagtcccagctactcgggaggctgaagcaggagaatggcgtgaacctgggaggcggagcttgcagtgacctgatatcgcaccactgcactccagcctgggcgacggagcgagagtccgtctcga

SEQ ID NO: 97690 - DNA, 838 bp, Homo sapiens
gttctctgtagaataatccagttaataaatgcagaagcaatggtagaattagaaaattgccagaaaatcatcagcagatcctaaaaatattagattaaaaagttttggttgagaaactgctcactttaaaaaaaaattttgagaggtattttaaatggatgaattagagagacagccctgaatccactgatcagttgtaacatcactaaaagtgggccagccaaacattatttacctcttcatgtggtatagaaggaagtacacagcattacttatgatatactcttaccgaaatttgaatctattcaagcctctaaccctagctactagtttatgggaaatataagaagaaacaaaaacaaattacctgatacctgataccagtgggacattttacttgacaaattggccctgttacttgaatagatggcattttgaaataggagcttggtctgttatacattaaaagagactcaagaggtataatatcagatataatgtatggatcttatttggatattgaatgatcaaaagacattttttaaggccaggcgcagtggctcatgcctgtaatcccagcactttgggaagctaaggcagacctggaacgcaggagttcgagaccagcctgggtaacatggtgaaaccctgtctctataaaaaatacaaaaaattattcggccatggcagtgtgcacctgtagtcccagccactcaggaggctgaggcaagattgctttatcccaggagttcaaggctgcagtgagctatgatcatgccactgcgctgccccctagcaacagagggagaccccaactctttgaaaaaaaaaaaaaaac

SEQ ID NO: 97691 - DNA, 335 bp, Homo sapiens
tgcgcggaggctcggggagtcggcgccatgaccccatcgaggcttccctggttgcttagctgggtctcggccacggcgtggagagcggcaagaatccgcgctcctggtccaggctccagcagaaaaggatttgtggcagtttacagtttatcttttaaaaatgggaaaagtgcagaagtgagccaaaggcaaataagtataacgtaaattagatgaagccaggaattgtcagtacagaaaaagcattcatgctttcagtaaaaccaacatttttaaacccattgttgttggaaatttttctcaagataatacagttagcagcccagactatgcaa

SEQ ID NO: 97692 - DNA, 706 bp, Homo sapiens
tgcgcggaggctcggggagtcggcgccatgaccccatcgaggcttccctggttgcttagctgggtctcggccacggcgtggagagcggcaagatcaccccttctgtgtcattctctgaggaaaacaagttcttctcaaggaggaaagtctgaacttgtcaaacagtcccttaagaagccgaagttaccagaaggtcgttttgatgcaccagaggattcccatttagagaaagaaccactggaaaaatttccagatgatgttaatccagtgaccaaagaaaaaggtggacccaggggcccagaacctacccgatatggagattgggaacgaaaaggacgctgtattgatttttaagtcgcatattctttaacttcaatattgttttctgaatatgtacatctgaattaacttatttctgattattttctttctttatatcctttatgtcgtgtagtttgtataatgtgtttaaatatatatatatatgatggctttggaagaaaatatgctgctggtctcgaactcctgacctcagttgatccacctgcctcagcctcccaaagtgctgggattgcaggtgtgagccaccacgcccagcctagaaatgattcttagagctgtaggcctttacttcatcatttttcagtttaaattaatcagttgcttataaaatgcatacataaataaaataatttttaaaaaaaaa

SEQ ID NO: 97693 - DNA, 904 bp, Homo sapiens
tgcgcggaggctcggggagtcggcgccatgaccccatcgaggcttccctggttgcttagctgggtctcggccacggcgtggagagcggcaagatcaccccttctgtgtcattctctgaggaaaacaagttcttctcaaggaggaaagtctgaacttgtcaaacagtcccttaagaagccgaagttaccagaaggtcgttttgatgcaccagaggattcccatttagagaaagaaccactggaaaaatttccagatgatgttaatccagtgaccaaagaaaaaggtggacccaggggcccagaacctacccgatatggagattgggaacgaaaaggacgctgtattgatttttaagtcgcatattctttaacttcaatattgttttctgaatatgtacatctgaattaacttatttctgattattttctttctttatatcctttatgtcgtgtagtttgtataatgtgtttaaatatatatatatatgatggctttggaagaaaatatgctgctgtaaattaggaaagggagaccagcctgaccaatatggagaaatctcgcctttgctaaaaatacaaaattagccaggcgtggtggcatgcacctgtaatcccaactcctgagtagctgggattacagacacccaccattgcgcctggcctaatttttgtatttttagtaaagacaaggtttcaccatgttagccaggctggtctcgaactcctgacctcagttgatccacctgcctcagcctcccaaagtgctgggattgcaggtgtgagccaccacgcccagcctagaaatgattcttagagctgtaggcctttacttcatcatttttcagtttaaattaatcagttgcttataaaatgcatacataaataaaataatttttaaaaaaaaa

SEQ ID NO: 97694 - DNA, 778 bp, Homo sapiens
tgcgcggaggctcggggagtcggcgccatgaccccatcgaggcttccctggttgcttagctgggtctcggccacggcgtggagagcggcaaggaaggaaacaaaaagggtaacttgaccaacatccaacacctagatcaccccttctgtgtcattctctgaggaaaacaagttcttctcaaggaggaaagtctgaacttgtcaaacagtcccttaagaagccgaagttaccagaaggtcgttttgatgcaccagaggattcccatttagagaaagaaccactggaaaaatttccagatgatgttaatccagtgaccaaagaaaaaggtggacccaggggcccagaacctacccgatatggagattgggaacgaaaaggacgctgtattgatttttaagtcgcatattctttaacttcaatattgttttctgaatatgtacatctgaattaacttatttctgattattttctttctttatatcctttatgtcgtgtagtttgtataatgtgtttaaatatatatatatatgatggctaatttttgtatttttagtaaagacaaggtttcaccatgttagccaggctggtctcgaactcctgacctcagttgatccacctgcctcagcctcccaaagtgctgggattgcaggtgtgagccaccacgcccagcctagaaatgattcttagagctgtaggcctttacttcatcatttttcagtttaaattaatcagttgcttataaaatgcatacataaataaaataatttttaaaaaaaaa

SEQ ID NO: 97695 - DNA, 385 bp, Homo sapiens
tttgagacagagtctctctctctcacccaggctggagtggagtggcactatcccaactcactgcaacttccgccccgccaggttcaagcaattctcctgcctcagcctcctgagtagctgggattacagacacccaccattgcgcctggcctaatttttgtatttttagtaaagacaaggtttcaccatgttagccaggctggtctcgaactcctgacctcagttgatccacctgcctcagcctcccaaagtgctgggattgcaggtgtgagccaccacgcccagcctagaaatgattcttagagctgtaggcctttacttcatcatttttcagtttaaattaatcagttgcttataaaatgcatacataaataaaataattttt

SEQ ID NO: 97696 - DNA, 735 bp, Homo sapiens
tgcgcggaggctcggggagtcggcgccatgaccccatcgaggcttccctggttgcttagctgggtctcggccacggcgtggagagcggcaagatcaccccttctgtgtcattctctgaggaaaacaagttcttctcaaggaggaaagtctgaacttgtcaaacagtcccttaagaagccgaagttaccagaaggtcgttttgatgcaccagaggattcccatttagagaaagaaccactggaaaaatttccagatgatgttaatccagtgaccaaagaaaaaggtggacccaggggcccagaacctacccgatatggagattgggaacgaaaaggacgctgtattgatttttaagtcgcatattctttaacttcaatattgttttctgaatatgtacatctgaattaacttatttctgattattttctttctttatatcctttatgtcgtgtagtttgtataatgtgtttaaatatatatatatatgatggctaatttttgtatttttagtaaagacaaggtttcaccatgttagccaggctggtctcgaactcctgacctcagttgatccacctgcctcagcctcccaaagtgctgggattgcaggtgtgagccaccacgcccagcctagaaatgattcttagagctgtaggcctttacttcatcatttttcagtttaaattaatcagttgcttataaaatgcatacataaataaaataatttttaaaaaaaaa

SEQ ID NO: 97697 - DNA, 411 bp, Homo sapiens
cgaggactatgtgtatgttcgcagtgattcgcgcatgagtcgatataagttctgtgacacgttggtagtgggacgatacggtagacaattttcttccccatctccagcagcaccagccccgagtgggctcatgacatggtgagtcacgccaacgtcggcaatggattatgatcgcgcaataacttgttaaagaacaaactcacatgagcttaatttatgaatacaaggaatgagtgcccttcacaggagaggcccatcaatggctgattagatgcaagacccaacctctccgcccactgcgagaccccgtctccttaggtgtgggtgtgtctgcaggtgtgggtgtgtctgcaggtgtgggtgtctctgtaggtgtgggtgtgtctctgcaggtgtgggtgtgtctatagg

SEQ ID NO: 97698 - DNA, 124 bp, Homo sapiens
ccggcgaccctggcgttggtgatgagtgtgtctgagagtgtgtttatgtgtgtaggactgtgggtgtgtgtcatcatttccagaccttgccttgggggaatctagggacaaggacttggaattt

SEQ ID NO: 97699 - DNA, 268 bp, Homo sapiens
ggatgattgaattattaagaatcaattgtaagaacatataatacttccaggatgcacactttgttttctcaccagtataatctgggttaaagatgaaagtgtggcagtgcacagactctatctgaggaggagaacatagggaaactgaaagacaatggcagagaaaaagacaaggacagtaggaaaatctgaagcctctgacataaattttttgaagacaaggtcttggcaaatccattgacctcagattcttttatcatggggcatt

SEQ ID NO: 97700 - DNA, 425 bp, Homo sapiens
gttagccaggatggtcttgatctcctgacctcgtgatccacccaccttggcctcccaaagtgctgggattacaggcatgagcctccgcgcctggcccctctcattctttctcttcccaaagcacaggtttctatgagccacggcctcgaccagcaaatcccacttctgacactagttgtgtgaaaacacatacacacacaaactcaaaatactttctctattctttcactcaacaacaatcaacacagaatatttttgtgaccaaatgtttggggattcctccccaccaacaagcaaacaatcaattctgcagcaaataccagctggctatactccaattcaattctgacaccatctacctggagatagcatcatatcccacagattgagggctgggtccccaagattattgcccttcttcccag

SEQ ID NO: 97701 - DNA, 198 bp, Homo sapiens
accaaaatctgacctttggattgagcgatgtggagattgccgatgcacttgataagagtagtttcattcagtaagcctgtgggagcgggctcaagaaagcctgcctgggagacagaaagattagaaaatagctcttttgaggagcttgaaacagaaagaaccaaagtgttagctggatggcacaatgcggtctagagt

SEQ ID NO: 97702 - DNA, 463 bp, Homo sapiens
cgttaatctgagtttaaacaaaagccacttgtaccattttattttccccttccctttgtcttctctcaatttgtctttcttttatttagtatttgacaggcagttgagaaattggatcccttccaaatcagtaagtctttaggtgaaagtcggatgaaacttatcttaaaaatggaaagaataggccaagcatggtggctcacacctgtaatccaagcactttgggaggccaaggcgggaagatcgcttgaacccaggagttagagaccagcctaggcaacaggttgaaaccctgtctctagtaaagtctgaaaaattagctgagtgtcgtggtatgtgcctgtagtctcagggcaggaaagtagtttcaacccaggagtttatggctgcagcaagccatgatccagccactgcactccagcctgggcgatgaagcgagaccctgactcaaaaaaaaaaaaaa

SEQ ID NO: 97703 - DNA, 311 bp, Homo sapiens
atggcaaactcaagttttgctttttgggagtttgtagaatttttttttcctaaaccttttcattccactgttggttgaatctgcagatatggaactcatggatgcatagggctaactatacttaaattcttttaaatcttggttcttagcactgaaaatgggcatgataaaaacagagttaaaaaggaagagttctcaagctagtccttgggctcatattccagttctactacttaagagatatgtaaccttgggcaagttgcttaacctttctctgcctcagtgtttttactggcaaaataaagataata

SEQ ID NO: 97704 - DNA, 300 bp, Homo sapiens
cgggaggaaagggggcacttacgggcactgccccaggtgtgagcggggcccagggtggtggagaccagggcacttaggcggcaggtagggaagcctgaggcagctgggctttatgtcaaagagagagggtgtggctctgccgggcctcccgttgggcctcaccacagcttgcatgctgactcccctccctggctcctgtccatcctactccctctgaacctgcatcttcccactccagagtggctccccaagaagccgagcatccccagcaggggggattagacaatcaggtgggccttg

SEQ ID NO: 97705 - DNA, 379 bp, Homo sapiens
gcttaaaacctgaggaagcaaatttattgattcattcatttaacaatatttatttaatgtcttattatgtaccaagcattacacaaggtgctcaagctacaatggcaaaccaaggagacaaaatgtttttttaaaataaactggtttaccacaaattaataattttcctctataggttaatttttcagttgtggtacaccttgaattttacaattttttttctttctcttacacaggcaaagcaaattgaagaattggagcactgaatataacatctacagacatttgaattagaaaatgtattaattatttattgctgcataacaaattactccaaaattcaatggtttaaaaaaataaacatttattttctctgaca

SEQ ID NO: 97706 - DNA, 225 bp, Homo sapiens
cagggcaggagagaagtggaggatgctttttgatagcatttcaaagatggtggcaggtgctacctcagggcatagggaatggatgagacaattgaccagtttacaaactgagtcagagcaggggactgggggagaaggatgcctctcttctagctgggaggaaatcaagaaaaacattaagaagctggagcctcctgggaatgcacaggccaaagctcagacaca

SEQ ID NO: 97707 - DNA, 400 bp, Homo sapiens
caaaccgcattattacaacactttgaagttagaccacatgctgatgttctgtgagcacagatgttgtggctgttcttgtgcaatgtgtgtgtgtgtgtatatatatatatacatgtttttgagatggagtctcactctgtcacccatgctggagtgcagtggctcaatctcggctcacggcaacctctgcctcccagttcaagcgattcccttgtctcagcctcccgagtagctaggactacaggcgcgcaccaccacgccggactaatttttgcatttttagtagagacagggtttcatcctgtgcaatatttttatgctcagcatatcacagtgccatcccttgacacactggttaatcggtggttctcaactgcggctgtttaaaatcacttggggg

SEQ ID NO: 97708 - DNA, 148 bp, Homo sapiens
aaggaaaaaaaattccagtgacagatgttcaggtcagttggacaaaacagtctgaggaatgagaccatagatttttcaacttttcaaacaggtctagaaatctgagccataatgtagtaggaaactgtggctactattaactcttctc

SEQ ID NO: 97709 - DNA, 382 bp, Homo sapiens
atattttaatagttaatgaatttgttaccaaattcatcataaatattttcaaccagacatgagacgagtaccatgggtcccatatacccatcctccagacttagtagttaccaagagttttccacagttgttttacctcctctcccttttttctttgctgaatattttgaaggacatgccagacttcatgtcctttcttccctacacctcccagtgtgctgctttaaaaataggaacttttttttttttttacttaactgtaataccatcagcacacctaatgaaactaatgtcctctttttttttttttttttttctgagacggagtctcactctgttgccaagctggagtgcagtggcacgatgttggctcactgcaacc

SEQ ID NO: 97710 - DNA, 216 bp, Homo sapiens
gttgtgcccagtgtcttcttggtgcaaggtggcttcatagtggaggaggccttctgcccacccagcacagggggcaacagggatggtccaacccccaggctctgtggctgggtgacatcagggcctggctataaaagggtagcgaccatggacagtgctgactgcaagtcccagcagagttagggtaataaactaggccagctgcagcagccccta

SEQ ID NO: 97711 - DNA, 426 bp, Homo sapiens
ggtgtgttttcaaatgaaccacgtggttctttcctggaccccacttgggactgtaagggcctttgaggagatcgtaaaggagggttaggtgaatgacagtaatggtgtcaggacattcactagagaatcttcagcagctcgtggctcccagaggcagagtgaaaggacaccacagagatctctgcagataattctatggaaaccaaggtccctggagaggacaggctcatcccacatcacacaccccataagcaccaggagtagatgatcaaggtctcaagactcccaacagggtgttctttgctttccttctttcatgaccaacagagttataaatcgtgcagattttgacactgcaagtgaattattaaatctacctttagagccttttctatacagacatgaagaaaattcattgaaatctgc

SEQ ID NO: 97712 - DNA, 343 bp, Homo sapiens
gagttgatacgcaatcttctctcagtctccatggtaatcgctctgaactcaccgcccagctgtagggcagagcttgcatgtgatcatgataaactgcaatatgcattcaactgaaatagaaaagcagctcaaggatgcacagcgaagctgtggtttttttagtttttttttttttttttttttttttttgagacagttttgctcttgtcgcccaggccggagtgcaatggcgtgatcttggctcactgcaacctctgcctcctgggttcaagcgattctcctgcctcagcctcccaagtagttgggattacaggcgcctgccaccacgcccagctaatttttg

SEQ ID NO: 97713 - DNA, 177 bp, Homo sapiens
gagaggctttaggagacaagagttgacttggatgcaagagttgatggatctagccgactgaccacctccccctactacactgagtgctttggagaggcaagtaggaccaggtagtactcgccagggtctcctccttcctaagagtccagcagaggccccatgcagggactatgtttt

SEQ ID NO: 97714 - DNA, 406 bp, Homo sapiens
aggcatgtaaaatttatttagaatgggagacaaaattataggggggattttcattttgtttctttttttgttattttatctgtgctaatgtattatcaggataatctatgtccatttaaataaaataaaaataattcatacaagctaacaaaaaggtaaacatctttaaaagtttgaatgaaacatatctcgtggaaaacattgtaattccaagttagtcaagcacctgtgttatatgatggctataacgtgggggaggagtaatgagcagaataaaacaaaagactggaactaatagtagttagtgttatcaacaattttctccattttctctaagtagcatccatgtagcaaaatttacttctagaagattcaaagtctttctctacaactctttaattaggtt

SEQ ID NO: 97715 - DNA, 692 bp, Homo sapiens
ggaggcagaggctgcagtaagctgagatcgtgccactgtactccagcctgcgtggcagagcaagactctgtatcaaaaaataaagaaagaaaataaaatatattttctaatattcaagtgagatttcttctacatatttgttgtctctattatgatgcagtatgtactacgaatattttcacgtaattatcaagtatcagcttaagaaaattcatgtgatctggtttgtttgcttaacagagatttaacaacaaatctaagagactagctttactatcattaataagaaataaggtaactgacttccctttcaaagagatttattccatatttaatcacatacttcaaatctgggttcattatatactaatgtcagtgctttgggaaagcaaagatctcccataaaaaagaaaaataggagctttccactttaggatagtaatgtgagcacatatatttaacgctctttccctaagtgccaaggaattgatcagagaaatgcaaatagtgggaaaagtgaaaaagaaatcattagcagtgttggataacaggaaagaaggccatgaagaggccccagcggagaaaattgcccctacaaaatctgcgcggatgggatcaaattggggaccataataactagtctctgattaggcagttatgatggaggaagtttgcctgtggaataagagagc

SEQ ID NO: 97716 - DNA, 1096 bp, Homo sapiens
acaattgagaaaggtaattgaattttagctcactctctttcccttccccaactaatgcgtatcatatccttggaaataggaattgtacacttcttttatatcctcacaatgcttagcataaagtcctccacagagcaaatgctcaataaatatttgatgagttgatgtttcatctgtttcagaagttatctaagataagctgtaacatttgcttttcttttgcagtttgcccagctggtcgctatctataagacactgggaggagaaaagttccctctcattgaacagacatactaccccaaccacaaagagatggtaagtggctcagtggggacattagtctttctgctgttttcattttgcacttagccacctggttattgtggggctctgaaaagggcctcagcatctcaaccccaaagactccactggggttgaactatagagcttatgcggctggaataactagattttagctgacagcctcttgtcaaattctggagatagaatagggaaaaacaggagtaagggcagtttaatcaagctgagagaataacaaacttctggaccaacaatcagatctcactgcttttgagtcccagccctggctctgccacttgtcattgaacaagctgcatttcctcactgtgtgcagtttccaataagacggtcaagtgggcatatttatccctgcacaggatattctaatatggtacagacacaatttaagtgagattcattaagtaatagcttctgggaaagtgtgaagcatctactagatgtaaggcattgctcctactattattaatcccctgactctcccattcccctggcgcttccacaactgtgataaggctgggttaacactgtgccttctctgaggccatcctagtaagtcagaaggagcagagagatgggacggttggttggtaaggaggctattgccaatgtttttcccgtgcagggacctggagctcaaactcccttcttcttccctgtccccacaccctctgccccaggctggtgtgatcaattggtgatcgtgcttaacccaccaatggagactccctgcgaagcattccaagtggaacagaga

SEQ ID NO: 97717 - DNA, 3791 bp, Homo sapiens
  misc_feature (238)..(238): n is a, c, g, or t
ctccctccgcgccaccagaccccgtagccccgcgcgcccccagccctttaagccagatgatgaacttcctgcggcgccggctgtcggacagcagcttcatcgccaacctgcccaacggctacatgaccgacctgcagcggcccgagccccagcagccgccgccgccgccgccccccggtccgggcgccgcctcggcctcggcggcgcccccgaccgcctcgccgggcccggagcggangccgccgcccgcctcggcgcccgccgccgcagcccgcgccgacgccgtcggtgggcagcagcttcttcagctcgctgtcccaagccgtgaagcagacggccgcctcggctggcctggtggacgcgcccgctcccgcgcccgcagccgccaggaaggccaaggtgctgctggtggtcgacgagccgcacgccgactgggccaagtgctttcggggcaaaaaagtccttggagattatgatatcaaggtggaacaggcagaattttcagagctcaacctggtggcccatgcagatggcacctatgctgtggatatgcaggttctccggaatggcacaaaggttgtccggtccttccggccagacttcgtgctcatccggcagcatgcatttggcatggcggagaatgaggacttccgccacctgatcattggtatgcagtatgcaggcctccccagcatcaactcactggaatccatatacaacttctgtgacaagccatgggtgtttgcccagctggtcgctatctataagacactgggaggagaaaagttccctctcattgaacagacatactaccccaaccacaaagagatgctgacactgcccacgttccctgtggtggtgaagattggccacgctcactcaggcatgggcaaggtcaaagtggaaaaccactacgacttccaggacattgccagcgtggtggctctcacccagacctatgccactgcagagcctttcattgactccaagtatgacatccgggtccagaagattggcaacaactacaaggcttacatgaggacatcgatctcagggaactggaagacgaacactggctctgcgatgctggagcagattgccatgtcagacaggtacaaactgtgggtggacacctgctctgagatgtttggcggcctggacatctgtgctgtcaaagctgtacatggcaaagatgggaaagactacatttttgaggtcatggactgtagcatgccactgattggggaacatcaggtggaggacaggcaactcatcaccgaactagtcatcagcaagatgaaccagctgctgtccaggactcctgccctgtctcctcagagacccctaacaacccagcagccacagagcggaacacttaaggatccggactcaagcaagaccccacctcagcggccaccccctcaaggttgtttacagtatattctcgactgtaatggcattgcagtagggccaaaacaagtccaagcttcttaaaatgattggtggttaatttttcaaagcagaaattttaagccaaaaacaaacgaaaggaaagcggggaggggaaaacagaccctcccactggtgccgttgctgcgttctttcaatgctgactggactgtgtttttcctatgcagtgtcagctcctctgtctggttgtttacctgttcctgttcgtgcttgtaatgctcacttatgttttctctgtataacttgtgattccagggctgtttgtcaacagtatacaaaagaattgtgcctctcccaagtccagtgtgactttatcttctgggtggtttgatagtgtttttaaaagtaatatataatgtggggtgaaatgggagtaggggggtggacaggggagaaacgaaaaccacaaaaagaaaacccaactcctctcctccccccaagctcagttaaatcccccacctccaactttccctccaccagtgtgcttgggatcttcaatgaactgtgcttttcgctttctttctgcatgactattgtaactagatagaacattaagagattttcaagatcaaacttccatagcttcatccactgaatttgaaggcatccacctttttctccatttgctaaaatttggtgcagtttgagtttatgtgaataggctggctgtgcctgtagagctcttgtgtttttagtgatgacatgaaatacaaagaacaagctatttccaggaatgtgttctgtattttacatcccagtgtaccctttattttattattaactaattaactatgagatttttaaaaaatggggccgctgatgtgcaatatcaaagtgaacttgtgagtattttgtgtgtgttgatctcagttgtttcttcattgttgctgtttctggatccagccatgtgtgcgcttgtgtggacctgaggctgctttctgttcccaaagcttgacctgtgtacagagataattccttggcaatgttggacatagaatgcagggagctactgaaggtctgtcagggatttgtccattctgctcttggcctctcctgaggcctcataatgggagaccaaatcaaaaatgtcccatgtcacttgagtgggtacactgcctacagaaccttgaggttgactcctgcttcagttctcagctgtttaccacagccctccagggtccaaagattgaggagctttctctttcctgggaggaactgtctcagatttagcttgtgtgtgttttggacagaggctccacagcggtggctcttgaggaatcctcaccagtttgttctcttccctctgacaagcagcacctgagcagatgctgaggcagttcattaaaccaggcctcagcttcagtgcctcatcttgccatctcccggccaggctgggaacgggcaccaagcagccgcctctaacaaacaccatggtccgtggaagttcatgccagcagcttgcctttgagaagaaatgctgctggctctatttttacattcccttccacctctatactgtcatgtcaccgttctgaactcccagatctgagaaggaactagtgttggtggtatgtaacaagagttacgtatccaggggcttgtgccttggtttctcctttgattgctggtaaattctgaggccacagagaaatgcattgagtgtgaatgttgtcatctgtaatccctccctcagctgataatggtagttgatctgttgtaaatatatacatatatgcatatttgcacttccagatgggttgcataagaatcaggtccttaaatacctcccaatctgatgaaacgatagaataaagtaacatttcccagaatggaggaatacattattttatcgtatatttttgtccaagcgatgagctgacggtggtattgcttctctgcatgttatcagtgtgtacatctggtgcttttcatgtgtcatttgtgagccacaaatgcaaagttgccatttgaattcagtcaggctacagggtggtgtcagtcaaggtctttcaggtgggggagaaattggttagggctcccactgccaaatgcaagcagatagcataacctgactgttatgtgccctcaggcagcatgcttagggacaactctgtggcctgggggacatctgtgtcacagtataggattgccattcaggtgttttgtacctatttctttcctgacgttgtcccctttttttgtactgatccaactgggagaacctcagccaatgctggaagtatgattgaagtacctctcttttgtgactcttgtacagcttaatgtgcaataaaggaaaagttatatctgtaaaaaaaaaa

SEQ ID NO: 97718 - DNA, 2591 bp, Homo sapiens
  misc_feature (238)..(238): n is a, c, g, or t
ctccctccgcgccaccagaccccgtagccccgcgcgcccccagccctttaagccagatgatgaacttcctgcggcgccggctgtcggacagcagcttcatcgccaacctgcccaacggctacatgaccgacctgcagcggcccgagccccagcagccgccgccgccgccgccccccggtccgggcgccgcctcggcctcggcggcgcccccgaccgcctcgccgggcccggagcggangccgccgcccgcctcggcgcccgccgccgcagcccgcgccgacgccgtcggtgggcagcagcttcttcagctcgctgtcccaagccgtgaagcagacggccgcctcggctggcctggtggacgcgcccgctcccgcgcccgcagccgccaggaaggccaaggtgctgctggtggtcgacgagccgcacgccgactgggccaagtgctttcggggcaaaaaagtccttggagattatgatatcaaggtggaacaggcagaattttcagagctcaacctggtggcccatgcagatggcacctatgctgtggatatgcaggttctccggaatggcacaaaggttgtccggtccttccggccagacttcgtgctcatccggcagcatgcatttggcatggcggagaatgaggacttccgccacctgatcattggtatgcagtatgcaggcctccccagcatcaactcactggaatccatatacaacttctgtgacaagccatgggtgtttgcccagctggtcgctatctataagacactgggaggagaaaagttccctctcattgaacagacatactaccccaaccacaaagagatgctgacactgcccacgttccctgtggtggtgaagattggccacgctcactcaggcatgggcaaggtcaaagtggaaaaccactacgacttccaggacattgccagcgtggtggctctcacccagacctatgccactgcagagcctttcattgactccaagtatgacatccgggtccagaagattggcaacaactacaaggcttacatgaggacatcgatctcagggaactggaagacgaacactggctctgcgatgctggagcagattgccatgtcagacaggtacaaactgtgggtggacacctgctctgagatgtttggcggcctggacatctgtgctgtcaaagctgtacatggcaaagatgggaaagactacatttttgaggtcatggactgtagcatgccactgattggggaacatcaggtggaggacaggcaactcatcaccgaactagtcatcagcaagatgaaccagctgctgtccaggactcctgccctgtctcctcagagacccctaacaacccagcagccacagagcggaacacttaaggatccggactcaagcaagaccccacctcagcggccaccccctcaagggggccctgggcaaccccaaggaatgcagcccccaggcaaggtgctgcctccacgccggctcccccctggaccatcactgccaccttcctcctcttcctcctcttcttcctcctcctcggctcctcagcggccgggcggccccaccacccacggagatgcaccctccagcagcagctccctggcagaggcccagccacccctggctgctccaccacagaagccccagcctcacccacagctcaacaagtcgcagtccctgacaaatgccttcagcttctctgagtcctccttcttccggtcttcagccaatgaggatgaagccaaagcggagaccatccggagcttgaggaagtcctttgccagcctcttttcagattagctcttcagacacacggggcacccagcccaaccgggaaaggcatctaagacattcaccaacaacagtcagccagcttggtggtgatgtcccatgaccttgacgtgtgtggtcccttcctctgctctgttgtactaagtgatgttgtgcagcccagaaaggaccatttgacagtctcagggcaggtgcctacccagcaaggggtacctggcatcagagaggaaagagctgcttccctgtagtcatgagagcttccttctgaagtcatcgttcgctgtgagtttagtggccttattgtgacagtgccatcatgtcttattcttccctgtgaaaccaggattaatcgtggactcctggcagcttaacctagctcagttgcagtgctaagcatgccccgcccccattcagtgatacctgtttgggaagtatatacttccccaaaagtactcttggccctaagttttaggaactttccccgacctggatcccttgtcatacctgtgttactgtttaaagcacacccacccaacttacaagatcttaggctgctgtggtggtgaagcaccttgagtctgctgatattcgggagaacaaggatctgcagtttccccttttctcccctctgaagagtggttcttatgtgcaatctgcagtaaccttgaactccagagctgcactatagaggagaatgcatgccactatgacagcagtatgccaagctttgtgttcatctcctaataaacgttaagacctttggtgtaataaaagcagcagcattcaccaacatt

SEQ ID NO: 97719 - DNA, 421 bp, Homo sapiens
gaggacatcgatctcagggaactggaagacgaacactggctctgcgatgctggagcagattgccatgtcagacaggtgagttgagagaaggagtccagtttccagcccagtgagagggaggcttccttagatgaagaagtttaggaattaagctctgtccaaagggagtcatggagcaaaccggacagataaaacacaaaaggcccaagtagcccatttagcaagatcaggcaggactgatgatagagaaagatgatagagttaaagactgcacataccataggtaaaagcttcctgaggcctcaccagaagcagatgctggcaccatgctttttgtacagtctgcagaaccatgagccaaaataaaccttttttttttttataattacctagcctcaagtattcctttatagcaacacaa

SEQ ID NO: 97720 - DNA, 1126 bp, Homo sapiens
tctgagtctctgctggctaagccgccgcctcagccgcctcagtcgcctcaatctcaccttcctcttcttcctcctcctcggctcctcagcggccgggcggccccaccacccacggagatgcaccctccagcagcagctccctggcagaggcccagccacccctggctgctccaccacagaagccccagcctcacccacagctcaacaagtcgcagtccctgacaaatgccttcagcttctctgagtcctccttcttccggtcttcagccaatgaggatgaagccaaagcggagaccatccggagcttgaggaagtcctttgccagcctcttttcagattagctcttcagacacacggggcacccagcccaaccgggaaaggcatctaagacattcaccaacaacagtcagccagcttggtggtgatgtcccatgaccttgacgtgtgtggtcccttcctctgctctgttgtactaagtgatgttgtgcagcccagaaaggaccatttgacagtctcagggcaggtgcctacccagcaaggggtacctggcatcagagaggaaagagctgcttccctgtagtcatgagagcttccttctgaagtcatcgttcgctgtgagtttagtggccttattgtgacagtgccatcatgtcttattcttccctgtgaaaccaggattaatcgtggactcctggcagcttaacctagctcagttgcagtgctaagcatgccccgcccccattcagtgatacctgtttgggaagtatatacttccccaaaagtactcttggccctaagttttaggaactttccccgacctggatcccttgtcatacctgtgttactgtttaaagcacacccacccaacttacaagatcttaggctgctgtggtggtgaagcaccttgagtctgctgatattcgggagaacaaggatctgcagtttccccttttctcccctctgaagagtggttcttatgtgcaatctgcagtaaccttgaactccagagctgcactatagaggagaatgcatgccactatgacagcagtatgccaagctttgtgttcatctcctaataaacgttaagacctttggtgtaataaaagcagcagcattcaccaacatt

SEQ ID NO: 97721 - DNA, 416 bp, Homo sapiens
atatgaatgtggcccatacagtaagggaaacatgtccaaagtcagttgtgatacgatggaaacaaggcggcaatgttgctatgctttggtataaaatacaaactacacaattgtctacaaacgtccttaggaaaggttaaaacattgcaccaaaaagaacacttttcacgataaaaatactagttttgtggtcactactcctgctaggtaaactgaagttcataaaaagtatcagactgaaaatatctaaaaagaagccctggttgcttataggtcaagtacaacattagtgtaacttttcctgtctgctgccaccaaactctattggcattatcagaaccctaccggctaaaggtaaaaggctggccgggcgcggtggctcatgcctgtaatcccagcactttgggagtccaagg

SEQ ID NO: 97722 - DNA, 265 bp, Homo sapiens
agtctctcactatcgcccgggctggagtgcaatggcacgatctccgctcactgcaacctccgcttcccaagttcaagtgattctcctgcctcagcctcccgagtgtctgggactacaggcacttagcacttgctagaggcgagcctgaataagtccctatcctcaaggtgttgacaacaagagatcatctcaccaataacatccatgaaggtataagagatgtacacgtttgtgatgactcaagaataaattccgatgctggccg

SEQ ID NO: 97723 - DNA, 244 bp, Homo sapiens
gccttgagatgagtcatcatacctaaccatgacctttaacaaaactttacagaagattggaaggttaaggacaaattaacagatttatttacaacagctaatagaaagaattgaccttggagcccaatggcccaacccaatcctttaatcccaaccaagctctcagcaggctggttcaacctccaccaaagggatgccccctaaatggccatgtatttgtttaggtccaactctgacagcaccc

SEQ ID NO: 97724 - DNA, 479 bp, Homo sapiens
aaggcataaacaagagaaagcagcactgtctgaaaagcaacttgcttaaaatttccactgccaagagaccagatggtttctgggatgtctagttaggctaaaaatacccgtcacccacaatgagtttgatttacaaacaaaggaaagcagggttagccagtataaacatgcagctggaaagctagaagatttaatgcttacaaaacactgcttaaagggtgtcaaatggccatacaagatataaaacgttagacagcttatgcgctcaattgcttgctcattactctctctgtctcttacatacctacgccatacttgtttcttaagggtaccttcaggtctgacagagctgagtcccaccaagaaattaaggttggagaggaccctcctgccagtctctggcctgaaagacccttcccaccctctccatcctgtcacacacacacacacctctctctctctctcactcactcacacac

SEQ ID NO: 97725 - DNA, 863 bp, Homo sapiens
ccgattctcaggctccctctccggaatcgaaccctgattccccgtcacccacaatgagtttgatttacaaacaaaggaaagcagggttagccagtataaacatgcagctggaaagctagaagatttaatgcttacaaaacactgcttaaagggtgtcaaatggccatacaagatataaaacgttagacagcttatgcgctcaattgcttgctcattactctctctgtctcttacatacctacgccatacttgtttcttaagggtaccttcaggtctgacagagctgagtcccaccaagaaattaaggttggagaggaccctcctgccagtctctggcctgaaagacccttcccaccctctccatcctgtcacacacacacacacctctctctctctctcactcactcacacacacacaccctggagtgaaacccagaagcttctttagaccttggtgcagctgctatccacccagaagttggtaatattttgttacactctgggttatctgccttgtctatactagtattctttttatttttttaggtgtacgatgtaatggtttttagtatattcagttatttaaccatcaccacaattaattttagaacatttctgtcacctcaaaaaggaaccctataccctttagctatcacctcaaaccccacttcctccagccctaaggaactactcatgtattttatgtctctacgtatttgcctattctggagtgcagtggcgggatctcggttcactgcaggctccggcttccggggtcacgccattctcctgcctaaccctcccagtaggtgggactacaggcgcccgccaatacgcccggctaattttttgattttaagaac

SEQ ID NO: 97726 - DNA, 563 bp, Homo sapiens
aagtttgtaaaaaacttgagggggtgcaggtggaagacactgtctgtggtgatatatgatcatagcagctatgtttagactctcctgttatagaaaaggactccatgttcatgctagtctcaccactgattttttccatgttttctctgctgagtccattactgcttcttccaaagactttaactcaagaaaaataatctctgttctaagaccacagacttgctgcttgggtgttccaagctggcaactggtatttttaacagtcattttttatagaatcgagagataaaaatctggggacatctatagacagattgaagatctaaaagtcttaaatcccaaattacaaaccataatcctccatttcctcaccctataaagtcaactcccagcattttgatgaacaagttttaccatcctgggtaaagcattttccagactccaccagacatttcagactctcagtagtctcaaacatttacactcttcatatccaatcacatgtcatccatttcatacattcattcaacacacagtaatttgcttagcagatgttatggttg

SEQ ID NO: 97727 - DNA, 758 bp, Homo sapiens
tcgaccccaagggtctcctgctgtcagcctccaagcaggatatgatccggaagcgcatcaaagtctgtgagctgctgttgcatgagtgtgagctgcaaactcagaagctgggcaggaagatcgagatggcgctgatggtgtttgacatggaggggctgagcctgaaacacctgtggaagccagctgtggaggtctaccagcagttttttagcatcctggaagcaaattatcctgagaccctgaagaatttaattgttattcgagccccaaaactgttccccgtggccttcaacttggtcaagtcgttcatgagtgaggagacacgcaggaagattgtgattctgggagacaactggaagcaggagctgacaaaattcatcagccccgaccagctgcctgtggagtttggggggaccatgactgaccccgatggcaaccccaagtgcctgaccaagatcaactatgggggtgaggtgcccaagagctactacctgtgcgagcaggtgaggctgcagtatgagcacacgaggtccgtgggccgcggctcctccctgcaggtggagaacgagatcctgttcccgggctgtgtgctcaggtggcagtttgcttcagatggtggggacatcggctttggggttttcctgaagaccaagatgggggagcagcagagtgctagggagatgacggaggtgctgcccagccagcgctacaatgcccacatggtgcctgaggatgggagcctcacctgcctccaggct

SEQ ID NO: 97728 - DNA, 368 bp, Homo sapiens
aggagaggggtcaggaggagaatcatgagtgtggctttatagaaaccaaggatgtagagtttaaggggaaagtcagctggtcaagtcgagcacagaggtcctgtataagagactgaaaaatgtgtccattggatttggggacaaggaggccacccctgaaacttgataagagcatgttcaggagtgtggggagagccaaactgaggtctgttcagggagagagtgggaggcgacgggttgaagattactatttagagaagtgtggataagaaggggaaatgagtgactggaattcattcaggcaggagcaattacactccgtgaaccagcagtgggcaaggaacagcattacctggagcgggtgtgga

SEQ ID NO: 97729 - DNA, 785 bp, Homo sapiens
aacatccttgaaaagacagccttgaacaaagggcagtcaatagttctactcaaaagacatggagaaatgcaaaagacccatggagatttgtcttctaatcggcagcatcttgcaaggagaacaagaagatttatactagccatgcaaggaatctttggaagtctaacagacctgacttgaagagaaggctttaaacaagaaattcttcattctggaacagtgattcttaaagtgcggttcagagaccctgggagacactgacattctttcagagtgtgagtgaggatttcctctttgcaactacaatctgtgtaaggttggattttctttacatacataaactaaaataagattgcaataagatgaatgcagaagcagataagagaatccagctgtcttaagttagacttcacagagatttgcaaaaatccaaacaagaccactctcgtcattaaagttattttccatttgttatggtgaacttattttgcaggaaatttgttatttatagtaacatacaattttgttttttgatcattttaaataaattaataaatattataagttttctatttttaaaattatacatgtcagaaaagaacagttctttcaggtcctcaacaattttaagactattaacttgttttggatcaaaaagttctagatttgctattctagacatgaatcctttgaaattaattggcttcataagtatatttttcaagtttgtggcttgtcctgtaaccttctactgtgtagaagttttaaattttaatttaaagaaa

SEQ ID NO: 97730 - DNA, 633 bp, Homo sapiens
actgtgggttaggcattttctgtgcattacctcgttcatccttactacaaccttattaaatagatgtcatcacttctgtatttgcattttacaggcgaggacacaggcttaactcctcaaggccacggagctgacctttgttagtagcttgagcaagtggggtctgaagcacacgtgcctgcacctggcctcagaagtgggactgacacgaggtttcggttaccatggacctctgtgacctccatgaccaatctaggttctggaaggggtggttgggaagccagaatagtcacagcaagtggaacagggctaggtggagaccagcgagcctacgacaagaggctttaggtcatagagggaggttttagtagatgagttttatcagtgggcttcgcccacctcttcctaacatctgaccagctgggctattagttttagaaggctgagctgaggcctgggtgggccaagacatacttccacagattgtcttcatcccactagccaaggtggttgaggacatcaatgaccttcaaagggaattaacaagtcaaaggaaatggtgtcctaggtgtcacaaatggatggcttaatcctgataccagggacaggacatatttgctacatacaaaggat

SEQ ID NO: 97731 - DNA, 431 bp, Homo sapiens
ttttactttttaggaccaacagacttgataacagcctgatgctgatctgacaatgggttgacagccttcccccactggcccttaagtctgcttaataataagtcctttgcttctgtcattctcctgggggatggcctactgccctcctttctgtacaatctgggcaaaccgactggtgatggcaagagtggtgtcaatgaagtggtctacacagctggagagacaattttcagtgcaagagtccaggcgattccctggcttctccacacatttatcccaacataactccatgaagtgatgcacctgtgcagtaaactgcgccttctgctgttcggcggccaccaggtgctgcaactccgctccatcggcttcacccagctccgcctttgttcacctcagacttatccaataattcttcaagtgttttgcat

SEQ ID NO: 97732 - DNA, 599 bp, Homo sapiens
atggaaaggctggggaggtgggtccgtgctcacgtggtcgcgggcgctgcgctgcctggaggctcagttctgggctttcagggttgaaaacccctccccaagcttagtttgaggccatctgaggccgctggagagttgaccctgctctcacaggtgatgtgttaggatcgaggtgtggttggttccgtaagctggtcggaggcgcagacgctgggccaaagtgtcagcagcagtaggaaatctactgggtgttgaggctttttgcagttcccttttctccctgccctctccgcctggcctgcgctttaactcttcccgggtttgctgcagggttgggagtgagggcagtttcactggtgaaaaggacgctttcagaagccagactcctaaccttctccccagcaaaatcgaatttagagcaataacctttaagttgagttttaaactgtgacatgtccattacagatcattggataaatacagaaaactataaagaaatgaaaatcacccgtagtcacccttttagactttttcctaacattaaaaatactgcttttatttctgcaaaatgtaattttaagtatagtcttgaatgactg

SEQ ID NO: 97733 - DNA, 728 bp, Homo sapiens
ctcaatgtgtgtggtggggaggccttggaagatatgactagtgtgagattccagttggcctcctgcacattaggcttggggacattgaaggactaagttgacttgaaaattttcttgaacttgcatcaggttccactgtccagaaatctttgaatgccagggcaaatggggaagaatcagaaaagaattcagttacgtgtcataaatggtggtgcttgtatttgtaactcatttgtgccaaaagtctgtctgtggctatctggtaaacagaatcagttgttatgtcagattattttggagaaggttcatttctctaggtaagggtttgaacccttgctctgggccaagagactagacactggagatagtttcttttttcttttttttttttttgagatggagtttcactctgtcgcccaggctggagtgcagtggtgcaatctcagctcactgctgcaacctctgcctcccgggttcgagccattctcctgcctcagcctccgagtagctgagattacaggtgcacaccaccacgcccagataatttttgcatttttagtactgatggggtttcgctttgttagccaggctggtctcgatctcctgacctcaagcgatccacccaccttggcctcccaaagtgctggggttacaggcgtgagctaccgcacccttcctggagatggttttacaggtcagccttaccctggattgatgaaggagtgtgg

SEQ ID NO: 97734 - DNA, 701 bp, Homo sapiens
gaaagcaacatactctgcatataaaactgtattccagaaagatgtactaaaatttccaaaaggtagcataattcattaaggggggagaggtggtggcaaaacaggagatgctctgtatcatgagattaaaaaacaaaatattttagcctgtaaaggaaaagtttgaagaaatagtgactaaaatctataaaatcacagacaccaaggcaagaagtcaccctttgaagtttgaccatagtaaggtgaaggcaaaaaggaaataacgtaaaagtacattttaataatcaaacgtaataaatccatataaatttttatgtcttagggtggtaaaggcagaaaatgtcagtggattagagagcagtttgaccaaacataggtgaagaattagtgcatagtgattgagggaaacatgctatgcctgtctttaaagttgatgccaggcattcagccaagatgtaccttcctgtggtctattcctggatgcttgggcactgatctgctttccgtgcaaggtttctggagtctcaggttttcttccttgagacacagttctgggatttttctctctttaccatagctaaccctcttgtcccagtcctgttctgtgggttggatttcatttcctaatattctccctcaagtataagcagccatttttgctttatttaaaaaaccaaaaggatttttttttaaaggtggta

SEQ ID NO: 97735 - DNA, 716 bp, Homo sapiens
atcatctatggcctttattgttttcttccatacctagtttgttaagaggtatgtttttttccatacctagttttttaagagctatgttttcttccctacctagtttgttaagagtttttattatgaagagatgttgaattttattgaatgcattttcagcatctattaaaattatacagttttgtccttatgtgcatatgttgaaccatcttgtatttatctaactggatcatgatctgttcagtgtgttgttgaattctgtgtgctagtattttgttcagcatttttgcatctatgttcgtaagtgatgatggcctgtagtttcttttcgtgtagttttgtgtctttgtctggttttggtatcagggtaatgctggcctcatagaatgagtatttgaaagtattccttcctcctcaattatttggaacagtttgagtagaattggtattagttctttaaatatttgctggaattcagcagtgaaaccatcaggtcccaggcttttctctcatgggagactttttattactgcttctatctcattacttattactggtcctttcaggttttctgtttcttcttggtaggatgtatgtgtctaggaatgtatccatttcatgtcggttttccagttctttgacatatagttgctcataatctctaatccttggaagtttttggtatcagttgtaatgtctccttttctatttctgat

SEQ ID NO: 97736 - DNA, 579 bp, Homo sapiens
atcattggctgtactgtggagctgtcacatctccatactgaaaaggtacactgcaagtgaatttaaaccgtttttggctttctattgcatattgccaagagctttgagactgatgaaccaagtaaatgctctatttagggctaagtgagatacagattcctccaatctgatagcgtttcagcctccggagtgaggaagcagcagaaacagaagcagcagaagcaacagcagtagcagcggcagcagcaacagcagcagcccctactgaagtccaatagaggagacttgatctctagttcattctggaactccgcctgggattgtgcactgtccagggtcctgaaacatgaaccaaactgccagcgtgtcccatcacatcaagtgtcaaccctcaaggcacaatccaaaggaactggcgaagtcacaggccctaccacagaagcacactgcgacaggagacattgctatatgcgtctgcttgggtgactctcacagcattgatatgcgtcactccatccactagtgtcagtcacatccatctacaagccacagcatgaaactccacaaattcagtcagca

SEQ ID NO: 97737 - DNA, 226 bp, Homo sapiens
ttagatttccttgcagcagagtgagaactctgacatgtctgggatctgggaaggagatttatggcaaatggaaaacctgagtgaaggagagacttacatagaattacagaaaaaacaagtccaggtgcagtggctcacgcctgtaatcctagcactttggtgggttgaggtgggaggatggcttggggccaggagttcgagaccagtctgagcaacatagtgagac

SEQ ID NO: 97738 - DNA, 2693 bp, Homo sapiens
tggtgccagcggtcacgctgcacctgaggcccccacctgaccagtgctcccagctctggtgtcctgagaaacccttcaagccatcccgcatgggcaggatggtgacatatccatgtggtaggattgtcccggccccaaagtatggccctggtcaggggagcccctgctggaaattgcatctccagagctttgatgcaggacccctgggggatcagggaatgagggtctccaccccaggggtctccttgcagtgagtctatatgcaggcctgcgttctgctcctggggctggttctgagtgcccagcttcagtctcctgagaacatgaggatgggagggggcagagtcttgctgagggcacacccagttcccgctggaggaggacagtgccagtcttctgcaaagggaccttgggtgggaacgggcccggagcgggaggaacgtgactccccagagggaagatgggcatcatactgggcccagagctgggaaggagttgctgccagcacagggtgggcctggactcccctcgcccctacccccagtggttgtggctgtagccctaagcctggagagcaggaccggcccggggtgtctgggaggctgccaggtgcctcccagagctcccaagggcccccacctgcaagtgccagcctcagggcagtgcccaaatgaggccctctcagctgcagccagcgatgccttgggatgctcaccgggagggaggcggctttgggctcctaagtccttgggagaggctgggagcagtcactgcgcggcttgcgcaagcccattgtcgggttgggtggcttcctcagccagggctgggagggactccaggatcaggtcctccctgtctcgagtctcagtggggtgatggggaggagacctggccacccatggctcaggggcagctgagaacaaggacctgctggagctggaagtgctgtggtgttgaggggtggggtgggcagcttctcacacctgcctcctgcctccttctgtccacctttccaccaccctgacctgtcccagccccacacatggttctgcctggctggcctgcccttggcacctggcgtagagcacacagaaggcactcagctaatgctgggcaggcccactcatggggagtgcgtggctgtgcagcaccagggaaccggcacagcagcgccggcagaaatcacagcagtaaacttgtccgggttgtatgcatcaaggtggcgatggacgtgggtccccccactgcactgtggccctgagcactgtatagcagcccggcaatgggagccattatcttgcccctttgacagaggaggacacagaggcacagggaggtgaagtagctgccccacactagtgcctcctcgctcactcaccaccccctgcaccacagtgcagccgcttctcccaccagctggggttccttggacccccaagcctgggaagggggaggtgagtttacaaaatggaaagcttaaaaggagaaaagtggaaccagaggtttgagaagccctgagtggtagagtaaggcctccagcgctgcctctgggtgcagggcagagtggcagaggagagggggagaggcactgggcaccatgggggcccagttcccacttcggggatctctctcgcagaaccgagggtccccttcatgggggtagatgcccagggctagctgttgccactgtctgtgtggacctgagtcctggacatgcccgagtgactcaggagtggctgcttgggcgggctctgtcaccctaggatgttatacattctgggaactggacaggagtggctgcttgggcgggctctggcaccctgggatgttatacattctgggaactggacaggagtggctgcttgggtgggctctggcaccctgggatgttatacattctgggaactgcaatcagccactagagaagtcggagctacaggaagtgaccctggggtgggacctggggacatggccaggtcagcatggggacacccggctccagcaggagctctggtctgtcctggggtctttgggggcagggctgcggccctgggcaggcttcctccaggcggaggtcctggggaagtgggggagccaggccagctgccgcctcccccactatgtagcatctgattcgtcatctctcatgaaggcgatttggttcataactctgaaactctgaaaaaggtcaaaagaagcagagaggccctcggtggatatgccagcttttctgccggtgctttctcccactactctgggtggtctgctctcctcttcaaacctcagctcgcagggagggcctgaatctgccagcccctcaggatctccttccctctgggccctccccagccttaaggagcctcccagacagaagggtggacagagccacctgggcagcccgagagacacacgggggtcctccctgtggacagccctgccagcttccgcccagccctgagcttcatttgcatcttgaggagtaaggggtggtgaaatgggaatgctggtctggctcagctggtcgtgggcataagtgcccgctgaatggatggcatctctccctcctgtcttatgttctggggtccaggtgcttcccagggccatgcccctgctgctaatgcttgccctaacccttaccctaaccagcgtccagcgtcgtctcaccgagccgtaaataaatcaacagattcgca

SEQ ID NO: 97739 - DNA, 2784 bp, Homo sapiens
tggtgccagcggtcacgctgcacctgaggcccccacctgaccagtgctcccagctctggtgtcctgagaaacccttcaagccatcccgcatgggcaggatggtgacatatccatgtggtaggattgtcccggccccaaagtatggccctggtcaggggagcccctgctggaaattgcatctccagagctttgatgcaggacccctgggggatcagggaatgagggtctccaccccaggggtctccttgcagtgagtctatatgcaggcctgcgttctgctcctggggctggttctgagtgcccagcttcagtctcctgagaacatgaggatgggagggggcagagtcttgctgagggcacacccagttcccgctggaggaggacagtgccagtcttctgcaaagggaccttgggtgggaacgggcccggagcgggaggaacgtgactccccagagggaagatgggcatcatactgggcccagagctgggaaggagttgctgccagcacagggtgggcctggactcccctcgcccctacccccagtggttgtggctgtagccctaagcctggagagcaggaccggcccggggtgtctgggaggctgccaggtgcctcccagagctcccaagggcccccacctgcaagtgccagcctcagggcagtgcccaaatgaggccctctcagctgcagccagcgatgccttgggatgctcaccgggagggaggcggctttgggctcctaagtccttgggagaggctgggagcagtcactgcgcggcttgcgcaagcccattgtcgggttgggtggcttcctcagccagggctgggagggactccaggatcaggtcctccctgtctcgagtctcagtggggtgatggggaggagacctggccacccatggctcaggggcagctgagaacaaggacctgctggagctggaagtgctgtggtgttgaggggtggggtgggcagcttctcacacctgcctcctgcctccttctgtccacctttccaccaccctgacctgtcccagccccacacatggttctgcctggctggcctgcccttggcacctggcgtagagcacacagaaggcactcagctaatgctgggcaggcccactcatggggagtgcgtggctgtgcagcaccagggaaccggcacagcagcgccggcagaaatcacagcagtaaacttgtccgggttgtatgcatcaaggtggcgatggacgtgggtccccccactgcactgtggccctgagcactgtatagcagcccggcaatgggagccattatcttgcccctttgacagaggaggacacagaggcacagggaggtgaagtagctgccccacactagtgcctcctcgctcactcaccaccccctgcaccacagtgcagccgcttctcccaccagctggggttccttggacccccaagcctgggaagggggaggtgagtttacaaaatggaaagcttaaaaggagaaaagtggaaccagaggtttgagaagccctgagtggtagagtaaggcctccagcgctgcctctgggtgcagggcagagtggcagaggagagggggagaggcactgggcaccatgggggcccagttcccacttcggggatctctctcgcagaaccgagggtccccttcatgggggtagatgcccagggctagctgttgccactgtctgtgtggacctgagtcctggacatgcccgagtgactcaggagtggctgcttgggcgggctctgtcaccctaggatgttatacattctgggaactggacaggagtggctgcttgggcgggctctggcaccctgggatgttatacattctgggaactggacaggagtggctgcttgggtgggctctggcaccctgggatgttatacattctgggaactgcaatcagccactagagaagtcggagctacaggaagtgaccctggggtgggacctggggacatggccaggtcagcatggggacacccggctccagcaggagctctggtctgtcctggggtctttgggggcagggctgcggccctgggcaggcttcctccaggcggaggtcctggggaagtgggggagccaggccagctgccgcctcccccactatgtagcatctgattcgtcatctctcatgaaggcgatttggttcataactctgaaactctgaaaaaggtcaaaagaagcagagaggccctcggtggatatgccagcttttctgccggtgctttctcccactactctgggtggtctgctctcctcttcaaacctcagctcgcagggagggcctgaatctgccagcccctcaggatctccttccctctgggccctccccagccttaaggagcctcccagacagaagggtggacagagccacctgggcagcccgagagacacacgggggtcctccctgtggacagccctgccagcttccgcccagccctgagcttcatttgcatcttgaggagtaaggggtggtgaaatgggaatgctggtctggctcagctggtcgtgggcataagtgcccgctgaatggatggcatctctccctcctgtcttatgttctggggtccaggtgcttcccagggccatgcccctgctgctaatgcttgccctaacccttaccctaaccagcgtccagcgtcgtctcaccgagccgtaaataaatcaacagattcgcaaaaaaaaaaactcgagggggggcccggaccccaattcgccctaagtggagcggattacaattcattggccgcggtatacccgtctgctggg

SEQ ID NO: 97740 - DNA, 1314 bp, Homo sapiens
agttgagacctatctcaccaccctgcacaagtgtacgctctccacagctgggtcttgacccagctaggaggggaggtgagtttacaaaatggaaagcttaaaaggagaaaagtggaaccagaggtttgagaagccctgagtggtagagtaaggcctccagcgctgcctctgggtgcagggcagagtggcagaggagagggggagaggcactgggcaccatgggggcccagttcccacttcggggatctctctcgcagaaccgagggtccccttcatgggggtagatgcccagggctagctgttgccactgtctgtgtggacctgagtcctggacatgcccgagtgactcaggagtggctgcttgggcgggctctgtcaccctaggatgttatacattctgggaactggacaggagtggctgcttgggcgggctctggcaccctgggatgttatacattctgggaactggacaggagtggctgcttgggtgggctctggcaccctgggatgttatacattctgggaactgcaatcagccactagagaagtcggagctacaggaagtgaccctggggtgggacctggggacatggccaggtcagcatggggacacccggctccagcaggagctctggtctgtcctggggtctttgggggcagggctgcggccctgggcaggcttcctccaggcggaggtcctggggaagtgggggagccaggccagctgccgcctcccccactatgtagcatctgattcgtcatctctcatgaaggcgatttggttcataactctgaaactctgaaaaaggtcaaaagaagcagagaggccctcggtggatatgccagcttttctgccggtgctttctcccactactctgggtggtctgctctcctcttcaaacctcagctcgcagggagggcctgaatctgccagcccctcaggatctccttccctctgggccctccccagccttaaggagcctcccagacagaagggtggacagagccacctgggcagcccgagagacacacgggggtcctccctgtggacagccctgccagcttccgcccagccctgagcttcatttgcatcttgaggagtaaggggtggtgaaatgggaatgctggtctggctcagctggtcgtgggcataagtgcccgctgaatggatggcatctctccctcctgtcttatgttctggggtccaggtgcttcccagggccatgcccctgctgctaatgcttgccctaacccttaccctaaccagcgtccagcgtcgtctcaccgagccgtaaataaatcaacagattcgca

SEQ ID NO: 97741 - DNA, 474 bp, Homo sapiens
ttcataactctgaaactctgaggtctcccactactctgggtggtctgctctcctcttcaaacctcagctcgcagggagggcctgaatctgccagcccctcaggatctccttccctctgggccctccccagccttaaggagcctcccagacagaagggtggacagagccacctgggcagcccgagagacacacgggggtcctccctgtggacagccctgccagcttccgcccagccctgagcttcatttgcatcttgaggagtaaggggtggtgaaatgggaatgctggtctggctcagctggtcgtgggcataagtgcccgctgaatggatggcatctctccctcctgtcttatgttctggggtccaggtgcttcccagggccatgcccctgctgctaatgcttgccctaacccttaccctaaccagcgtccagcgtcgtctcaccgagccgtaaataaatcaacagattcgca

SEQ ID NO: 97742 - DNA, 1731 bp, Homo sapiens
gcccctgttcagtctcgctcggcacgcaagggtgtacacagtctctgctgccaggactgtcagctgggcttggcgtgcgcctgccatctgtccatcctgcgcgtcagagccacacacgtagacggcacgtcatgctgatacagctgggcgcacgtgcccactcatggggagtgcgtggctgtgcagcaccagggaaccggcacagcagcgccggcagaaatcacagcagtaaacttgtccgggttgtatgcatcaaggtggcgatggacgtgggtccccccactgcactgtggccctgagcactgtatagcagcccggcaatgggagccattatcttgcccctttgacagaggaggacacagaggcacagggaggtgaagtagctgccccacactagtgcctcctcgctcactcaccaccccctgcaccacagtgcagccgcttctcccaccagctggggttccttggacccccaagcctgggaagggggaggtgagtttacaaaatggaaagcttaaaaggagaaaagtggaaccagaggtttgagaagccctgagtggtagagtaaggcctccagcgctgcctctgggtgcagggcagagtggcagaggagagggggagaggcactgggcaccatgggggcccagttcccacttcggggatctctctcgcagaaccgagggtccccttcatgggggtagatgcccagggctagctgttgccactgtctgtgtggacctgagtcctggacatgcccgagtgactcaggagtggctgcttgggcgggctctgtcaccctaggatgttatacattctgggaactggacaggagtggctgcttgggcgggctctggcaccctgggatgttatacattctgggaactggacaggagtggctgcttgggtgggctctggcaccctgggatgttatacattctgggaactgcaatcagccactagagaagtcggagctacaggaagtgaccctggggtgggacctggggacatggccaggtcagcatggggacacccggctccagcaggagctctggtctgtcctggggtctttgggggcagggctgcggccctgggcaggcttcctccaggcggaggtcctggggaagtgggggagccaggccagctgccgcctcccccactatgtagcatctgattcgtcatctctcatgaaggcgatttggttcataactctgaaactctgaaaaaggtcaaaagaagcagagaggccctcggtggatatgccagcttttctgccggtgctttctcccactactctgggtggtctgctctcctcttcaaacctcagctcgcagggagggcctgaatctgccagcccctcaggatctccttccctctgggccctccccagccttaaggagcctcccagacagaagggtggacagagccacctgggcagcccgagagacacacgggggtcctccctgtggacagccctgccagcttccgcccagccctgagcttcatttgcatcttgaggagtaaggggtggtgaaatgggaatgctggtctggctcagctggtcgtgggcataagtgcccgctgaatggatggcatctctccctcctgtcttatgttctggggtccaggtgcttcccagggccatgcccctgctgctaatgcttgccctaacccttaccctaaccagcgtccagcgtcgtctcaccgagccgtaaataaatcaacagattcgca

SEQ ID NO: 97743 - DNA, 2629 bp, Homo sapiens
tggtgccagcggtcacgctgcacctgaggcccccacctgaccagtgctcccagctctggtgtcctgagaaacccttcaagccatcccgcatgggcaggatggtgacatatccatgtggtaggattgtcccggccccaaagtatggccctggtcaggggagcccctgctggaaattgcatctccagagctttgatgcaggacccctgggggatcagggaatgagggtctccaccccaggggtctccttgcagtgagtctatatgcaggcctgcgttctgctcctggggctggttctgagtgcccagcttcagtctcctgagaacatgaggatgggagggggcagagtcttgctgagggcacacccagttcccgctggaggaggacagtgccagtcttctgcaaagggaccttgggtgggaacgggcccggagcgggaggaacgtgactccccagagggaagatgggcatcatactgggcccagagctgggaaggagttgctgccagcacagggtgggcctggactcccctcgcccctacccccagtggttgtggctgtagccctaagcctggagagcaggaccggcccggggtgtctgggaggctgccaggtgcctcccagagctcccaagggcccccacctgcaagtgccagcctcagggcagtgcccaaatgaggccctctcagctgcagccagcgatgccttgggatgctcaccgggagggaggcggctttgggctcctaagtccttgggagaggctgggagcagtcactgcgcggcttgcgcaagcccattgtcgggttgggtggcttcctcagccagggctgggagggactccaggatcaggtcctccctgtctcgagtctcagtggggtgatggggaggagacctggccacccatggctcaggggcagctgagaacaaggacctgctggagctggaagtgctgtggtgttgaggggtggggtgggcagcttctcacacctgcctcctgcctccttctgtccacctttccaccaccctgacctgtcccagccccacacatggttctgcctggctggcctgcccttggcacctggcgtagagcacacagaaggcactcagctaatgctgggcaggcccactcatggggagtgcgtggctgtgcagcaccagggaaccggcacagcagcgccggcagaaatcacagcagtaaacttgtccgggttgtatgcatcaaggtggcgatggacgtgggtccccccactgcactgtggccctgagcactgtatagcagcccggcaatgggagccattatcttgcccctttgacagaggaggacacagaggcacagggaggtgaagtagctgccccacactagtgcctcctcgctcactcaccaccccctgcaccacagtgcagccgcttctcccaccagctggggttccttggacccccaagcctgggaagggggaggtgagtttacaaaatggaaagcttaaaaggagaaaagtggaaccagaggtttgagaagccctgagtggtagagtaaggcctccagcgctgcctctgggtgcagggcagagtggcagaggagagggggagaggcactgggcaccatgggggcccagttcccacttcggggatctctctcgcagaaccgagggtccccttcatgggggtagatgcccagggctagctgttgccactgtctgtgtggacctgagtcctggacatgcccgagtgactcaggagtggctgcttgggcgggctctgtcaccctaggatgttatacattctgggaactggacaggagtggctgcttgggcgggctctggcaccctgggatgttatacattctgggaactggacaggagtggctgcttgggtgggctctggcaccctgggatgttatacattctgggaactgcaatcagccactagagaagtcggagctacaggaagtgaccctggggtgggacctggggacatggccaggtcagcatggggacacccggctccagcaggagctctggtctgtcctggggtctttgggggcagggctgcggccctgggcaggcttcctccaggcggaggtcctggggaagtgggggagccaggccagctgccgcctcccccactatgtagcatctgattcgtcatctctcatgaaggcgatttggttcataactctgaaactctgaaaaaggtcaaaagaagcagagaggccctcggtggatatgccagcttttctgccggtgctttctcccactactctgggtggtctgctctcctcttcaaacctcaccttaaggagcctcccagacagaagggtggacagagccacctgggcagcccgagagacacacgggggtcctccctgtggacagccctgccagcttccgcccagccctgagcttcatttgcatcttgaggagtaaggggtggtgaaatgggaatgctggtctggctcagctggtcgtgggcataagtgcccgctgaatggatggcatctctccctcctgtcttatgttctggggtccaggtgcttcccagggccatgcccctgctgctaatgcttgccctaacccttaccctaaccagcgtccagcgtcgtctcaccgagccgtaaataaatcaacagattcgca

SEQ ID NO: 97744 - DNA, 316 bp, Homo sapiens
ctgtacgaaaatattttctttgtttatatccttattctatacgtttttccctctttttaatttttaatttaaaaatttttttagagagacacggtctcacttcattgtccaggctggagtgtggtggcatgatcatagctcactgtaatcttgagctcaagtgatcctctctcctcagctcccgagtagctgggactaagggtgtgcaccaccatgcccagctaagttttaaattttttgtagagatggagtttggttgtgttgcccaggctggtcatgaacttctggcctcaggtgatcctcctgccttggcctc

SEQ ID NO: 97745 - DNA, 441 bp, Homo sapiens
cctaaaactcttctgaaagacattaacaagaaatgaattcatgacatgaaataccatgttctagaatgtcgtacagatgtcaattctcaaatttatctacaaatttaaggtaatcctattcaaatcccaagatagtttttggtggtggctgtttttgagacaaggtctcgctctgttgcccaggctagagtgcagtggtatgaccacagctcactgcatcctcgacctcccaggctcaagcaatcctcccacttcagcctctgaagtctctcatatggtgtccaagaaatggggacaaatctcaaaaagggactaggctcaggagggctggaatattcagggaagtttctttctttctttttttttttttttttttttgggaggaaagatgtctcggttgtggtccccaagggggggagtgcgaggaaggcgggagatttt

SEQ ID NO: 97746 - DNA, 527 bp, Homo sapiens
ttgttgaataatgataacaacaacaataatttgttgcatttatttcatgaacctgaaaataaaaagctgagagaagtggcctcagaaatcattactaacttagagtaataaaggagagagtgagcatgaataaaggtacacatttgaattaggaatattttctaaatgccatttgaacaattgtaaagtatacttagaaacttatctaatggagattgtggcttaatcagtgtataaaagacagaagatattggccaggcatggtggctcatgcctataatccaagcactttgcaaggcctagttgggttgatcacttgagcctaggagttcaagaccagcctgggcaacagggcaaaaaccccatctctaccaccaccaccaccaccaccaccaacaacaacaaaaccccaaaccacacagacacaaaaacaaaaaacccccaaaattagccggggcatggtggcacacacctgtagtcccaggtactcgggaggctgagttaggaggatcgcttgagccgggagg

SEQ ID NO: 97747 - DNA, 537 bp, Homo sapiens
gccttgctatgttgcccaggctgcagagcagcacaatctcagctcactacaacctccgcctcccgggttcaagcaattctcctgcctcagcctcccaagtagctgggattacaggtgcccgccaccacacccggctaatttttttgtgtttttagtagagacagggtttcaccatgttggccaggctgatttcaaactccagacttcaagtgatccagccccccaggcctcccaaagtgctaggattacaggcgtgagccaacatgcccggcttccatttgcttttgatattgtttttatctctgagttacaaactatacaagcttaccaggtataaggttagatgctacatctaggagcattcaagatatacattaatttaaacttttattagtctaactttctgttaagtctcttagctttgaaacataaaagagaaatcaagcccaaatttttagaggaaggctaaggtatactattggcagttgtagttttaattgtaattgactgattaaccaagtaatttataaaatgtta

SEQ ID NO: 97748 - DNA, 272 bp, Homo sapiens
atggggaagaagagaagaaggacacatattcttctctcagtcccacatggcactcactgataagagctgggaaatagcacattcatcaggccccaagagccaactttgtgggaacagtggagggtactcccaagattgctgttggtggggcagcctcaacattcagctctaggggagggtcccaggggaaatctcaggtaagaatttcccttcagtaagaacttactttgctgtgaacaacttgcaaattcattcatttctcgctcactctc

SEQ ID NO: 97749 - DNA, 152 bp, Homo sapiens
gccaggcgaagggcacagtggtgggaatggagagaggaacaaggagtctggctgcagtggggaatcccatgaagaggggaccgggccacatgtggcttggcctcagatgccaagagcctcggacacgcttccatgattctctggccagcatt

SEQ ID NO: 97750 - DNA, 505 bp, Homo sapiens
aacactttcatcatcccagaaagttccctaagccagcactggtccaggaaatgaagtataagcaggattagatctaagacttgccaggcattttggttttactgcctgaagccagcaagcaactggtttgggtcttcactcatgaaaacacacacacatacaaatatatacacagagagctctaaattgatttttaaaaaatctatagggtataaagcaagacaattaacaattatacattatatacagtctacaaatatcctagatatcacttttataatgagatataaggaattctggctgggagcagtggctcacgcctgtaatcccagcattttgggaggctgaggcaggcagatcacctgcagtcaggagttcgagaccagccttgccaacatagtgaaaccccatctctactaagagatacaaaaattagccaggtgtggtggggggcacctgtagtcccagctactggggaggctgaggcaggaaaattgcttgaacc

SEQ ID NO: 97751 - DNA, 119 bp, Homo sapiens
ctattatgcagggttaactataaaatttgaccaaaatctgtattttatggacaaaaaaggacaataaacatcaatacccaactggcttttgacataccatataagactatagagttaca

SEQ ID NO: 97752 - DNA, 358 bp, Homo sapiens
cagcctcaaacttttggactcaagtgatcctcccaccttagcctcctgagtagctggggctatagatgtatgccaccatgcctggccgatttttaaaatttttaaaaaagagacaaggtctccccatgttgtccaagtggtcttgaactcctgggctcagaggatatcatgcctgtaatcccagcactttgggcggctgaggcgggcaaaccacctgaggtcgtaagttcaagaccagccttgccaacatggtgagaccccatttctacttaaaaatacaaaaattaggcgggtatagtggcacatgcctgtaatcgcagctactcaggaggctgaggcaggaaagtcgcttgaaccc

SEQ ID NO: 97753 - DNA, 748 bp, Homo sapiens
cttgctgctgttcactctttgggtccacactgcctttatgagctgtaacactcaccatgaaggtctgcagcttcactcctgaagccagcgagaccacaaacccaccgggaggaatgaacagctgcagacgcgcggccttaagagctgtaacactcaccaggaaggtccgcagcttcactcctaagccagcgagaccaggaaccccaccagaaggaaaaaactccgaacacatctgaacatcagaaggaacaaactccggacacgctgcctttgagaactgtgacactcaccgtgagggtccgcggcttcattcctgaagtcagtgagaccaagaacccaccaattccggacatgtttcctcacttcctttatagcttatttaaatgtgactttctcgaggttgtctttgaccatcctttgtgaaacagcactcctatcaatgtcaccttcccctgcttggtttttgttattagcacttattgccatctctggcagagatttatagcacattaaatatccatttgctaccagctcctttcatataacccttgcaattaggtcaggccctataaacaatgggctgtgagcaaaaaggggcatatacacatctaggcaaaagcaccaaatgcaaccctccagctctgtcttcccctgctgcagtgatctagaccacatgttgcagtggtgaagccacagagtggacacagcctaaatcactgagtcactgcctgggtcagctgttctggga

SEQ ID NO: 97754 - DNA, 305 bp, Homo sapiens
gtttccttccagacatttcttctgccttcacgtacatagatgaaatgcatatttctataggaatatatagtgctttgggtcctgttttttctaagtggaattatactgtacatttttttctaggtaataattttttccttaaagattgtttaatgccagttaatataaaccaagctcttttctttcctgttcttacctgctacatgacatctatgttccactgtcagtttaaaatttctcatatgatgtccatgtaagatatttctaatatttcatgatcgtaaataaagctgcattgagctctc

SEQ ID NO: 97755 - DNA, 398 bp, Homo sapiens
cctcaactaaaataggaagaaagagaaaaggggaaaaatgaaacacaatcagaaagataaatctatggaagaagcatacagccaatgccctcaggtgaccaatcttcagtgtttccaaggccagctcatttctttctagactgcagataagtatccctgccaacctatttcattaacttgttgcgaaaagtaaattaaatcaaacatgcaaaagcacttggtcaagatttaaacactaaatgaatgtcaacaagtattgttattaagggctccctactcatctgcaaagctttgagggacaatgaccatatgagtttaatcacccctcacgtctttatagggctttagagttcatgatacacttctaaacacactatcttagtgcctcaagcgctggg

SEQ ID NO: 97756 - DNA, 121 bp, Homo sapiens
accgcgctccgttaacggaagaaacaagatggcggctgaaggcgatccgcagtggggccccagccattcggattgagccttctccctccaaccgcttccgcaggccgggcccctcctgccc

SEQ ID NO: 97757 - DNA, 746 bp, Homo sapiens
  misc_feature (115)..(115): n is a, c, g, or t
  misc_feature (123)..(123): n is a, c, g, or t
tctaccagaaacttaagagttgttatcatcctggcaatctaccttgaagattggcaaaatgttagttaactattgaatatagatgatgagcatatggaattaaatttgaaatttnccaatttncaggttgccaaaaatccaatttcaaattaagaaatgttaaatttaaatcttaaattaagaaattttaatatttaaatcttaaattaagaaatttaaggacacttcttaaaattgtttacttatcctttctagctagagttggccagatttagcaaataaaaaccaaggatgtcgagttaaatgtgaattctcaagataaaccatgaaaaaatgtttagcataagggaatcccatgcaatagttattacttttgttttattttgttttgttttcttgagacagagtctccttctgtcacccaggctgaagtgcagtggtgcaatcatggctcactgtggccactacctctcaggctcaatcagtcctcccacttcagcttcctgatggctaatttatgtattttttttttctttagggacaggggttttgccatgtttcccaggctggtctggaactcctgggcttaagcaatcctcccgtcttggcctcccaaagtgctgggactacatgcatgagccattgtgcctggccaatattccttacttatgctgaaaaatttcattgcttttacaattaaattttaattaggctggagattatctggtaaccccattcccagctca

SEQ ID NO: 97758 - DNA, 932 bp, Homo sapiens
cagcttcttgggctctacaatatagataataatgcccagttcatgaggttgtcttgaaggcaaaataggtatgcaatgtgataaggtgtcacaaaaaaaggtgagaggtttactgatttattttgtctccaatgtacccaagtcatcctccaaactgaaaccttgtcactgacccaccaacaaaccctgccatgtgccacagcctcatgattctctcctctcactagaggagtgcatggagtgaattttttccacttggtgatctttttgtattagtcattcattaattctgcagtttgatgagggtctgcttgtgccagcctcttactattcacctccctctctccttaattcacatgaatgaattttttcattcagctacaatgtgcattcaaggagcattcacaaacagcactcattagctgtggaatgatgccaagtggctcacgtggactgaagcccatgtgcttggtccatgaacaaccttccaatctgccaggttcagcctagtttccaggttctacacacagcctcctcaccacagcaaggccacttgatccctatctacagaaagtgtcagcccttctagcagaggtcctgtagtacttcaacaactatggccacactcagggacttgatattaagaatacttattaccagcccaactctgacctagtgcccagaatccagtagtatggtttctgagcccaagccctactctgggctttaatccttaggactatatttctaccctgggtcctgttttagcggatgccttagtactccaagtctctcctgagtccaaagcactgcctaggtattaccagcctttcctgagaataagccctcaattctaggctgactggggttctgctccatgtgaagagacttctgtggggctcagctgcctagactcccaaattccacccact

SEQ ID NO: 97759 - DNA, 257 bp, Homo sapiens
acagcagcccaaacactcagccaaggctaactaactgtagtttccagtctttgttcaagacactctctcctgcttagaagtgccatcctgccattcaccaccccaggtaagaccccttttgaagagctccaagtggtagcctcttttggatggtttcctcaagcagatcactaacggcaccacctacctcctcaactctctcagcactcaatccccatccccagccaatggagccctaatcctctgcttattgctgt

SEQ ID NO: 97760 - DNA, 231 bp, Homo sapiens
tcacagttctgcaggttgtacaagaagcatgccactagcatctgcttctggtgaggcctcaggctgcttccactcactgtggaaggtgaaggggggccagggtgtgcagagatcacatgacaagaggggaagcaagagagagtgagatgggagggccaggccctttttttgtttttttctgagacagagtctccctctgtcacccaggctggagtacagtagcgtgatctt

SEQ ID NO: 97761 - DNA, 519 bp, Homo sapiens
tgggggagatgaggaagtggggaggagaggggatagggaccctggcttctcacctcttctaaagaggccttcatctgtttgaccccagacccatccacggctgggcagtgggtccctctcctttttatagctgaaccccatcacctggaaggctattaaaaagcaaggttctggagttggcatgcaggttctacccgcaggcttggtgaaggggggtaggggtcagggagcactgcaaagacgaacagtctggggttcttctgttgcccccagtggtaagcagggcaccctctctgggccagcacagccctggctgggggcatgactagaggaggggatcccggctgatctcagtcccactggcctccactgggtgctcctgcgtagggccctccctgctcagccattctgggaagctttgcttgaaggggatcaggaaggaggaaaccccctgcctccactttgaaacccgcacactgtttccccattacgtcttgcagggaggtggaggcgttaaat

SEQ ID NO: 97762 - DNA, 353 bp, Homo sapiens
ttgcattgggatataaccttcaaccttgacgtagaacagggcttacctggatgggtctttacttgagacaggaacttgggtaaagctacagagttttttataagccatgtagatattgtggggatgaggggccttatccttccgcatgccatcctcattggggttttgatcacagatctgtatttcctgggatacctgagtgccctcggctttaacccaagttcagcttagcactcctgagtggtgagattctcaacttaagagggacggttgggccggaatccttgggtctgatttgctgtgggaaggggaggaggctaactgtcccatggacctggtcacagctgttccac

SEQ ID NO: 97763 - DNA, 705 bp, Homo sapiens
ctcaaaaatcccaaaaaacctacaggaaagccacagccagcatgtgttgacttgtatgtcgtttctctctcttctcaaagctggaatgctggggctactttttacctaccttttctattcccaatcccctgctcctttccatccctagtgggagtaatttaattctgcaacaaattctcatagttaaggtattcagcaatatatccctgtatcctagaattctctgtaaggaaaaaagttgtggttgaggggaagagttctacattcagttattttagtttaatattactaagaacttcattggaacccagaacaatcttccctgccgaaagagctttgtgcccattctctgtgaatgctctttaggagagatgcttaaggattctctccacacctccccatgtgtccttactcaagaccagaaactctcaaggtgagaaggtagatgagaatgaccttcagtaataccctctttcccggtcccccagttccctcgagcaggggcagcagaccccactgtgacccacggaccaaagccagcccactgccttgtttttgtatgtagtcaaaatgtacaaaaacaagccctgctcatttggttaggtggcatccatggctgtttcacacaacaacagcaaagtcgagtagttgcgacagaaaccatatgccctgaaaagctgaaaatatttactatctggcctttac

SEQ ID NO: 97764 - DNA, 448 bp, Homo sapiens
aatagctggggcactacaggggactgggctatatatctgagacagaacaaaaggcaccaaaggctcttctatctttaaatcttgtggggggtgtgatacatgacactgtgttagcgacccaggcacgaggtaaagggtgagaggcagctgcactcctcaatcacacaccacgagagcttcctgccagggctctgcacttgctgctggttctgccgggaactctcatccctgtgatgtgcccagctgtcctttcctctccctttgtgcacatctccacgcttaagcaatgcaccccccactctgtccagccttatttttctcctcatagcactaatctctagctggcacgatagcatatgttatgtgttcatcaaccgtctccctccattaagatgtaagcttccagctgggcatggaagctcacgcctgtaatcccagcactttggga

SEQ ID NO: 97765 - DNA, 97 bp, Homo sapiens
acgtttgccaccggcagccaaccagttgggcccgagtccgcgggcaagaagcgattgggggcgcgtgagctcggctccccggtcccccgtccgggtg

SEQ ID NO: 97766 - DNA, 649 bp, Homo sapiens
gatacgaagtcgagctggtacccccgagctagccgacagcagccgtgacatgtgcgtgtcggctggctgtgccatttctttccggccaccagggacgccaagcagctcggggtcagacctcccaaagttctgggattacaggcttgagccactgcacctggcctaaacacacttttttgattctcctttcattccatcaacattctctgttccttttcactccctacagcaaatccttttgactacacagtgctgtattcataacactgaattatagacttcacttttctcaccagcctctccaaacttgctttatttatctatgtttatcattatttatgtgtgtgaaaatatttcatttgcataactccactgaagatgaaagtcttcactttcactttcgtgagttccaccttttgattcgcatttctcttctatctccatttcctctcacatcctacttacttagcttctgctgtgtaagtctgttctagacactccttttgctttgtctcacttttgtcctttttctaatgtaaccctataaaatgaaatacattaattcctgttttataattttctattttaatttgctcccaagtacacatattccattccaccctgtcgggctagtcgaggggggatcctc

SEQ ID NO: 97767 - DNA, 257 bp, Homo sapiens
gacaatgatgacaaccattttattaaaaaaaaatagtgtctactatgtgttagctgctgtgctactaacaggcactggtttttgccagtgatctataagacaaggcatggccatcctctcctgggcttccagcctagtggggagggctagctggtcaacagacagtgtggtgagagcaggtgcagagtgatatcacagcacagagaagcaacccatccaggcatggggaccagagaggaacattactgatggaagtc

SEQ ID NO: 97768 - DNA, 156 bp, Homo sapiens
ttgtgtgtaaaatgatactcagaatctgacccacctctttatgttgtgaaaacaagtgttgtacagagtttgaggatacatatgtcacttatttacattggaagattcttgcctagggggcaatgctgaagttagctttatgtattgagttgagac

SEQ ID NO: 97769 - DNA, 272 bp, Homo sapiens
ttatatatttttatttggaaaatgtgtgattatgtctaactatgcttttatccctctttatattggtttcttcttgactcttagcttgaatctctgatttctctcctttatttctcacatgttatgtcttattttaatatgattgcccctttcttctgaatctcattaaacactgtcttccatatatttctggcatttactgcagctcgtgtgaattttgattttattgtttacatttttattttttgagacagtgtcttgctgttgcccag

SEQ ID NO: 97770 - DNA, 429 bp, Homo sapiens
tcaaggtcagctagacataaaagaggaggcccttttcctcatgtctcattaggtcatgtccagagttctacacatgtgtatgcccttctagatttctaggaataggtcagaggttttcaaagtgctgtctgaacatctcattcccctgattttccttttgacacttttaaagtcttgttaccttaattgccatctgctcaaaccccctcttcccaggtcggtcaactgcaaaattaaatagttgctatcatttgttttttgactaatgtcctagacatagggctattcacacagagtaaaatctacatcagattaatttaagacaagccctgagaatagagctttttcagggaactgtcagatagggacaaatagtgacagtctgggagatgggggcattttgcagagcttcagacttattgtgccccc

SEQ ID NO: 97771 - DNA, 687 bp, Homo sapiens
tcctctaggttctgtctatgtcaccaccctcttcaataaccaggtgaggcagacatgatttccatttggaggatggagaaccgaggctcaggacctcgcccgtgcagccaagaggagacaaagatggctaggtctggttcccaagcctaaagaccatgatctgtccagtgtggaacactgcaggcccccaagttctgtcatttgtaaagtcatgggcttgtgtgagtcccgagcaatcaaagcagcagaagcaatgctcccaaggggtgcacgagggccatgtttggagccatgccagcttgccaatccttggcatactctgtacatagccagataactacacaagctcacctcatctgcacaaactcactctctgaacacttctaaggtcaccgagaagtcagggaaaaatgagaaccaggacagtcaaagcctttgcctctcctgaagctatggggcttgttgccagagccaaagcccctcttagcactcttattacttcatttaacaaacataaggagagcccggccctctgcttttaagggtggattccattactattaagacttctgcggcccctgaaagattaactcaacagtcacccctgtgaaagctgatccaagtggaaaatcgagttagaaaattccaccttcccttccctcacacctcagcagattaaggggaagg

SEQ ID NO: 97772 - DNA, 598 bp, Homo sapiens
tagatcatcagctattgttagtgttagtgtatgttatgtgtggctcaagacaactttgtttcttttaatataggcagggaagtgaaaagattggatatccctgctttataccaagaaagacaacaccccacatttgcaatgcctaaaaacactaccagccatctgaaaaacatgagacttctaacttctgttcttttttgtagcagtggaatcccacggtgatatctgagggatgtggttaccttttggaggaggttgacggtttctaaggatgattctttctgagtgaaatattgtcggtgtcattgaccttttcattatttcaactattattattccaggttatcaatagtctggctgtctatcgtcatcgtgagactgactttggtgtaggagttcgagaccaccctggccaacatggcaaaaccccatctccacaaaaattggataatttgataattatcattattgggtttctgagacgttacacatttaacattctcttctgcacaagttgcctttgtgtgagtatactaactttctgtagaggtatacttgtaatcacaaataagaataaattatataaaacaaaaaaaaa

SEQ ID NO: 97773 - DNA, 523 bp, Homo sapiens
ttttttgtaggtttcaggcacagaactgtatatccaataatagtgaaatggatcccactaattatgacagaaatgatgatacatttaaatgacttggatgttttataggttggcactcatgatgagccgctgttctcattctgcaaatggtgaagctctctattgtcctgaccccacagttcctgtcgcatgaccagagccagctcaccaaggagctgcagcagcatgtaaagtcagtgacatgcccatgcgagtacctgaggaaggttatcaatagtctggctgtctatcgtcatcgtgagactgactttggtgtaggagttcgagaccaccctggccaacatggcaaaaccccatctccacaaaaattggataatttgataattatcattattgggtttctgagacgttacacatttaacattctcttctgcacaagttgcctttgtgtgagtatactaactttctgtagaggtatacttgtaatcacaaataagaataaattatataaaacaaaaaaaaa

SEQ ID NO: 97774 - DNA, 317 bp, Homo sapiens
  misc_feature (25)..(25): n is a, c, g, or t
  misc_feature (29)..(29): n is a, c, g, or t
atataaaaaccagtctttgtcaccnaaanacattttgaccacgatagtgccactttttaggttatcaatagtctggctgtctatcgtcatcgtgagactgactttggtgtaggagttcgagaccaccctggccaacatggcaaaaccccatctccacaaaaattggataatttgataattatcattattgggtttctgagacgttacacatttaacattctcttctgcacaagttgcctttgtgtgagtatactaactttctgtagaggtatacttgtaatcacaaataagaataaattatataaaacaaaaaaaaa

SEQ ID NO: 97775 - DNA, 316 bp, Homo sapiens
  misc_feature (44)..(44): n is a, c, g, or t
atacattcgaataaaataatatttcgcaatcaaaaatgcaaccncccctggaacttcgagttatcaatagtctggctgtctatcgtcatcgtgagactgactttggtgtaggagttcgagaccaccctggccaacatggcaaaaccccatctccacaaaaattggataatttgataattatcattattgggtttctgagacgttacacatttaacattctcttctgcacaagttgcctttgtgtgagtatactaactttctgtagaggtatacttgtaatcacaaataagaataaattatataaaacaaaaaaaaa

SEQ ID NO: 97776 - DNA, 285 bp, Homo sapiens
tcacattcacctgtgggcagagggacaggttatcaatagtctggctgtctatcgtcatcgtgagactgactttggtgtaggagttcgagaccaccctggccaacatggcaaaaccccatctccacaaaaattggataatttgataattatcattattgggtttctgagacgttacacatttaacattctcttctgcacaagttgcctttgtgtgagtatactaactttctgtagaggtatacttgtaatcacaaataagaataaattatataaaacaaaaaaaaa

SEQ ID NO: 97777 - DNA, 488 bp, Homo sapiens
gtcacacagctggtcagcagcaacatagctggtctcaaatctaaggtgcctggccatgcctccatgagggaccgcctgcaagggaggttgatcctggctttggggagcctttcctgggctgcacgaataacctccattgttcgagaccccaaactctgctcacatcttcctttccctgtctctgcttgggctatgatcacggtgactctagcaacccttcatggacattataatactctctgccattcacttttggtctaatctgacttcaacccccacttacttggtctctccttttacaaccaacatggcaaaaccccatctccacaaaaattggataatttgataattatcattattgggtttctgagacgttacacatttaacattctcttctgcacaagttgcctttgtgtgagtatactaactttctgtagaggtatacttgtaatcacaaataagaataaattatataaaacaaaaaaaaa

SEQ ID NO: 97778 - DNA, 440 bp, Homo sapiens
ctgggtgacagagcaagactttgtctccaaacaaaaagaaaagataattactttatacttagcttgtcttagccatgagtgacgggctgcatgtggcccaggacagttttgaatgcagttcaacacaaatttgtaaactttcttaaaacattaggagattttggccaggtacagtggctcatgcctgtaatcccagcactttgggaggctgaggcgggcagattacctgaggtcaggattcgagaccaccctggccaacatggcaaaaccccatctccacaaaaattggataatttgataattatcattattgggtttctgagacgttacacatttaacattctcttctgcacaagttgcctttgtgtgagtatactaactttctgtagaggtatacttgtaatcacaaataagaataaattatataaaacaaaaaaaaa

SEQ ID NO: 97779 - DNA, 705 bp, Homo sapiens
tggcggatagcagaacctttttgtctccctctaattgctcctaagcctcacgctcccttgccccgcgtgtcctgttgcttccctgatcttctccgtgacctgtagctaaaccttccaccagcgcttgagaacttaatttgaaccggatcctttcccagacccctttcttcttctcctcctccacctcctccaggtgcccaacagcccccttctcctcctttcccttcccttacccttcccctccccctccccttcccctccccctcccctcccccgccccaactcagatccgccccggtccccgtccccttccctcccccctgccctaagccacctccacctctgtcctggccgcctcagggcaccctgaaaggatcaggacatgcggctgcgcttttggctcctcatttggctcctgctgggatttatcagccatcagcccacccctgttatcaatagtctggctgtctatcgtcatcgtgagactgactttggtgtaggagttcgagaccaccctggccaacatggcaaaaccccatctccacaaaaattggataatttgataattatcattattgggtttctgagacgttacacatttaacattctcttctgcacaagttgcctttgtgtgagtatactaactttctgtagaggtatacttgtaatcacaaataagaataaattatataaaacaaaaaaaaa

SEQ ID NO: 97780 - DNA, 847 bp, Homo sapiens
tggcggatagcagaacctttttgtctccctctaattgctcctaagcctcacgctcccttgccccgcgtgtcctgttgcttccctgatcttctccgtgacctgtagctaaaccttccaccagcgcttgagaacttaatttgaaccggatcctttcccagacccctttcttcttctcctcctccacctcctccaggtgcccaacagcccccttctcctcctttcccttcccttacccttcccctccccctccccttcccctccccctcccctcccccgccccaactcagatccgccccggtccccgtccccttccctcccccctgccctaagccacctccacctctgtcctggccgcctcagggcaccctgaaaggatcaggacatgcggctgcgcttttggctcctcatttggctcctgctgggatttatcagccatcagcccacccctgttatcaatagtctggctgtctatcgtcatcgtgagactgactttggtgtaggagttcgagaccaccctggccaacatggcaaaaccccatctccacaaaaattggataatttgataattatcattattgggtttctgagacgttacacatttaacattctcttctgcacaagttgcctttgtgtgtctttcctgaagactatcttctggtctcgaaatggacatgatggatccatggatgtacagcagagagcctggaggtccaaccgcagtagacagaaagggctgaggtccatttgtatgcacacaaagaaaagagtttcttcctttcgaggaaataaaattggcctgaaagacgtcattactctacggaggcatgtggaaacaaaagttagacct

SEQ ID NO: 97781 - DNA, 304 bp, Homo sapiens
agcatactaaaaagtataaaaaaattttggacagaccaccaattcaggttatcaatagtctggctgtctatcgtcatcgtgagactgactttggtgtaggagttcgagaccaccctggccaacatggcaaaaccccatctccacaaaaattggataatttgataattatcattattgggtttctgagacgttacacatttaacattctcttctgcacaagttgcctttgtgtgagtatactaactttctgtagaggtatacttgtaatcacaaataagaataaattatataaaacaaaaaaaaa

SEQ ID NO: 97782 - DNA, 538 bp, Homo sapiens
tggcggatagcagaacctttttgtctccctctaattgctcctaagcctcacgctcccttgccccgcgtgtcctgttgcttccctgatcttctccgtgacctgtagctaaaccttccaccagcgcttgagaacttaatttgaaccggatcctttcccagacccctttcttcttctcctcctccacctcctccagggcaccctgaaaggatcaggacatgcggctgcgcttttggctcctcatttggctcctgctgggatttatcagccatcagcccacccctgttatcaatagtctggctgtctatcgtcatcgtgagactgactttggtgtaggagttcgagaccaccctggccaacatggcaaaaccccatctccacaaaaattggataatttgataattatcattattgggtttctgagacgttacacatttaacattctcttctgcacaagttgcctttgtgtgagtatactaactttctgtagaggtatacttgtaatcacaaataagaataaattatataaaacaaaaaaaaa

SEQ ID NO: 97783 - DNA, 307 bp, Homo sapiens
ccgatgtgaatggtttagggcggagaaggggggaggaggggagggggggcttagggacttcgctacgctgctacctgattctgtgtctggctttgcagtatctcaaggcttttataaaagctggttctggactgtttactatggggacgtggagagtcggtggggacagcagcaaagccaccagagaagcctcctagaaaagatgaaactacaacccaaaattcggaacttgaacaggaaaataaataccaggaagatcaatttaattaactgactcccttggaaattaaaatattaattaaaagtt

SEQ ID NO: 97784 - DNA, 237 bp, Homo sapiens
ggtggttctaatgcttggggctcaccaccttccctcccttatactcctttcctgatgcagagtgccagagtagccaataccccctttcaacaggagctcacaggacagaagaaggtcaaaacttaaggaggaaaattacattaaaagaaagatcaaaactgtacaagacaacaatacataccacccaaagcaaaaatattagagcaaacagaccaaggaattttttttttttttttg

SEQ ID NO: 97785 - DNA, 190 bp, Homo sapiens
ctactgtggaaaaaatgaagcagaagggaagtgcagaaacaggaaaattaattaggctattgagtggttcaggtggcagatgatggtggcatggaatagggtactaacagtgaaaatggaaataaatagccaaatttcagatctattccagaaatgaaatgaaaacaacagggcatgcagatggtttgca

SEQ ID NO: 97786 - DNA, 110 bp, Homo sapiens
tcaccccaaaaggaaacgctgccgcctcagcagtcagtgctggtctcccctagcgtcctggagcgtttttccctgcatggaggcccacgagtcccgcgctttcctccttc

SEQ ID NO: 97787 - DNA, 400 bp, Homo sapiens
aaaccattgaaggtttgatgggattacatatttatttcagaaaagatataatgaaaaattttctgaagggaagagattggaattttaaaaaaacacacagttaagaagctacagtaccatagtaattcaggtgagaagctataaggacttgtgtaagggaggaatggcaaaggaaaaagggtgatacatttggggaaaaattggggcaaaattgccaggtcgaatgtgtggttgtaactaatttgttgtctctcttcttttttcataataagaccctcgattgtagacagcccatgttgactcaaaataaagaccacatctcccagcttcccttgcagctaagtgagaccatatgagtacatcccgatcaatgaaacggaacagatgtgtcatgtggtga

SEQ ID NO: 97788 - DNA, 276 bp, Homo sapiens
agagctagcaccatgagcttcaataccctgcaattgctgtcgagaaacttccccctcctaaccattgccgccaccacctaatatactagtctccctgttagtaaccggctccttgaggactgtattgttaacatctgcctccctaaagtttgacataggaagtacataagttatattacttaaattgttgaatccttatcacctcctaatggttttcttcctcacatctgagtttttacaaccggtctcttgaccatatcctatgataaaatgcca

SEQ ID NO: 97789 - DNA, 855 bp, Homo sapiens
ttaaattgataattaaatcgataaaaggaaagagagagaaggagcctagagggagacgagactctcttaatgtaccaccgctacacagtttcagagttacctgcttctcccagagagacgaggacagattgcctccagcaggggcacagcagacaaaaggcacagactgacctgggcagcccttgctaggcaaccaagctatgaaatcacagctcactggcaccagcccaagcctctctcttcccctgggctcatgaccagaggttggtttccagtgggcaactgattacctgctgtgccaattctctttgcattgtgatctgaagatgggcctggggtctactatgatatgaaaatgtcctacagtacctggcattggaggtgtatgggtagtgggagaaaaacaaggtttgaaatctacagagtctgaaagtaggtcatggggcattcctcccatcattagagggtgtacatttgttggtgaaggattgattcatctcccatcaacaccttgtcagcctgaagttcctttgtcagaaatatacttgataatgcgggtccaaattgtatatgtgtcatatcctataaagcatggatccatcccatcctctattgtggccacaaatgccttccacagtaacctgcagccgacctactactgacaaatcccagcaaatgtgtggtagtcacttctcttcctcgggtctgcagggactcagggtgcagcactgttctcagatttgggctggagctcagtatgactgttggggtctcctgctacccctggagcctccatgtgctccactcgggttgggatccagcagtgcagaggtgaactctgggcgcttggaaggc

SEQ ID NO: 97790 - DNA, 460 bp, Homo sapiens
cctaggtttattaccattagatcataccccttttgtctaatgtttctctacaactatccatgtctttcatcagacttcgcataaaaatacagtttttgctggtctttgggtcttaatttctgaaggctcctgtgtcatgtaaaactttgttaaataaattatgcttttctcttgttaatctgtttcgttacagagggttcagtcatgacccttgcgatggatgaggaaaatatgttactttttctcccctacaactgcctcttatcactttaaagtactgctagtgaaattctaaatgttttagtatgtttagtgaaatacaaaatgtttttgtataataacaatatttctcatcatttaaaaattgaatccattaattctttaccaatattcaagtgttctaagaggcaacaaatcttagtcttagttattatttttaaatgtttttatctttcttttt

SEQ ID NO: 97791 - DNA, 479 bp, Homo sapiens
cccctcgagtggctaggactacaagcacacgtgctaccatgtccagctcatattttattttttatttttgtagagataggctggagtgcagtgacactatcacatagctcactgtagcctccaactcctaggttcaagcaatcctcccgcatcagcctcccgagtagctgggactacagccaggtgccactgcaccagctactcttaaattttttgtagacagagtctctatatgttgctcaaggctcgtctccaactcctgtcctcaagtgatcctcctgccttggcctcccaaagtggtaagattacaggcgtgagccaccacaccaggctcacaggttaattttttttaattattttactgtgtatgtttgcctaaacaaaaattatttcattttgcttataattttacttttttttttttttttgagatggagtctcgctctgtcacccaggctgaagttgtgtgatctcagctc

SEQ ID NO: 97792 - DNA, 193 bp, Homo sapiens
gagatcacaccatcacactccagcctgggcagtagaatgaaactctgtctgaaaaaacaaacaaacaaaaaaattattaagagtaattatctcagtctgccaggatttataaatattaatgtcccaaactgaagttagggaggcccatttttaccttttttttttaccttttatttttatctctgtgtaattg

SEQ ID NO: 97793 - DNA, 454 bp, Homo sapiens
ctcactgcaacctcccactcctgggttcaactgattctcctgcctcagcctcctgagtagctgggattacaggtgcctgtcaacacgcctggctaatttcttgtgtttttagtagagacggggtttcatcatgttggccaggctggtctcaaattcctgacctcaggtgatccacccgcctcggcctcccaaagtgcagagattacaggcatgagccaccgcgcctggtcaaatattggctttctagtcactatcatctaaaacagtgggttttgggggacaaaatccaacagattcatgatttaaaaaaaaaaaacaaaaacctcagcaaatttggcacagaggggtacttcctcaacctggtaaataatatctacaaaaacctacagctaacatcatacttaagggtgagaaactagaggccttcccattaaggttgggaacaaggcaggat

SEQ ID NO: 97794 - DNA, 798 bp, Homo sapiens
ggggtttttgcgaaatacgcaccaggtaatgtaattggaaagctcagcgccccccaactccacatacctggggattccagtcattccggcacttttctttttctatgttaatgaacacatttgcactctgtttttgctcattcattctttttctcctcactcagatctgtttatgcaacagatgtttataaagtgaacgtgggccacccctgtaatcctagcactttgggaggctaagataggaggatcgcttgagcccagaagttcaagaccagccttggcaacatagtgagacccccatctctacaaaaaatacaaaaattagctgagagcggtggaacgcaccagcaatcccagctactcgggaggctgaggtgggaggcttgagcctgggaggtcaaggctgcagtgagccgggattactcaactgctctccagcctgggtggcagaatgagaccctgtctcaaaataaataaataaaaataaagataatgtgaacctgaagtgaatttgtgtggagggacttgaacccttggggacagctccctttctgtaggcgaggagccactgggtaacttgagtcaaacttgagcatactcaaatgagatgaaggccttcggtcactgtgtcagggatcagagggtacagcttcctcaggcctgacttccttctggaagcctttttgagcatcttggcccttactctgtgattttcccaaactctgcacacttctggcagaggcaggtcagggtaggggtggagagtgtggattctggggccagggtgcctgtgtttga

SEQ ID NO: 97795 - DNA, 613 bp, Homo sapiens
taagccaattgccagaagaaccaggaaaatttctcctgaacagcagcttcctaacccagggaatgtgaaagttaaagagtaatttttagatacctaaaatgtaacccctgactttgacaatggctcaaggtacagagtcaagaataactttattccagttcccagtgaagatgttaaaaagcattaaaatgaattcccaattccttacaaaaatatacaatgtagttaaggaatataaggcagaaaccaccccaccaacacacacgctcaaaaatgaccaataacataataaggaagacattcttggagaccaactggtaaaagatcttccatatggtcaaatctaattttaaccgtacttctacttctcaaaacttaagaggcaatgtagtttctatttaacaaaactccaatctgagataggcaatgcagaaatacctttataaaatagcaaaaaggacattcattagttttcgatgacttgaaaatatttttaaatttatcaatttagtcatttatgcaaacaggtgccttgatgtctttaatccttatttaattgtaactccacttacactatttgatgaaaggccacagaaaaatacaggagccaata

SEQ ID NO: 97796 - DNA, 361 bp, Homo sapiens
ctaggattgtataagtgcccatttaatagcttgttttttgttaattatactaaatatagttgggaggtggtgtttggagatgttcatctctcatttattctccatgatgtaaatattctacatttttctctacgatataaatattctatattataaaatactcaagtctgttcgggacgtgaaattaaagtaatacattacagaaaccacttttgcttgagtaattcagctacctttctgtagctaaattcaacgtatattttcaactcttgccatgcttggcatttttataacattttcgtctctgtcgaccatttctttcctgaaatacatttttctcctgacttcctacttctccctc

SEQ ID NO: 97797 - DNA, 779 bp, Homo sapiens
aataggaattggccttctctgaaccttctctggatctccaaggttttgcacgtttcttaggtatgttaattaggcattcttgaagtgttgtcccagtggggatgcactgatgacttaggtcatttgagtcttctccatgcaatgggaacgtgaatcttactgcagttccgtcacgttccacatgatggtggccttgtctccgcaaaccggacttcaggtccctgtgtgctaagtttattggcctcaatttcaagctctggtaataaagcagctgtcaacttgccagagcccctgtgaaacagctgggattctcaacttgggctacatccaacacctgtggctacgatacagggattgtgagagagaggacgcttgacgaagagcaatgggactgtctgaacattctcaaattctaatttactcaagcatgtttggttttgagttttacttttctgtagaatattttcctaaaacaattcaaatgttgaggatagaggattgaggtgcatagtgaaaatttaaataatgctgtgttctatactgtgcttattaggctttacttctaatcatttacctgtctctagagccgtgctttccgatacagcaaacaagccacatgttgctcctgaatacttaagatctagtctgaattgagatcagcagtaagtgtaaaatacacatgaaatttcaaagattaaatatgaaaaagattatgtaaaaattatactttaatatgaaaacataatactctggatatattgggttaaatatattactaa

SEQ ID NO: 97798 - DNA, 800 bp, Homo sapiens
aaccagtgttgtagaatgcctctgagaatcccacagcacatcccaattccagagttaacgtattttaaacctcaagagaatggtgactgcagtagcctcttaatttgtcatgcaggcttcttttgtcctaatccagccccatacagctactagtgacctttctgaaatgtaaatctgatcctgtctctcctcttctaaaattcgccaggtgtcccttgcctttgggattgtcagcataacacacagacctttccatttccattccctgctggcttttccagcctcatcttcctcactgccacacgtcacttcatctatcatttccatactgactgaatggcagcttctcaaacattatgtgtcttttcacacatctgtctttgtacatgtaatttcttctcatttggaatcacctcccttatccttccccacctctccccatttcttggctaaaccttaattcattgtttagtatttaaagtcaagtgtcagctcatgttggatagattttctttgagccatcgagactaagatgatacctcattcctgtgtttatcctttgtactcacataagagtacatgtatagcatgtaacatacaatgtgtataacattttttaagatagggtataacatataacgtgattcttccaggggagcactgtttctctaataatgataatcctgtattacagtttaaaggctttgtagtttgaaactgcaaggaaaagaaagagaattggtacctgagggtctaaggccaggctaagggagaatggtaggagttggacatggggatgt

SEQ ID NO: 97799 - DNA, 282 bp, Homo sapiens
atccccctccatggtgggtgccttaatagcatccaggaacttccaggggcttttatgttgattattttatttaaattcccctaacaactctgaggtgggtattgttattgttattatgcctatggtattggttgggagacttaaggattctgatggtgagaaacttgtccaggtgcacccatttaattcatggcagagcaaatcagctggagccaagctgagactcttcactcctaagcataggggaggtggcagtagaagtggaaagaagcagctgtactt

SEQ ID NO: 97800 - DNA, 791 bp, Homo sapiens
attttatctactctagaacttcatataagtaaaatcatatagaatgaacttttctaggtgttttatatggctcagtataatatttattagattcatccatgttcctctgtgtatgtatgggttacttttaattgctgagtagtattccattgtgtgactatgccacaaagcatttatttattcttacattgacatcatttggattgattccagtttggaattataaagatgctatgaacattctttttcttcaacatctgttttgtggacatctagtttgattcctgttggataaatacttatggtaggtttatgtctaaatgctaaactagtccaaggtggttttgcctttcacattcccaccataaatgtatgaaagctatggttgcttcaaagccttgccaatatttgggtttttggaattttaaatttaagcctcctactggtgtattgttgcgattttgatttgtatttccttggtggcttggttccttgaacatcttttcatgtgtttattggacatttgtgtaccttttttgtgaaatatctattccagttgtttgctctttattaattgagttacctgtctttactatggagttgtaggagttccttatgtattctgggcataagtcttttgtcagatatgtttttcgagtattttatgtagttgttttttttactgtcttaattgatgtctttcagtgaatagaagtttattcttatttcgatggggtctgatttatttttatttttagaaacagggtcttgttctgttgtcctgggtgaat

SEQ ID NO: 97801 - DNA, 718 bp, Homo sapiens
atgcaagtcaaaaaagacaaaaattatatgattatgctccatcaaggtcccaccacccaagtcagttcctgcaagtgggtgcaggccctgcttctcttcatcctccctggcttgggaaatcctactgctccatggatgggtgcacctccctgccaacactcagagcctccctcctctggggtaacctagccctgggtattataaagctaaacttttaaaaacaaaggcccaatatccatatgcaaaagaatgaagttagacctctacctcacatcataaacaaaaattaactcaaaatggatcagtgactttagtgtaagaactaagcctatgaaactcttaagagaagacataggggtaaatcttcaggactttggatttgagaatagattctcaaatagggcaccaaaagcttgagaaacaaaagaaaaaatagataaattggactttatcaaaattagaaatgtttctatatcaaaggacagtctcaggaaagtggaaagacaaattataggatgggaaaaatgtttgcaaatcatgtatctgataagaatctagtatccagaatatataaacaattcttacactcaccagcaaaaaggcaaacaatccagcttaaaaatgggcaaaggacttgaatggacatttctccaaagaagatatgcaaatggccaaacagcacatacaaaggtgctaaacattattagtcttcagataa

SEQ ID NO: 97802 - DNA, 1424 bp, Homo sapiens
gatcctccgggctgcaggaattcggcacgaggaaaagcaagggcagggttcagaaagactgaatgtaaagctgggctctgagtctgccaggcccttcgtgtgttgctctgcacattaattaaagggtctacgaggtcagcaaggacgcccaagaagactcagtcatgaaaggtgaactgctcctgttttccagtgtgattgtcctgctccaggtggtatgcagctgcccggacaagtgttactgtcagtcatctacaaattttgtagactgcagccagcagggtctggccgaaatcccttcccatttacctcctcagactcgaacgctgcatttacaagataatcagatacaccatcttcctgcttttgcatttaggtcagtgccatggctcatgaccttaaacttgtccaacaattccctttcaaatctggcccctggagctttccatgggcttcagcacttgcaggttttaaatctaacccagaattcactcctttccctggaaagcagacttttccattccctccctcagctgagggagcttgatttgtcatcaaacaacataagccaccttcccacatccttgggagagacttgggagaacctaactatacttgcggttcaacaaaaccagcttcagcagcttgatcgagcgctcctggaatccatgcccagtgtgaggcttttacttctcaaggacaacctctggaaatgcaattgccacttgctcggtcttaaactctggctggagaaatttgtctataaagggggactaacagacggcatcatctgtgaatcaccagacacctggaagggaaaggacctccttaggatccctcatgagctgtaccagccctgccctcttcctgctcctgatccagtgtcctcgcaggctcagtggcccggctctgcccacggtgtggtcctgaggcctcctgagaaccacaacgcgggggagcgagaactcttggagtgcgagctcaaacccaagccaaggccggccaacctgcgtcatgccattgccactgtcatcatcactggcgttgtgtgtgggattgtgtgtctcatgatgttggcagctgccatctatggctgcacctatgcggcaatcacagcccagtaccatgggggacccttggctcaaaccaatgatcctgggaaggtggaagaaaaagagcgatttgacagctcaccagcctgagagcttttgtctcaaataggattggtcattgcaggccagaagatagtgtctgagtagggctgatgtgtttcctgttagtctgattttgcttttgccaaaagacaaaaaaaaaaaaaaaaaaaaaaagaaaaaaaaaagatgtgtctgtaaaaaatatttctggggaggaatttatgttgcgatttttaaaatactataggtaaaataaagatgatacttgtg

SEQ ID NO: 97803 - DNA, 1377 bp, Homo sapiens
gatcctccgggctgcaggaattcggcacgaggaaaagcaagggcagggttcagaaagactgaatgtaaagctgggctctgagtctgccaggcccttcgtgtgttgctctgcacattaattaaagggtctacgaggtcagcaaggacgcccaagaagactcagtcatgaaaggtgaactgctcctgttttccagtgtgattgtcctgctccaggtggtatgcagctgcccggacaagtgttactgtcagtcatctacaaattttgtagactgcagccagcagggtctggccgaaatcccttcccatttacctcctcagactcgaacgctgcatttacaagataatcagatacaccatcttcctgcttttgcatttaggtcagtgccatggctcatgaccttaaacttgtccaacaattccctttcaaatctggcccctggagctttccatgggcttcagcacttgcaggttttaaatctaacccagaattcactcctttccctggaaagcagacttttccattccctccctcagctgagggagcttgatttgtcatcaaacaacataagccaccttcccacatccttgggagagacttgggagaacctaactatacttgcggttcaacaaaaccagcttcagcagcttgatcgagcgctcctggaatccatgcccagtgtgaggcttttacttctcaaggacaacctctggaaatgcaattgccacttgctcggtcttaaactctggctggagaaatttgtctataaagggaaaggacctccttaggatccctcatgagctgtaccagccctgccctcttcctgctcctgatccagtgtcctcgcaggctcagtggcccggctctgcccacggtgtggtcctgaggcctcctgagaaccacaacgcgggggagcgagaactcttggagtgcgagctcaaacccaagccaaggccggccaacctgcgtcatgccattgccactgtcatcatcactggcgttgtgtgtgggattgtgtgtctcatgatgttggcagctgccatctatggctgcacctatgcggcaatcacagcccagtaccatgggggacccttggctcaaaccaatgatcctgggaaggtggaagaaaaagagcgatttgacagctcaccagcctgagagcttttgtctcaaataggattggtcattgcaggccagaagatagtgtctgagtagggctgatgtgtttcctgttagtctgattttgcttttgccaaaagacaaaaaaaaaaaaaaaaaaaaaaagaaaaaaaaaagatgtgtctgtaaaaaatatttctggggaggaatttatgttgcgatttttaaaatactataggtaaaataaagatgatacttgtg

SEQ ID NO: 97804 - DNA, 1414 bp, Homo sapiens
aagcctctgaaatgcaccatgtcggtgcccaggctcattctgctctgccttaagtgtccttcgttctctggaccacagccttcccaagaatgaggacctgttcttgctccctgctggacccctgcctccagcaagatgctgagtacacagacgacccataggtgaactgctcctgttttccagtgtgattgtcctgctccaggtggtatgcagctgcccggacaagtgttactgtcagtcatctacaaattttgtagactgcagccagcagggtctggccgaaatcccttcccatttacctcctcagactcgaacgctgcatttacaagataatcagatacaccatcttcctgcttttgcatttaggtcagtgccatggctcatgaccttaaacttgtccaacaattccctttcaaatctggcccctggagctttccatgggcttcagcacttgcaggttttaaatctaacccagaattcactcctttccctggaaagcagacttttccattccctccctcagctgagggagcttgatttgtcatcaaacaacataagccaccttcccacatccttgggagagacttgggagaacctaactatacttgcggttcaacaaaaccagcttcagcagcttgatcgagcgctcctggaatccatgcccagtgtgaggcttttacttctcaaggacaacctctggaaatgcaattgccacttgctcggtcttaaactctggctggagaaatttgtctataaagggggactaacagacggcatcatctgtgaatcaccagacacctggaagggaaaggacctccttaggatccctcatgagctgtaccagccctgccctcttcctgctcctgatccagtgtcctcgcaggctcagtggcccggctctgcccacggtgtggtcctgaggcctcctgagaaccacaacgcgggggagcgagaactcttggagtgcgagctcaaacccaagccaaggccggccaacctgcgtcatgccattgccactgtcatcatcactggcgttgtgtgtgggattgtgtgtctcatgatgttggcagctgccatctatggctgcacctatgcggcaatcacagcccagtaccatgggggacccttggctcaaaccaatgatcctgggaaggtggaagaaaaagagcgatttgacagctcaccagcctgagagcttttgtctcaaataggattggtcattgcaggccagaagatagtgtctgagtagggctgatgtgtttcctgttagtctgattttgcttttgccaaaagacaaaaaaaaaaaaaaaaaaaaaaagaaaaaaaaaagatgtgtctgtaaaaaatatttctggggaggaatttatgttgcgatttttaaaatactataggtaaaataaagatgatacttgtg

SEQ ID NO: 97805 - DNA, 711 bp, Homo sapiens
aggaggaaaagaaatgtcatctgctttctaatttaattcccttttttctactctttattatttttccttattatagaagaaatggttttccattaatacaaaattcagacatcatcaaaactataataaacatttgctgtgatcctacctgctaaagataaccatcattaagttcaatgcatagtcttcctttttcatatttatacatatgctaacatatattagaattattcatttacttttacaagaagaaggtcaggctggggacatggagggctcctacctgcgtaagcagaggtcttgcacctgcataagcagggccatgatcatgcctgtaatcccagtgctttgagaggccacggcagggagtctcttgagtccaggagttctagaccagcctgcacaacagggtgaaaccccatgtctacaaaaaatttaaacttagctgagtttaatggtatgtgcctgtggtcctagctacttaggaggctgaggcagggggacaccttgggcctaggaggtcaaggctacagtgagccatgatcatgctactgtactccagcctgggtgacagagcaagaccatgtcaaaaaaaaaaaaaagtcacaaataatgttgcaatttttctaccacttttaaaatcctttgaaacatttcttgtgttggtatatgtagatcttatctgactgtattcttgtaaatagatatata

SEQ ID NO: 97806 - DNA, 242 bp, Homo sapiens
taactgtccagaatattactgtttcttttacagtgtaaatgataccttaaaaaggttacatatggggctgtcagtcccgttaatgaagcttactgtcatgtgtctagtggaaaagcttaatcttaggttatcttccctgagcctgtggtaatatcaccaggaaatgtctaaacaagggagtctgggactgatacctggtaccaggtataactaaagcagctgacagtagagtctattctaac

SEQ ID NO: 97807 - DNA, 215 bp, Homo sapiens
gccccattatatcacatctatccaatattgcaggcagtaactactcaataaatatttaggggtaacttgaagagctgggtagcagcttatgctgaatagctgcaatatcagactatcatcaaccagtagcttgcatcaccaatcctcagaccccctgagtccgtgtgacaacttagcagctcagcagtttacctgataagccaggactatttagg

SEQ ID NO: 97808 - DNA, 274 bp, Homo sapiens
agtcagatgaggggtcatgaataaggtcatgggtcagataggaccaaagatggggaagtcaacagatgggacagttgagttgaatggccagctgaatgctaaagttgaggtcagaaaatcagatggggttgaaattgaggtcagaggtcaattgtgactatttttttttttttttttttgagacagggtctcactctgtcacctagactggaactgcagtggcgtgattttggctcactccaacctctgcctcccaggctccagcaatcctccc

SEQ ID NO: 97809 - DNA, 1217 bp, Homo sapiens
ggcggggccagacgcagccgagtatcttgaggagaaggactttaaagcgttcagggattttagctgccgctgtggagttccgccgctgttcttccgctggagggcgcagtagttccttaagagggaatggtgcggcgaatagctgtgagttcaaagtcctgactacagagttttgctcttgttgcccaggctggagtgcaatggcgcgatctcggctcaccgcaacctctgcttcccaggttcaagcgattctcctgcctcagcctcctgagtagctgggattacaggcatgtgccaccaagcccagacagaatccgttgccctatcacccaggcgtgtagtgccgtggtataatcttgggtcgccgaacctcgcgcctcctggggtgcaaagccattcgtcctgcttcagcctccgtgagtagcgtgtgactacaggcgtgcaccacagagctggctaatttgtcatgggtagtagagacggggtttcaccatattggccaggctggtcttgaactcctgacctcaagtgattcaccctgctgggtcttccagagtgcggggattacaggcatgagcgcactgtgccggaccataactctaactattttatcatcgaagaaatgcttgtatatgtatacataccatgtagattcagcagctgggataagagtcgtgtgagtgcgcttcacttaacaaattctggagtgcgtaggacaagggtgcaaattcgtccctggaggacgtcacctggggggaattgctagaccgcgtcgtagggatcaggacttagaacaatcctgctacttcctgaaaagctctccagacacatgcgattccaattaaacccggctgcaccgtggaaagacattccacgggagaggggggggccaggcaaacaacgcagcgtagaccaggcgcaccaggtggggcgactaaacacacgcggggcaggcactgggaacaaaaccttagccaccggggcaccaccttagcataatcaccccggggaagggaacacacacaagacgccaacacatcataaggtgggaaagaacaccaacacgcgctgtggggagaaaccacactgtgtggagccaccgcggctgttgagcccgcagtgacacacgacacactcgaacggccactgccgcggcgggccagacacgcacttccgagctgaaacgcaccacatggccagacccacagatccaacag

SEQ ID NO: 97810 - DNA, 259 bp, Homo sapiens
cttcatcctctgagggaaaagagaaggaggaaagacagctggtggtggagaaaagttaccagtttgaagatagtgggcaggaagttgaagggcttcctgcctaatggtctctagtttcgatttcttctgcaaagaaggaggcacatgctttgctgagagggcagaggactgaggtaaggggccttgaggatagggtgaaagtttgaaatagccactgtgggaaatgggagaaagaatttatcagggccagtaagagcta

SEQ ID NO: 97811 - DNA, 327 bp, Homo sapiens
ctagatataactacccttctctattcctcacctaaatccttatactgctgatgactttggaaaatagtacagggttttacagtctaatcatgacaatacatctccaggatccttgagccaaatacattcctcagaatactttttttaaaaaactgaaattgattacttgtactttgtcatcaccaaaaatatctgtagcaagacatactgttctcagcatccacttctaccatcctcactattgtaactcacagtagactatgcctcctactttactgaaaagatacaaaccattacctagcaatcattcttccaccttaaacatat

SEQ ID NO: 97812 - DNA, 859 bp, Homo sapiens
aggcggtctccgctcaacgatccttcctcaaagcatggttgctgagtacccagagttgcgaggagttttttaactgatttagccaggtggcaatcatgagtgaatggatgaagaaaggccccttagaatggcaagattacatttacaaagaggtccgagtgacagccagtgagaagaatgagtataaaggatgggttttaactacagacccagtctctgccaaggttctactgtcacccaggctggaatgcagtggcgagatctcggctctttgtaacctccacctcgcaggttcaagcgattctcctgccttagcctcccgagtagctgggactacaggcatttgccaccacgtctggctaatttttgtattttttgtggagacggggcttcgccatgttgcccagtattgtccttgtgaacttccttgaagatggcagcatgtctgtgaccggaattatgggacatgctgtgcagactgttgaaactatgaatgaaggggaccatagagtgagggagaagctgatgcatttgttcacgtctggagactgcaaagcatacagcccagaggatctggaagagagaaagaacagcctaaagaaatggcttgagaagaaccacatccccatcactgaacagggagacgctccaaggactctctgtgtggctggggtcctgactatagacccaccatatggtccagaaaattgcagcagctctaatgagattattctgtcgcgtgttcaggatcttattgaaggacatcttacagcttcccaatgagaggccaggaagtgtgaacatactgatagaaaaagactatattttatccctcataaaatgttttaaatgtaaatgt

SEQ ID NO: 97813 - DNA, 708 bp, Homo sapiens
aggcggtctccgctcaacgatccttcctcaaagcatggttgctgagtacccagagttgcgaggagttttttaactgatttagccaggtggcaatcatgagtgaatggatgaagaaaggccccttagaatggcaagattacatttacaaagaggtccgagtgacagccagtgagaagaatgagtataaaggatgggttttaactacagacccagtctctgccaatattgtccttgtgaacttccttgaagatggcagcatgtctgtgaccggaattatgggacatgctgtgcagactgttgaaactatgaatgaaggggaccatagagtgagggagaagctgatgcatttgttcacgtctggagactgcaaagcatacagcccagaggatctggaagagagaaagaacagcctaaagaaatggcttgagaagaaccacatccccatcactgaacagggagacgctccaaggactctctgtgtggctggggtcctgactatagacccaccatatggtccagaaaattgcagcagctctaatgagattattctgtcgcgtgttcaggatcttattgaaggacatcttacagcttcccaatgagaggccaggaagtgtgaacatactgatagaaaaagactatattttatccctcataaaatgttttaaatgtaaatgtgaaaaacagaagaaaaaagacaggacaccctga

SEQ ID NO: 97814 - DNA, 687 bp, Homo sapiens
ccgggagccttaaccctagagttgagagccaaggccttggagctggagaggaaactcacagaactcacccagctctacaagagcttgcagcagaaagtgaggtcaagggccagaggggtggggaaggatttaactgggacctgcgaaaccgaggcttactggaaggagttaagggagcatgtgtggatgtggctgtggcacatgactgtgtgtgtgtatgtgtgtgtgtgtataattctttgttgttttggtaaaatcagaggagtgggttataagtgctaatttccttgggaaattaatgaactagggcaagtatagcatcccatgcataaaattagcacagggacatcagaattgtatgggtcttcttttttctttttttcttttttttttgagatggagtctcgctctgttgccaggtttgagtgcagtggcgcaatctcagctcagtgcaacctccgcctcccaggttcaaccgattcccctgcctcagcctctcgagtagctgggactacaggtgcacgccaccactcccagctaattttttgtattttagtagagatggggtttcacctgtatgggtcttttcttgtgatggggttacacccccatttttgttaggcaagaaaagcatttggaaaaaaatgtaacatgttagattcaatataaaatattatggtaagatca

SEQ ID NO: 97815 - DNA, 1022 bp, Homo sapiens
  misc_feature (830)..(830): n is a, c, g, or t
  misc_feature (904)..(904): n is a, c, g, or t
aggcggtctccgctcaacgatccttcctcaaagcatggttgctgagtacccagagttgcgaggagttttttaactgatttagccaggtggcaatcatgagtgaatggatgaagaaaggccccttagaatggcaagattacatttacaaagaggtccgagtgacagccagtgagaagaatgagtataaaggatgggttttaactacagacccagtctctgccaatattgtccttgtgaacttccttgaagatggcagcatgtctgtgaccggaattatgggacatgctgtgcagactgttgaaactatgaatgaaggggaccatagagtgagggagaagctgatgcatttgttcacgtctggagactgcaaagcatacagcccagaggatctggaagagagaaagaacagcctaaagaaatggcttgagaagaaccacatccccatcactgaacagggagacgctccaaggactctctgtgtggctggggtcctgactatagacccaccatatggtccagaaaattgcagcagctctaatgagattattctgtcgcgtgttcaggatcttattgaaggacatcttacagcttcccaatgagaggccaggaagtgtgaacatactgatagaaaaagactatattttatccctcataaaatgttttaaatgtaaatgtacatgactgtgtgtgtgtatgtgtgtgtgtgtataattctttgttgttttggtaaaatcactttatcacaggttccaggacatggacacatcattttaggggctatcgttcaattcacctacacgtagtatgtgtcagacactacttagagctgngaatataattgtgactgtttctgctcccattgggttacatttgagtaaggagactgtgctcgtataaatagaanagttcagagagtgagaagtgctctcgaaggaaaaagataggttaatgggatagagagtggtagtggtgctgtcttggggatgttacctaatgagaccatgggggacatttctgagcat

SEQ ID NO: 97816 - DNA, 675 bp, Homo sapiens
aggcggtctccgctcaacgatccttcctcaaagcatggttgctgagtacccagagttgcgaggagttttttaactgatttagccaggtggcaatcatgagtgaatggatgaagaaaggccccttagaatggcaagattacatttacaaagaggtccgagtgacagccagtgagaagaatgagtataaaggatgggttttaactacagacccagtctctgccaatattgtccttgtgaacttccttgaagatggcagcatgtctgtgaccggaattatgggacatgctgtgcagactgttgaaactatgaatgaaggggaccatagagtgagggagaagctgatgcatttgttcacgtctggagactgcaaagcatacagcccagaggatctggaagagagaaagaacagcctaaagaaatggcttgagaagaaccacatccccatcactgaacagggagacgctccaaggactctctgtgtggctggggtcctgactatagacccaccatatggtccagaaaattgcagcagctctaatgagattattctgtcgcgtgttcaggatcttattgaaggacatcttacagcttcccaatgagaggccaggaagtgtgaacatactgatagaaaaagactatattttatccctcataaaatgttttaaatgtaaatgt

SEQ ID NO: 97817 - DNA, 1163 bp, Homo sapiens
aggcggtctccgctcaacgatccttcctcaaagcatggttgctgagtacccagagttgcgaggagttttttaactgatttagccaggtggcaatcatgagtgaatggatgaagaaaggccccttagaatggcaagattacatttacaaagaggtccgagtgacagccagtgagaagaatgagtataaaggatgggttttaactacagacccagtctctgccaatattgtccttgtgaacttccttgaagatggcagcatgtctgtgaccggaattatgggacatgctgtgcagactgttgaaactatgaatgaaggggaccatagagtgagggagaagctgatgcatttgttcacgtctggagactgcaaagcatacagcccagaggatctggaagagagaaagaacagcctaaagaaatggcttgagaagaaccacatccccatcactgaacagggagacgctccaaggactctctgtgtggctggggtcctgactatagacccaccatatggtccagaaaattgcagcagctctaatgagattattctgtcgcgtgttcaggatcttattgaaggacatcttacagcttcccaatgagaggccaggaagtgtgaacatactgatagaaaaagactatattttatccctcataaaatgttttaaatgtaaatgtacatgactgtgtgtgtgtatgtgtgtgtgtgtataattctttgttgttttggtaaaatcagaggagtgggttataagtgctaatttccttgggaaattaatgaactagggcaagtatagcatcccatgcataaaattagcacagggacatcagaattgtatgggtcttcttttttctttttttcttttttttttgagatggagtctcgctctgttgccaggtttgagtgcagtggcgcaatctcagctcagtgcaacctccgcctcccaggttcaaccgattcccctgcctcagcctctcgagtagctgggactacaggtgcacgccaccactcccagctaattttttgtattttagtagagatggggtttcacctgtatgggtcttttcttgtgatggggttacacccccatttttgttaggcaagaaaagcatttggaaaaaaatgtaacatgttagattcaatataaaatattatggtaagatca

SEQ ID NO: 97818 - DNA, 1562 bp, Homo sapiens
aggcggtctccgctcaacgatccttcctcaaagcatggttgctgagtacccagagttgcgaggagttttttaactgatttagccaggtggcaatcatgagtgaatggatgaagaaaggccccttagaatggcaagattacatttacaaagaggtccgagtgacagccagtgagaagaatgagtataaaggatgggttttaactacagacccagtctctgccaaggttctactgtcacccaggctggaatgcagtggcgagatctcggctctttgtaacctccacctcgcaggttcaagcgattctcctgccttagcctcccgagtagctgggactacaggcatttgccaccacgtctggctaatttttgtattttttgtggagacggggcttcgccatgttgcccaggttggtctcaaactcctgatctccaaggatctgcccaccttagcgtcacagagtgctggcattacaggctgagtcactgtacccggcctacatatgagaacttaactgcccggcctagttattgtttttttaactctaaaagttaagtctaccctgccttcttctttttttttttttttccacgacagagtcttgctcaggctggagtgcagtggcatgatctcggctcactgcaacctctgcctcccaggttcaagcaattctctgcctctgcctcccaagtagctgggattacaggtgactgccaccacacccagctaatatttgtatttttagtagggattgggtttcaccatcttggccagaggttggtcttgaactcctgacctcgtgatccacccgcctcggcctcccaaagtgctgggattacaggcgtgagccaccgcgcctggctaccctgccttcttttctaatacacatttaaggcattcataacttgtttaatcctttaactgtatcccacaatgattggctgtaggctgggcaaaaagtttacctatttaggatccttagtgaatgtttgttgaataaatggaagcattcattggtgacaggattaatttcaaacagagtagagtgtcatctattattttagtgacctacttgggttgatgatgcctctaaacttacttttcctccaaagtattgtccttgtgaacttccttgaagatggcagcatgtctgtgaccggaattatgggacatgctgtgcagactgttgaaactatgaatgaaggggaccatagagtgagggagaagctgatgcatttgttcacgtctggagactgcaaagcatacagcccagaggatctggaagagagaaagaacagcctaaagaaatggcttgagaagaaccacatccccatcactgaacagggagacgctccaaggactctctgtgtggctggggtcctgactatagacccaccatatggtccagaaaattgcagcagctctaatgagattattctgtcgcgtgttcaggatcttattgaaggacatcttacagcttcccaatgagaggccaggaagtgtgaacatactgatagaaaaagactatattttatccctcataaaatgttttaaatgtaaatgt

SEQ ID NO: 97819 - DNA, 252 bp, Homo sapiens
caggcgtgagccaccacacccagccaggtgtttggttttttatgctgttgaaaattggtgttaattcttgaagctgaatatatgcgttacctatgacacattggttctactccctagtttacatatccaacagaaatgaatatccactaggaaaggtatatacaggaatgtttatagcatcattattcataaataatctaatctatcagcaagagagtagatacattgtagtgtgtcatataatggaatatt

SEQ ID NO: 97820 - DNA, 180 bp, Homo sapiens
atcagctttattttaggacactctatactactcatgctaccattaccgtctatcattctttctctcatccatacccaagtctttttttttcttttgagatggagtctcactctgccgccccagctggagtgcagtggcggcatgatcttgactcaccgcaaccccttcacctcctgggtt

SEQ ID NO: 97821 - DNA, 563 bp, Homo sapiens
aaaattaggaaacgaaaatatatcttaaagactttaatcattttcaactaaaatattttggataatactgccttatatttaggcagtatatattaaagattttcacatgcatgattgtactgtcgatgaccctgctgtatactactgatctgattatgaagtggttggcagttatttatagtagttagactttttttaaattggtagattaatacctaaagcaatgccaaagttatcccaaccaaggatttcattaatttagtcattcagcagatatagatgactgcctgctatgtacagttacagaactggactttacaaatagaaattaacaaactcagcctatttttgcccagggaagctgatcgcattgatcataaaaacctcattcgtagtttgaaaaatattttgtcagattattttcagcacaacctgcacatctccttaaatttttttaatgaccagagttaccccttttaaatagaattcttcgtgtttattacataaaagtaaaattcatactgttgtcttgacacttagtttttattcattttgagatctaa

SEQ ID NO: 97822 - DNA, 301 bp, Homo sapiens
attacagtatactccttctacttattaaaaaaagttgaccataaaataactcaggcatgtccttgaggaggtgcttcagaagaaagtattattatcagaggatgacatttccatgcctgttattgcccctgaagatcttgcagtgggacaagatgtgaaagtggaggccgagtgcagtgactcatgcctgtcatgagtctgaccatgactcatgggaggccaaggtgggcagatcacctgaggtcaggagttcgagaccaacctggacaacaaggtgaaaccccgtctctactaaaaatac

SEQ ID NO: 97823 - DNA, 608 bp, Homo sapiens
tttgcttttgtttggagaggaagaggggtgctgatctaattttggtttttattcattcaacaaatttttgaggagatagaagaagatacattgcatttaacttcccctagaagggtattttttaaatccatttttggctccacgttgtagaaatcatttcgtaaacaaagaccctctttaaataccagagcttggcaattattctacacacacatgtgcagaattatcttttacagacacatactaaaatatttacagatgaaatgaaatgatgtctaagagttccttcaaagcaatagagtctggaaaacgagggtggtaatattgattaaacaaggatggctttgaacagctcatggctgaagtcgggtaacgagcatatgaagttcactatatattctgtctactattggttatgtttgagtttcccataataaaaagttttcaaagcagaatggaggggcattttgccattcttttagcaaaaggaaaggtgccaaccagagcaaatagttatttgagctccagtttttagttgagtgtgccaatgaagagttgagaagttgaagaccttcattaattcctttttccttcttaaatctacttgg

SEQ ID NO: 97824 - DNA, 508 bp, Homo sapiens
  misc_feature (1)..(1): n is a, c, g, or t
ngaatagcgtgcagctgacatctcttaatctaccaccgctacagtccttgaaatattccttcctgacaaaagaccgtttgtgttttgtgatggaatatgttaatgggggcgagaggagactggaatgtgaattgatggactgagtgagaaatattcacccacaatgtgagcagacaccatccaatcaactaagagcccaaataggacccaaaaaagcaaagaaaaggcactctcctggaatggggacactcctcttctcctgtccttggacatcagaactctaggctctctgacatttggactccaggctttataccagcaactccctagtttcccaccaaaacccaggttcctggcccttagcctcagactaagaattacaccatcagcttcccagggaacttggacggagatacgttaccagcatcccaaggtctccagcttccagatggcctgtcttgggaattttcaacctccataatcacatgagccaatttcccagtgaatt

SEQ ID NO: 97825 - DNA, 467 bp, Homo sapiens
atttaacttcttgatatctaccaaccaagtagttcatgatttgtaagagttcatttataacagggacttataacaatagtgtttaacctttacttttctattacttgggacatgttggtagtctggcaacatccataatgagaatcatgtttgggttttttgactttttaaaaagctcttaactgttttgttttgtttttcttggagacagtttcgctctgtcacccaggctagagtgcagtgacacgatctcagcgtgctgcaacctctgtctcccaggtttaagcaattcttatgcctcagcctaccgaatagctgggataacaggcgtgtgccaccacaccaggctaatttttgtatttttagtagagactgggtttccccacgttggccaggctggtatcaaactcctcacctcaagtgatctccctgccttggcctctccaagtgctgggagccactgcacg

SEQ ID NO: 97826 - DNA, 221 bp, Homo sapiens
cagttctgggatttatgactaccttctctattttcatgtgcacatacaggctgaagctatactctcaaatggatgcaggaattaaattcctgagatccttacaacaggaaaatttaaatatccttttttgagatcaccacaccaattaactttccaccgtgcttgctactctatagtcagcatcaacaatatccagttaaagaccaaggatgggcatggtg

SEQ ID NO: 97827 - DNA, 289 bp, Homo sapiens
gtcttattttgctgatctcttttattcaatcccttccttcatatcttgagttatacttttgcctctgaatttcatcatacatctaacacaataactaccaattatgaaaaacatgcttgacagcactctcatcacaagttccttgaaaagaccttatactatattacgaccccactttgcagttgagtaaattactctgtacaatcaagtaaatctcctacggcacacagctgtaggtggcacatgcaaagtttgtacctaaaaagtccacatacctttcattatacca

SEQ ID NO: 97828 - DNA, 350 bp, Homo sapiens
ataatttagcaaaagtttgttaagcagaagagggaacaaactagttctttgtagttccagaggatagaggtagaggtctaggtatctacaaggtttagagtgcacaaaacatgcctcttcctctctgggagaatttttatgccgtttataaaacaaaagcaattcttcccttacaggtaacacaaggaacacactgtttctttaccagaatgtaaaaaatttagaaggccagtggcctgattgtttttacttgatcttatcttaaagaattatgtgtgactaagcatttcaatgcaagaatgcattgactaggaagacagatttcgtcttattatgagaaagaactttta

SEQ ID NO: 97829 - DNA, 512 bp, Homo sapiens
gttggctttataaacaggactgaagaaaccagaagcaacaaagtgtgtactcattacatttagaagagaacactagaaaaataactgattagttaacatccggttactttaggctgcctttttttgtgctaaggattaaagccgagagaacttcatgatcataccagttgacaatttaatcctgcttatttgagaaattgactctctcttgatttctcaggaagtcagatgacaacttagttttgtcgatggctgttgtaaaacctcggttcttgtctccttagtttaaaagaaattaaacaagagacacacagcaaaggagatgcagcatggagcgatttgttgcaaaagaggcaggatattctgaaagtgacgtgcagaatagacagtacactctgagacaggattcagggcgggctgctcgtgaggatgggacagcattgacttactggggagactcccttgatgacagccttacacggttattcataaggaggcaggaagaggcgcta

SEQ ID NO: 97830 - DNA, 719 bp, Homo sapiens
gtttctcttttttcagagaagtcatcagtttgaaaacgtctatctcactttcttttctttaaaagtggctgggcacagtggctcacatctgtaatcccagtactttgggaggctgaggtgggaggattgcttgagccgagcccagaagttccagaccagcctgggtaacaaagggagaccccatctctacaaaaaataaaaaaaattagctgggtatagtgacatgcacttgtggttctagctactctggaggctgagattgggagggtcacttgagccccaggaggtcgaggctgcagtgagccgtgatcacgccactacactccagcttggatgatagagtgagactgtctcaaaaaataaaataaaataaaaatggctttttatcatatgaaagagcagtttatcttagtggttctcagccttttctccttactcctgcctatcagagggatccttacttccatccttgacagtggctcacttctacaagaattctcagctggggtagaaaggtaacatcttatcagaatctgtgcggttggacaggaggagacatgtagttgcagtcttcaaaactcattctgcctgttaaaacattcttatctttctaagactagtagtacttctgaactatgccctgccccaatttctgaattgatatggcttccctggaccacttaagattagaggaagggttgctaggacagtagaaggaa

SEQ ID NO: 97831 - DNA, 477 bp, Homo sapiens
aggccccaagctgcaccgaatacagccgcactgtctcctgttcctctgaaggatcatctatcttctacttaaaagcattagggaaaggcaaaagcctacctaagagctaacaacactctttggtcttggccacagaagcaagatactgaagggaacgccatcgtttgaaaagtgttgcagtaagacgcacacattgtgccaccactgtggctctaaggcctgccaccttcagaagtcatcctgtggcaaatgtggctaccctgctaagtgcaagaggaagtataactgaagtgccaaggcttaaagatgaaataataccaggactggtcgaatgaggcacctgaatattgtataccgcagattcaggcgtggattctgagaaggaacaacatctaaacccaagagggcagctgttgtagcatccagtttatcttaagaatttcaatgattagtcacacaataaatgttctgtttttt

SEQ ID NO: 97832 - DNA, 315 bp, Homo sapiens
tatgttgcccaggctggtctccaactcctgggctcaagcaatcctcctgccttggtcttccaaagtgttgagattacaggcatgagtcaccatgcccagcactgaattgtctttaataaagatacagaaggtgtggcacagtagcttgtgcctgctggttctttttatgtcccaactgtttgttctgataaattttaaatctgtaagtggtgaaataagaatacagtgaagtacattgatgtttatattatgcatttattagcatgtttgccaggagctattgtaataaacagccttgggttcaacaccagcttc

SEQ ID NO: 97833 - DNA, 807 bp, Homo sapiens
gggatgcgtggccaataaagggcaagaataaggcggattccgccttcctcgtggctgactggatgcatccgctggtactgatttacgaagagaatgatcatgaagggcaaatggcagtgaagcaagaagagctggcttcaggctcagaagagaatgctgtgcctcttcctcatggtttgcggtgccctgcatgttcagagaaacttctctaagtcttgctctgttgcccaggctggaatgcagtggtgtgatctcggctcaccacaacctctgtctcccaggttcaagcaattctcctgcctcagcctcctgagtagctgggattacaggctggactttggtggcacaatctcagctcactgcaacctccacctcaagttgtcctccccacttcagcctcctgagtaactgggactacaagcgtgcatcaccatgcccagctaggctaagttttgtattttttgtagacaaggttttgtcatgttgccaaggctggtttccaacttctgagctcaagcaatccacctgcctcagcctcccacagtgttgggattacagctgtgagccactgtgaccggctgggctatttcttttctatgcaataaaaattgtgtcatgaaatgacagggtccgcagttgcagtgcttgaagccattgttctaaaagagatataactccaaatcggaacactttggaatataagaatagctggagaagaagatacagataattatgaaaaagaatacagttgaacattcaactataaaatggtagggaaatagactatgttttgttcaacctcaaata

SEQ ID NO: 97834 - DNA, 232 bp, Homo sapiens
ctttgaggatcgtctatacaccctatacaccctataccaccatatcccacaagatcaacatgatcacacccggtggacacaggagaaacacgaagcccggacagcatcagggagtttaggagaaaggatcatggtctccagtctggggcagagttttcatccttaaggcagtaagagccgagagagctggtgtttctatccttgaaagggatgttgttggcggtggttcacg

SEQ ID NO: 97835 - DNA, 815 bp, Homo sapiens
ttttggacctgaaacagaaattctggaatacctatctgagtggactgatgtactggcccttgtacagctgaccaacttcagccttgttcctgttcaatggagaacagcttacgctggagtctgtggttttctctgggccaccttcatctgtttttcccagcagagtggtgacggcacattcaagtcagctttcaccattttatatacaaaggggaccagtgccacagaagggtacccgaagaaatgagaagtcaaggactctcttaaagggaccacattttttacctaaaatgcacagaattgcctgcagacaaaatatttgatgtgccaattatgcacttcattttgaggaattactactatttatagacccactttttaaaaaattatcaatgattatttttgaattgtattcagacttttttcctgttctagtctgaaatattacttctctaatattttggttaatatgaataatagtggcaaaatggcattttagaattattaatatttctaatattttaacacaagtttcaggaaacttggttttgattgttcacatttctattctaaaatctcaggttatctcctgaacacttttgggcagatgaagttttataccaaaaaatagttcttagagtgaattttaatttacatagaactcaatcgaaatgaagatttaataaccagatttctttctccaaaacatacacaatttgttattttagtaaatacctttttttttttttttttttttgggggggagtcttgctgtctccccggctggagcgcagtggcacgatcgcggctcactg

SEQ ID NO: 97836 - DNA, 609 bp, Homo sapiens
atggatgttgcggggtggggggggagggggggagggggggaggggggggttaggaaatatgacccaaaatccactcctcacttggacactgctctggttatgatggctgacaagaagatcctggtggttgctggcttgtcttcctctaataaggagcctgaatttagaaggtgatgatatgagaaaacaccaaatattcagaagccatccaggcctgctttggatgtcttttgggacaagagagcatgtgagggtatatccaggctgcaaatagcactgaagatgtcatctctgtggctgttctacgttctacttcactcccaaagaccatgaattacttcaaaatatgcctgatctgatttttttctaaagtactgggcagctgtgcaaacaatattaaaacagaaaaaatattttgtgccatgcactgccttgattgtacacgcccttaaaataggaaacatagactctttctaaaaaatacagttatatcaagacctgctttttaaatatccgtaatgtattattaccttttgtgtttctgttcagtaagtattacattcactgagagtgatttgaccaacaataaaaacaaagataccatcattt

SEQ ID NO: 97837 - DNA, 548 bp, Homo sapiens
atggatgttgcggggtggggggggagggggggagggggggaggggggggttaggaaatatgacccaaaatccactcctcacttggacactgctctggttatgatggctgacaagaagatcctggtggttgctggtagtagatctcctaatttaacttcttcctgctaactagtaaaatcaaccctatgtcaaaatcaagcccagacttgttcctccaccattcacaactgctctaaatgagttttatcccatgctgtgtggttagcaaagtcttcaataggacagccttcctgcctgtttgtcaatagctaataatttcttttgtttctctccaccctgccaccccataaactaagtatgggcctcatttaccttatttgtaattcacaacatagaactgacttcctcattataaaagtttccttactcgaaacaattcaaggactgggcagcattgctaatattacctcctctatggaagaaaatcagccaaataattaccaccaacagttgtgccagtaagcaaataaatgtcttgggagatgcta

SEQ ID NO: 97838 - DNA, 412 bp, Homo sapiens
tggagacagagtcttactctgttgcccaagctggtgtgcagtagcgcaatcttggctcactgcaacatccgcctcctgggtttaagcaaatctcctgcctcagcctcccgagtagctgggattataggtacccgccaccatgcctggataatttttgtatttttagtagagatggggtttcaccatgttggccaggctgatctcaaactcctgaccttaagtgatccacccgcctccgcctctcaaagtgctgggattacaggtgtgagccgccatgcccagccacatgctagttctcgacttggctggtgtttatattgacttcagcctgtgctaatttactgaagttacacccatttttataagcacagtgcaataaaaagctttaaatagtcactggaagaaaatatat

SEQ ID NO: 97839 - DNA, 459 bp, Homo sapiens
ttcagtttcttttttgtgaagccttccaggaatagtacaggcatatattagcacatatctatggttttaacatgcatggttacaccctgatttttttacttaattaagcacatcaatacatacttttaaccaattaccattttgtctatttaataaatacctatacagcactttctatatgctaggttctccttttttaaaatttaattttttatttggagataagtttagacatacacaagagttgcaaaaatagtacagtttggccaggcatggtggttcacacctgtaatcccagcactttgggaggccgaggcaggtggatcacgaggtcagtagttcgagaccagcctgaccaacatggtgaaaccctgtctctactaaaaatacaaaaattagccaggcatgctggcatgcgcctgtaatcccagctactcaggaggctgaggcaagagaatt

SEQ ID NO: 97840 - DNA, 526 bp, Homo sapiens
catgaggtagacatcttatttcattaaaaaacaatagatagccaattatcccaggctcgttaactttatccattggtatttggtggtacctctgtcgtgcacgatagtgatttgtgagagctaagtgttagcatctctctccaactctgcattcagtaaagtcatattggtaccttgaaagcaggcaagttttagtatttacacatggaaatcagcaggcaactacaaacaaggctgttttggctggggagctggcttgttcatgatgaacggcttttgcaaaaagaatctagattctagaatctagaatctagacgctagatttgaattgctaatattttggtagatttaacatagattgttgcatctatgttcgtgagtgagattaatctgaaattttttttcttgtaatacttttgcttggcttttgaatggaaattgtgctatcattgtaaattaactgggaattgctttctttctttctattctctggaaaaatttgattaaaattgaaattaactcttac

SEQ ID NO: 97841 - DNA, 781 bp, Homo sapiens
  misc_feature (733)..(733): n is a, c, g, or t
taggtttgcactcaagactgacatttaccgtaatggaagctgttcatatgcccccaggaaagaatgaacaatttaatagaaaatgctaaaggagtgatattaggaaaaaatcaataaatgttactgatgctatcgtcatcatcatcatcatcatcattatcatcatcatcaaggtcatgacagaaagaggacacattacatgaaatctcaacttcatccctgggccatacacacctgtagctaatttttgtatctttctatttgagttcgggtttcgcatcgttttgtcccacacaacagaagctgatctccaaagagaggaatgatgtagcctcaagtaacaaagacattgagggaagtctttcacatcctgggatgcctgtggcccagcacagagggctgttgggttgccaacacagagtttacccctcaggtgtctgtaattgggtaaagagaggtgaagtttagcatgtgatatgtagaacgggcagctacaaatacaattctaaaacaagaaaaaaaaaaaagaaaatggcctattttggcctcatacgtggaacctctgaagccccttccctatacggaggattcatactgatgcctccctcactgactccatcgactcgcacccatgtatttgtcacccgccccacccacaccacaggacactaacacctcaaccacataaaatatagcgacaccgaaaacaaagcacatagccctcgcgcccgtntaagacccccactctaccacagacacccacactaagtcgccgattgtt

SEQ ID NO: 97842 - DNA, 820 bp, Homo sapiens
  misc_feature (56)..(56): n is a, c, g, or t
  misc_feature (772)..(772): n is a, c, g, or t
tttagtcaactagaagttgcaccaaatcaacaaaaaaaagtttaggtaacctcaanatgctatttaccgtaatggaagctgttcatatgcccccaggaaagaatgaacaatttaatagaaaatgctaaaggagtgatattaggaaaaaatcaataaatgttactgatgctatcgtcatcatcatcatcatcatcattatcatcatcatcaaggtcatgacagaaagaggacacattacatgaaatctcaacttcatccctgggccatacacacctgtagctaatttttgtatctttctatttgagttcgggtttcgcatcgttttgtcccacacaacagaagctgatctccaaagagaggaatgatgtagcctcaagtaacaaagacattgagggaagtctttcacatcctgggatgcctgtggcccagcacagagggctgttgggttgccaacacagagtttacccctcaggtgtctgtaattgggtaaagagaggtgaagtttagcatgtgatatgtagaacgggcagctacaaatacaattctaaaacaagaaaaaaaaaaaagaaaatggcctattttggcctcatacgtggaacctctgaagccccttccctatacggaggattcatactgatgcctccctcactgactccatcgactcgcacccatgtatttgtcacccgccccacccacaccacaggacactaacacctcaaccacataaaatatagcgacaccgaaaacaaagcacatagccctcgcgcccgtntaagacccccactctaccacagacacccacactaagtcgccgattgtt

SEQ ID NO: 97843 - DNA, 694 bp, Homo sapiens
cggcacgagggtgcaactttatttcttcagttattgagtagtttatacaaggcatgggatggggaaaggggcatttttttaacttaaagataaagcagatctttaaaaattatgtggattaatgaatcactttttgcctttttcttgctgtgtacagtcatccctttgtatcagtggataccacagatgttcaaattccttatgtaaaatattgtagtatttgcatataacctaaccacatcctctcatatacttgtatgtgtagattatttataatacctaatacaatgcctgcacgtcacttcattcacataaattgaacatagtactcagcacgtggcaaattcaagttttactcttcaggactttgtggaatttttttttttcctcaaatatgtttgatctgtggttggttgggttcagggacgcagaacccatgtatgcacaggaccgactacacttttgttaaagactaaaagagattctggtgttaaaaaaaaaaaaaacactatagcataatgagtagaggtatcagaaaagaaatcgtcatagaaaatttaataataagttgaaatttcaaactatgaagtcagaaacagatctaggtttaaatcctaactgctagctaacagtatagtaccttgagtaaattatccttcttttgatgccttaatttcccatctctcaggtgggg

SEQ ID NO: 97844 - DNA, 493 bp, Homo sapiens
cggcacgagggtgcaactttatttcttcagttattgagtagtttatacaaggcatgggatggggaaaggggcatttttttaacttaaagataaagcagatctttaaaaattatgtggattaatgaatcactttttgcctttttcttgctgtgtacagtcatccctttgtatcagtggataccacagatgttcaaattccttatgtaaaatattgtagtatttgcatataacctaaccacatcctctcatatacttgtatgtgtagattatttataatacctaatacaatgcctgcacgtcacttcattcacataaattgaacatagtactcagcacgtggcaaattcaagttttactcttcaggactttgtggaatttttttttttcctcaaatatgtttgatctgtggttggttgggttcagggacgcagaacccatgtatgcacaggaccgactacacttttgttaaagactaaaagagattctggtgtta

SEQ ID NO: 97845 - DNA, 510 bp, Homo sapiens
tctgcttttgtcaggaggtagcccggcaggactgacaataaatcagcttgcctgaacttgggtctgctggcctcactcctttctcggctgtccttccaattataccttatgtcttggtgccgaaaccgggaaggtggtacagttcggcctcttttctccctttatcctccccctgctccttcccctggccgaactcccccttccagaacctgctagagacccaaggatctcatacatcttttccattgctggcgaacacatccaacaccagggacacctcaggagaaagaaaaacaaaacaaaacaaagtgtggcttgcagctcagtcgcatgccaacgatcttcatcggcaagaccctactaagcccctaggggccgctgcagttccccgagaagaccttcctgggagtaccaacccacataacctggccaggcatctcataaccatgtgattacttgcctcatcacaggccttaacaaagcagcccataaggccataatttttgaaaa

SEQ ID NO: 97846 - DNA, 490 bp, Homo sapiens
ttcttgagatctgtccaagttgttgtgtgtgtcagtagttaattctttttttattactgagtagtattacatgatagggctgtacctcagtttgttaactgtatacccactgaagggcatttggattgttctcaggttttggctattacaaataaagctgctatgaagatttgtgtgtaagcttttgtgtggacataagttttatttttctgagatttatggcctagagtatgctgggtcatacggtaagtacatgtttagatttttaagaaacggccatattcttttcacatggctccttactacttgtaaaactctctgtacttagaatatctacctgtgtatttcagatgtgcagatagatgtgatttcaacaactagactgtaaactccatgagggtggggacagtaactggttcatttttatatccttcacagttcacaggaaactataatattgtttatggcagttgttctataaagatttatt

SEQ ID NO: 97847 - DNA, 181 bp, Homo sapiens
gaaccctatcgtatggtgctttagttttgaatcttgacgtacatttccccctacttccccaccattatccaagccttttcctcgcaataaactagatgtttatgaagatgcatgaaccactcctgcccattagaccagcaccacatggttcacagaggcactatatgacatcaccgctata

SEQ ID NO: 97848 - DNA, 131 bp, Homo sapiens
catctagtctgtggtattttgttatggcagcccaagaagactaataattacaacacccagaccaattaaatcacaatcactcagagtgggacacagacgacagtagatgccggaaacaagggagaaccgaa

SEQ ID NO: 97849 - DNA, 661 bp, Homo sapiens
ggaaggggctggacacccgctcatggccacagagggcagcttccgggcgacgctccagctctgcctctcggactcctcacggacacaggcgtgtgtttgaaacggatcgatgtccccccggttcctttcacagacaccagaaagcccgcgaacacacctcacaggctccgaagtctcactctgatcttggctcactgcaacctctgcctcctgagttcaactgattctcctgcctcagcctcaccagtagctgggattacagatgcccatcaccatgcccggctaattttgtatttttaatagagacagggttttgccatgttggccaggctggtctcgaactcctgacctcaagcgatccacctgcctcggcctctgggattacagatgtgagccatcgcacctgtgcgtgaaggttttctaaccttctatcagattttctaacctccccaagccacaggatgagaaaagtgtgcgatgctcccgcctgaggaagccagcccagccaacgcagagccaaggaccactgaaggcattgccactgctacacgcttggagccatccatgcctgcagccgcgttgaatgccttctgcttctttcctatgccagcttgaactgggttacttttgcttacaaatgaagtactctaactcaggaaat

SEQ ID NO: 97850 - DNA, 287 bp, Homo sapiens
tttatttgggtgaatgtaccttttcaaaatcaagatattctggggtttttaaaaaataaaaagtatgaaaatatcccaaaacagaaaagagtactgaggataaccatataaaaacaatttaagctgagaaaaataacccagtcctgtcgagtcctaaagagaaccttggtttccatgggacgttagcaaagtgcagagctcctagcagtgggtaggatggaatgtttgcagcctttccaaataagcaaatatcccccagaatccagcatccgtgccccacatgctgt

SEQ ID NO: 97851 - DNA, 505 bp, Homo sapiens
cttgataattggctgaataaagtgaacccacataaagtgtcacccgcctcttcagtggacagtaacatcccatcatctcaaggctacaaaaaggaaggccgagagcagggcactgggaatagctacactgatacaagtggacctaaagaaacgagttccgctactccgggacgagactccaaaaccatccaaaagggatcagaaagtgggcgtgggaggcagaaatctcctgcacagagtgacagcacaacacagagaagaactgtaggcaaaaaacaacccaaaaaggctgagaaggcagctgctgaagagcctcgtggaggcctgaagatagaaagtgaaacccctgtagacttggctagcagcatgccctccagcagacacaaagcagccaccaaaggctcaaggaaacccaatataaagaaggagtctaagtcttcccctcgacctacagcagagaaaaagaaatataagtcaacaagtaaatcttcccagaaatcaaggg

SEQ ID NO: 97852 - DNA, 505 bp, Homo sapiens
agcggtgctcgcgctccaaggcccggtggggggaggggcgctcacgcaaccgccactgtctggagcgggctcgcctctgcggcagccctcaccgcccgggctttactgaagcggagtctagcatgtgcggctgctccacagcggtgtgggtggcggcggctcctctgcagcagcctcggcagtaggggtcagggtggccaagcccaccgtggagctcatctgagagttgtaaggtacgggactgcctcggtctttgggacgccccgtctggtagcatcccagatccagcacgttccttccggccctgcaccccggcccggtgcctcacaccccgctaccccaagcatccagactctaaggcagcccctgcatctcagtcctgacatcgctgtccctggagcatcctccgctggagctggagcttgacagcttacagagtcaagtccctgggaacttcaggaagcagcccaccatgtttcaaccacttactatgtgccatttcctg

SEQ ID NO: 97853 - DNA, 529 bp, Homo sapiens
actgaaattctcttaaacattttcaactgcatttatacacgtagaatctaattttattttttagcatttcagttgtctgccttatcaagtattaatatttaaataattctcatagatatattaaatgtcttcatttcttttaaacttttaagttctctttgctccaattataatcacaaacttcggaaaatgttatacctttcaacttacagtcgctatcaaaaatcaaatacttagggcagggtgtgatggctcatgcctgtaatctcaacactttgggaggtcgaggtgagcagataacttgagcccggggcttcaagacaagactgggcaacatggcgaaagccagtgtctacaaaaaaaaaatacaaaaaaattagccaggcatggtggcacacacctgtggtcccagctactcaggaggccaaggtgggttgatcatctaaacctggggaggtcgaggctgcagtgagtgagtcatgattgtgccactgcactccagcctggctgacagagtgacacctcgtct

SEQ ID NO: 97854 - DNA, 799 bp, Homo sapiens
aaatgtgtaacttttgcattccataatgactatagtctgatgattttatattcttggggtttcacattaacagctgtttaatctgaatgtttgtttcagtatgtttcagaagtcagaatttgtttataatcttagaaagttaattcaggacctgtactgtatgtaatacaacatccccagcaggatcaagctatcatattcatatttctgcaataaaacatagagatatttcctctatatgagatcaaaaaagactatgagtaacttcccatcagtttggaagttagttatcagttaataaagtttggattaatacaagtttttggttttcagaacttttgaattttagaattgtagataaagaattgaggactaaatatgggccaattatttcatattgtattttgggttgagttctacaaagcctcttcaaatgagctatttaaattaaggatatattctttgaacatcaaaagttaaatataaggaagcagtatatttttaaaggattttacatatatgtgtttctgatgaatgtattaactgcattcagttaaagtaagtgaaaataagagtaatctgcagctctgtttaatatatttgagtctttaccttaattttttctttttctaaaattaattgaattcaaaatatctggaaattcctgcaagttgtttttttgaactgtactccagcctgggcaacagcgagactccatctcaaaaaaaaaaggaaactgtgtatcaagaacatgattatccaggggtatttctaattcagatcatcaaatgattatatg

SEQ ID NO: 97855 - DNA, 1544 bp, Homo sapiens
  misc_feature (484)..(484): n is a, c, g, or t
aatttcttaattttttggtggagatgaggtctcgtcatgttgctcaggccgctcttaaactcctggctttaagccattctcccaccttgccctcccaaagtgcaaagatgcatttttaaacttgctatgtctctaaggcatttctggtggctgtctgcttgaattcaccagggtagtgatgatagatttttttttttttttttaaatataaggactgggtctcactatgttgccccagctggtctcaaactcctggcctcaagcgatcctcctgcctccacctcccaaattgctgggattataggagtggcctaccatgcccaacgtgtttttttgtttgtttgttttgtttttttaaaggctgtgtgttacttagtttcttaagtgttttgtttgggttttattccacaggaaggttgaggaccttcagttccgggttgaagaagaatcaattaccaaaggtgatcttgagcaaaagagccanatttctgaagatcctgagaatacgcagaccaaactggagcatgcccgcattaaggagcttgaacagagcctgctctttgaaaagaccaaagctgacaaactccagagggagttagaagacactagggtggctacagtttcagaaaagtcacgtataatggaactggagaaagacctagcattgagagtacaggaagtagctgagctccgaagaaggctagagtccaataagcctgctggggatgtggacatgtcactttcccttttgcaagagataagctctttgcaagaaaagttagaagtcacccgtactgaccaccagagagaaataacttctctgaaggagcattttggagcccgggaagaaactcatcagaaggagataaaggctctgtataccgccacggaaaagctttccaaagagaacgagtcattgaaaagcaagctggagcatgccaacaaagagaactcagatgtgatagctctatggaagtccaaactggagactgccatcgcatcccaccagcaggcgatggaagaactgaaggtatctttcagcaaagggcttggaacagagacggcagaatttgctgaactaaaaacacaaatagagaaaatgagactagattaccaacacgaaatagaaaatttgcagaatcaacaagactctgaacgggctgcccatgctaaagagatggaagccttgagggctaaactgatgaaagttattaaagaaaaggaaaacagtctggaagccatcaggtcgaaactggacaaagcagaagaccagcatctcgtagaaatggaagacacgttaaacaaattacaggaagctgaaataaaggtaaaggagctagaggtactgcaagccaaatgcaatgaacaaaccaaggttattgataattttacatcacagctcaggctactgaagaaaagctcttggatcttgatgcacttcggaaagccagttccgaaggtaaatcggaaatgaagaaacttagacagcagcttgaggcagctgagaaacagattaaacatttagagattgaaaagaatgctga

SEQ ID NO: 97856 - DNA, 142 bp, Homo sapiens
gaaggttgaggaccttcagttccgggttgaagaagaatcaattaccaaaggtgatcttgaggtaaaacccctccagctctcttacagcttttatgggtatcagtattcagaacacgggcgaaataatgcaccaattgaaatg

SEQ ID NO: 97857 - DNA, 203 bp, Homo sapiens
tcggcactcgctattcatcggcacctcgcttattcatcgcaccccgacattcttgccttccccagcatgtcctggaattggaagccaaaatggaccagctgcgaacaatggtggaagctgctgacagggagaaggtggagcttctcaaccagcttgaagaggagaaaaggtgaccccagactgtttcctggtgcaagtgtggc

SEQ ID NO: 97858 - DNA, 1164 bp, Homo sapiens
tcggcactcgctattcatcggcacctcgcttattcatcgcaccccgacattcttgccttccccagcatgtcctggaattggaagccaaaatggaccagctgcgaacaatggtggaagctgctgacagggagaaggtggagcttctcaaccagcttgaagaggagaaaaggaaggttgaggaccttcagttccgggttgaagaagaatcaattaccaaaggtgatcttgaggtggctacagtttcagaaaagtcacgtataatggaactggagaaagacctagcattgagagtacaggaagtagctgagctccgaagaaggctagagtccaataagcctgctggggatgtggacatgtcactttcccttttgcaagagataagctctttgcaagaaaagttagaagtcacccgtactgaccaccagagagaaataacttctctgaaggagcattttggagcccgggaagaaactcatcagaaggagataaaggctctgtataccgccacggaaaagctttccaaagagaacgagtcattgaaaagcaagctggagcatgccaacaaagagaactcagatgtgatagctctatggaagtccaaactggagactgccatcgcatcccaccagcaggcgatggaagaactgaaggtatctttcagcaaagggcttggaacagagacggcagaatttgctgaactaaaaacacaaatagagaaaatgagactagattaccaacacgaaatagaaaatttgcagaatcaacaagactctgaacgggctgcccatgctaaagagatggaagccttgagggctaaactgatgaaagttattaaagaaaaggaaaacagtctggaagccatcaggtcgaaactggacaaagcagaagaccagcatctcgtagaaatggaagacacgttaaacaaattacaggaagctgaaataaaggtaaaggagctagaggtactgcaagccaaatgcaatgaacaaaccaaggttattgataattttacatcacagctcaggctactgaagaaaagctcttggatcttgatgcacttcggaaagccagttccgaaggtaaatcggaaatgaagaaacttagacagcagcttgaggcagctgagaaacagattaaacatttagagattgaaaagaatgctga

SEQ ID NO: 97859 - DNA, 586 bp, Homo sapiens
aacaatctatctggtcagatacttagtacctagatgtggagaccatatctcacagttctgtcaggcaggagcagtccaaacactttgattatcagctgtctcttgctcgggaaattactaggtaccaacactgttatatatgcagaggtgtctgaaaaatgaatgcagatcaatttccagttccacacagagcacatctgtaaaatatgacctttggataatggctggagtgtttacctgcagtattcgtttttgcatgtggctttccctagatatgtcaggatacagcaggaccaaaacctagcctttgtcctatgtctggagacttcttggaagctggagcacacaaatagctacagcaaacttgaggaatgggcatgaatagactggcttcggggaacctgccagcttggccgtgtggccaaggtaataggcaagccaaggcagagctagagctcagagctggaggggaaattaaagcagcaaatgtagaaacattaagcctgaagaggcgacgacgttgaattctaaaatgcaggccaaagctcagactgcaagctgtctggctgctccgggtgtgcccaga

SEQ ID NO: 97860 - DNA, 3123 bp, Homo sapiens
ggtgaattaatctcagaaactgacctataaaataatgactcattatagattgggtgaacttctcattttatttagcttttaaaagtgctaaatcctctcataaaggaaaaattataggaaactatagcggtatccagattctgatgagctttaaaaattataaaatatagcaaatgtcttcatattttagccagaaatattagtacacaaccaatatagaagtcttgtttgtttctgggttctccagcagagactttttgtttgtggcttactctgtatagcctcatgtgccttaaaggtggtgaactctagtttttgtcaatatcaggcttttcaaaactcaaaaacaatccaaatgttgtaatttgttttgcataatgcccatggaattggatatcagtaagcaaagccattaaatcgaaccaatcaatgctaatagagtataaaaacaaaaaccttcaaattttaagtttcatttgtgtaactttattttcggcctagctagatcattgaagagccttgaaagttatctaaagtatggcttaatgtatttttttccctctgaaaaagatcatatgccaggatacttcttcaaaccagatcacttttaatatctagaaagataattttcaaggtataggcaaaagcacttcaaggacagagattatgtagcaagttgattctctaggaattctttgaactcatttgtgtaatagctggaacacactcctcttctttcctttaacaaatgaacttttagcacttctgtcttcaaggaaaaacatttgtttggaattggtggagggtactcgcagtccgtttatagtttgggacaattaataggaaaatccccagttgcattcaaataatagtgttgatgttgagggcactgactcattcagcatgtctgaactagaagtaaatttaattctgaaaggactgttagttaggaaataagtatttgtatacatatgtactgtggtaactttggattcattttaagtctgataaagtaagataaactttgtcttaaaaataaaattatgctaagtgaataaaaactgagatattttaagctaggcatctttgttagcatagtatccggaacataactacttataatgcttaggtcttatttctttggaaaataagttacttattccagaagccttagaaggaattctgaaaattcttctaactggccattaagagtaaggaagttgaatggtactgctgaagatctgagttgactcactgaaattttattttcttatttttttaacattaaaattatttctttttggctctccctctagttattttttaaattaaggtaattactgttttaacctagagcatataatggcaaattaaattttaatttgacactcataccgaactcagaaaagcttgtttgatcttctctaaattctgtatgtagtactttttttaattgtcacatttctttgttacatctttgtgtccaacaaaacctgtggaaatctgtgttcatttttgtggtgagggatgggggtgaaaaaggggagacttgctctaattatgcatatacatttgactatgtaaaggtagttgtagactatatgtataaataacaagttaacacttaatattctaaattgttctaaggaacagtggcctgaagccatgactagttttgtggagctgctggctcttttaacagtagctgacctattggatttaaactgagactgaaattgacatttgtggttaggttatctagctgaggcttttaacaatggagcagataatgtctgttcctgtagtggatccatttaatttcctatttgagtactctcacttaacaagtattatctattctgaacctttgtgttgggaatttaaggactattgtcaaaggctattaatggtaaacaagtatatgcaaaacaattcacatatgggtaaaaatttcaaattgtgggtttttgtttttgctttttagtttcaaagattagttatgtagcagcaatatcataaccaaagcaagtaggaagttgactggtttggagaatcttcaagtagttttaaatactgtaatgtatcagattgttaaccaggatttttttttcctgtattactgctaaatatattactatattaatgcacttttgtatatataactgtcttctgtacattctgtacttactacagtgtatataaagcctgttttccctgaagctgtgagggaataacaatagttgtatcataagtcgtttctattttgagttccttcttgtacttgaaagtagttcagtagtgaaatctaaatgagtgtgtatggttgtaattaaaactggcaatgtggcagagctgtcttttgaaactgaataccagaatgaaaagtgttgttttggttaagaactcttataatatattatttcttttgatgtaccctgagttgttacacagcccactcactgctgcttactactttatacttctgagtcagctcctttcatgctctatcccagaatatttaccaacagaggagaactgctcccttttctgtttctcacagtttggttatggctttataaacttttatttggtgaaagccccagatacccaaatgtcattggcaaaacttatttttttttctggacagatcagatttctagagagagcagatttctagagagattagcattcatagtaagtgaaaattgtctaatttttttaatccatgctattactgggcagtaggtctaattttttttgacaaaaaatagatctattttccttatatattgatttagaatcttaagttagaattttatagaagaaatgtctgagcagttctatgtatggaggagcaattcagcttttcagcagcaactttatcttttgccactagagggagatctgtggttgctttctcctttggagaatagctgctttgcttttatttttaatttctaaggttggaatagaacttattctcaaaattcctttagtgttattaaatattttcatttattagtcaaaggtaagttaattaagcttgtttaatgatgccaatcttatgcttttctgtaatcttcaatttttaataaatgtgagttagatactaaaaaaaaaaaa

SEQ ID NO: 97861 - DNA, 1715 bp, Homo sapiens
cggtcctggtaccgcccggagttaggatatcgtcgacccacggcgctccgacatttctttgttacatctttgtgtccaacaaaacctgtggaaatctgtgttcatttttgtggtgagggatgggggtgaaaaaggggagacttgctctaattatgcatatacatttgactatgtaaaggtagttgtagactatatgtataaataacaagttaacacttaatattctaaattgttctaaggaacagtggcctgaagccatgactagttttgtggagctgctggctcttttaacagtagctgacctattggatttaaactgagactgaaattgacatttgtggttaggttatctagctgaggcttttaacaatggagcagataatgtctgttcctgtagtggatccatttaatttcctatttgagtactctcacttaacaagtattatctattctgaacctttgtgttgggaatttaaggactattgtcaaaggctattaatggtaaacaagtatatgcaaaacaattcacatatgggtaaaaatttcaaattgtgggtttttgtttttgctttttagtttcaaagattagttatgtagcagcaatatcataaccaaagcaagtaggaagttgactggtttggagaatcttcaagtagttttaaatactgtaatgtatcagattgttaaccaggatttttttttcctgtattactgctaaatatattactatattaatgcacttttgtatatataactgtcttctgtacattctgtacttactacagtgtatataaagcctgttttccctgaagctgtgagggaataacaatagttgtatcataagtcgtttctattttgagttccttcttgtacttgaaagtagttcagtagtgaaatctaaatgagtgtgtatggttgtaattaaaactggcaatgtggcagagctgtcttttgaaactgaataccagaatgaaaagtgttgttttggttaagaactcttataatatattatttcttttgatgtaccctgagttgttacacagcccactcactgctgcttactactttatacttctgagtcagctcctttcatgctctatcccagaatatttaccaacagaggagaactgctcccttttctgtttctcacagtttggttatggctttataaacttttatttggtgaaagccccagatacccaaatgtcattggcaaaacttatttttttttctggacagatcagatttctagagagagcagatttctagagagattagcattcatagtaagtgaaaattgtctaatttttttaatccatgctattactgggcagtaggtctaattttttttgacaaaaaatagatctattttccttatatattgatttagaatcttaagttagaattttatagaagaaatgtctgagcagttctatgtatggaggagcaattcagcttttcagcagcaactttatcttttgccactagagggagatctgtggttgctttctcctttggagaatagctgctttgcttttatttttaatttctaaggttggaatagaacttattctcaaaattcctttagtgttattaaatattttcatttattagtcaaaggtaagttaattaagcttgtttaatgatgccaatcttatgcttttctgtaatcttcaatttttaataaatgtgagttagatactaaaaaaaaaaaa

SEQ ID NO: 97862 - DNA, 586 bp, Homo sapiens
tgtgaccttggaatagccaacaatttcttggatatgacaccaaaagcacaccaatgaaacagtaagtaaaagagataaattgcacttcaccaaaattaaaaatatgtatgcttcaaagcaaatcatcaagtaaaaagacaatgcacggaatgggagaaaatatttgcaaattctggtaagggtctagtatttagagtatacgaagaactcttacaattcaacaataaaaagacaaataaccaaactaaaagttgggcaaacaattgatagacatttttccaaagatatacacttggataaacatctaaacctgagcttttaacactaaaaagcacatgaaaagatgttcaacgtcattagtcatcagggaaatgcaaatcaaaaccacaatgagataccactttacacccactaggatgactataatcaaaaagacataataacaagtgttggtgaggatgtagagaaactggaaccctcaagcattgctaaagcgattgtaaagtggtgcagccattttgaaatacaacctggcgttcttcaaaaggttaatatagagtcactataccacccagcaattccaatc

SEQ ID NO: 97863 - DNA, 477 bp, Homo sapiens
tgagatcacgccactgaactccagcctgggtgacagagcaagattccatctccaaaacaaaaaattctaacgctgtagttaacacaaactaaggcagcaaagcaggagaaaaggagacagaaaaaaaaaaaaagctaaactaaccaagatattttgtactctgtggcaagcaacgtagtaagcatgaagtaactatgtaaacatcatcaaatgagtactggctaggacattgttttgtaaatgctagaagtttgagaaccacactcaaagtatgcataaacatgggtccaaaaacaccaaaatacaaatctatgtgattctcccatctatccttcaaatctgagctcaagaattaccacttctataagtttctctcatacagagttaatcaagccttcttctttaactctttatcttgtatcacaccataccacacagtaaattatttaatgtctgtctatcctccaagaatatgag

SEQ ID NO: 97864 - DNA, 107 bp, Homo sapiens
gtgctgggattacaggcatgagccactgcgcctggcccatgggagccctttttgattaaggacacctgaccatccatccattagggcatcagaatgcctgctgattt

SEQ ID NO: 97865 - DNA, 393 bp, Homo sapiens
tggcaattatatgcctcagaaaaggtaacaattcactgcttcttaagactatggtagtttatggccaggcgcagcagctcacgcctgtaatcccaacacttaggaaggccaaggcgggcagattgcttgagcccaggagttcaagaccagactgggcagcatggtgaaatctagtctctaccaataacaaccaaacacgcaaaaaatccaaaaaacaaaactgataattttgagggttttttttttttgagcattgatttagaggtgaagtagagaaaccaatttgttttcttttttcttttttttttttgagacacggtctagctgtgtcactcaggctggagtgcagtggtgcagtctcggctcactgcaacctctggctcctgggttcag

SEQ ID NO: 97866 - DNA, 838 bp, Homo sapiens
agcggtggcaacctgttagggtctgcttttgtcctgtgggagctttccttgtttggttttcgtagtaaatcttactgctgctcagtgtttgtgtctgtgctgcgtttgtgagctgcaacgctcacggtaaaggtctacagcttcactcccgaagccagcgagactgtaaatccactgggaggggcaaagaactctggacgtgctgcatttttaggagctgtgacactcaccgcggaggtttgcagtttcactcctgaaatcagtgtagaccacgaacgcaccagaaggaacaaactccagacacaccgtttttaggtaaccgtaacatgtaccgcgagggtctgcggcttcattcttgaagacgagactaagaacccaccaacttctggacacaaaaccaccccaaaaagtgagtttctaaaggaggagctaaaaataaagaccacgaaagtgttgcccatggtgatagctccagacgtccggagacggtgttcagcgctgctgcaggagagactttatcttctattccgttggtctgcctatctagaaagcaaaatttcaaatactgagaccgatagatgaagatgctttcgcttcttccctgtttcatccagttggggactaagtgtccttcggtttggactgtgcagctcgggtcaccttctctgtggaacagcaagtgaagaaagaggcgcagagccctgtgttccaaaccctggagacaattgagaaagtgggaacccattattccccaagcccagccagcaaacctcaccgatgaaacagataagcacttcctgcaggtggggccgacactggccaggacacagccctctct

SEQ ID NO: 97867 - DNA, 526 bp, Homo sapiens
cacagtgtccctcgaacatgcggggatggccggccaaatcacccagcctgctttcacgagcgaccgctgagctgtgttgcggcagtccctcccagggccgctgggccaggcccagctgcggggtagaggagaggatggggagaggggcctgagatggggcagggaagtctgtgagctcagcccgggacctggggccaagcaccaggaggccagggggagtctccaggggctggggctggagccgcatcagagaggaaaggggtgtttgaaaaaggggcagggcctgggacccaggaaactgttcttccagagacacccgtgaagctgagctttgcctctcagggaagctgtgaccccacgggtgctgcccagagagatcgggccaggtggagccaagatggactggaattccccgacggggacaaggggccggacgaggctgacttgccctgtctgatgaatggtcaggtttgctttttctcctgaaaacacgaggcagtgatcccggccagctaattccagcaga

SEQ ID NO: 97868 - DNA, 581 bp, Homo sapiens
acatctctttcgtgagaagaaagagaggagggaagatgctctgtgatgctgccagtaatgctgaccagtcgtggtgctgtcacctccttggctgtctttgcaatctgttcccaactgaggtttccattgcagtgtaactgaccactccaggggccactgagggctgtcaggatgagctatccctccaccccaggctgtcactgccagcaagaagttgcagctgaaggatgtggtccatgagagatcccagggcatggaccagaggcagaaagaggatcttgtcagtaacctcaaaaactcggattaggtcctgaatttacatctctggtctttggtttaggtttgtaattaaaagatgaaagcacttggcttccttgcataagcgactttggttttgccatggctgtctacctgtgttggccaacatggcagccccgagtcacatgaggctcctgagcatagggaaccaggctcatctgaagcgagatgcactgcaagagtgaagtacccgctgcatctgggggacttaatgcatgcaaaagaacatgaaatacctcatccatatttttggtattgatgac

SEQ ID NO: 97869 - DNA, 690 bp, Homo sapiens
agacgggatggctccttgaccccgtgtccaggcgtcgatgataccctgctactgctggttggaatagtggggaaacatgactttttatatgacctaggacaataagagatttctaacctcctatttggcctcaacagagacaacactaaagatttcctgaagccaagctgatgacaggaaaataaaaaaatctcattagattataccaacacctgtcacagggaatcaaacccactcagcctatgattctcttcattcataacctaggaaccataactcagttttctacttcacaattccttcattctagttcattcaagttctaaacaaactgaccatctgcctttggtgagagaggaatcaacaactagtttgcaactaccactccccaaaaaagttttgttttttaaaaattctttcaaacttccataaatttccaagtggaataaaaattggccagacgcagtgactcacgcatgtaatcccaacacgttgggtggccaaggcggcagatcgcctgaggtcaggagcttgagaccaggctggccaacatggtgaaaccccgtctctactaaaaataccaaaattagcctggcatggtggcacgtgcctgtaatcccagctactcgggaggctgaggcaggagaatcgcttgaacctgggaggcagaggttgtagtgagcagagatc

SEQ ID NO: 97870 - DNA, 383 bp, Homo sapiens
ctctagaggatctgcaatggctgcgtgaccatctgcctttggtgagagaggaatcaacaactagtttgcaactaccactccccaaaaaagttttgttttttaaaaattctttcaaacttccataaatttccaagtggaataaaaattggccagacgcagtgactcacgcatgtaatcccaacacgttgggtggccaaggcggcagatcgcctgaggtcaggagcttgagaccaggctggccaacatggtgaaaccccgtctctactaaaaataccaaaattagcctggcatggtggcacgtgcctgtaatcccagctactcgggaggctgaggcaggagaatcgcttgaacctgggaggcagaggttgtagtgagcagagatc

SEQ ID NO: 97871 - DNA, 556 bp, Homo sapiens
acagcgacgggcgttgcccggcgggggatggactgcgcgccgccttccgaccagcagcgggccagtggtcgacgtaggcgggcggcgtggcggggcggaaaaccgtttccgggagagaccttccgtggtggacgtcgccccaggctcccacacttagaaaactaaagggaacgcctaacggagcgatggatctccgtgttcccagcaaagcagggagcacggagagtcaaagctaacatagagcccaaccgacgcttaaaggaggtgttttgggttttgttttttttttttctatttgcgtacggtctattttgtcgtttttttggtttggtttggtttttttctttgttttccgctttggctgaggtgacttagtaaaggagaaaaagggcagtccgctacaccatttcgtaagacgaaaataaccctatgagaattcactccaaaaataggcatctttcatctctcctcaaatggctaatcggtggtttggcagagtgtgtccattagattctgaaactagtttgaatactgacagtgcagaattcaagaaatt

SEQ ID NO: 97872 - DNA, 285 bp, Homo sapiens
tatgtgtgagggggcgggtgtggggtgagaagacgctgagacgctgaaatagtcacactgaaggtgggcgctgattatctgccacatccaggcatatgtcctatctttttaagattttttgaaataattatagatgcccaggaaattgccaaagtcctgcagagaggtccctgtgcccttccccagcttcccttacagcagcatcctatataatgataacattaaaaccacaaagctgacgttggtgtaatactaccaactagaccagacctcattcagatttta

SEQ ID NO: 97873 - DNA, 606 bp, Homo sapiens
  misc_feature (479)..(479): n is a, c, g, or t
  misc_feature (489)..(489): n is a, c, g, or t
  misc_feature (492)..(493): n is a, c, g, or t
  misc_feature (501)..(501): n is a, c, g, or t
  misc_feature (503)..(504): n is a, c, g, or t
  misc_feature (507)..(507): n is a, c, g, or t
  misc_feature (511)..(511): n is a, c, g, or t
  misc_feature (522)..(522): n is a, c, g, or t
  misc_feature (526)..(527): n is a, c, g, or t
  misc_feature (534)..(534): n is a, c, g, or t
  misc_feature (544)..(545): n is a, c, g, or t
  misc_feature (547)..(547): n is a, c, g, or t
  misc_feature (552)..(552): n is a, c, g, or t
  misc_feature (560)..(560): n is a, c, g, or t
  misc_feature (569)..(569): n is a, c, g, or t
ggtctgcaagaacatagaatcgttacgtgattttttgcagaaaaggctcgtgggtgtcctgagtgcctaggaagctgcacaccccttttcctgaaggcctgaaggtgagcagggatggggtcagagggagccctcacctcccctgaggtctgctgttcccatggggaatcccctgcccagcctccacagggtacccacagaagtccctttgtgaagagctattgatacacttggggctcgctaataaccatctaatccgggccccgtgtgatcttggacaagctaaccgacctctccagcctcaggacaatgggaatcaccagacttcccaggcctttggtgaggatgaaataaaataatgtcgaccacacattgggtatatagcaagtgctcaataaatggctgcttctatcgtggccacaaccaccatcacccaaccactgtccctactgacagcagcagtcaggtacatagttagntgaacccaanagnnaaactctngnnacnaganatttcttccancacnntacatantgaggtatanntnacatnataagtgnttccttctnacgatcgagcacatacggtaccgagctcgatctatct

SEQ ID NO: 97874 - DNA, 514 bp, Homo sapiens
agagggttgatgtgaggatttaatataatgaatgagctgtttaatagtttaggttcagattaggagctaaggcggtcctatccttccagctattttaggctgtcccattattcctactattaattgcacagagccctccattcctttgattcccactccaggtctcacatctttactcctccataatctgccttctccactcaacacaatggctttttggccctgctagagaaggttccaatgtggaacctgattggtgcctccagaaatattatctctacaatacatggtggggatcagtgccaatggaaagtgcttttacagtctttggacactgttcttttcattcctgttttctttggcaactatttcaaacatttatagccaatcttcaaaagctctaattactatatgaatcacacttggcagaggacatcattattgggaaaattctactgattagggaggaatttacctatcactttacatttaaattcacgtttttatttcaggg

SEQ ID NO: 97875 - DNA, 530 bp, Homo sapiens
gcttgcattgaaaggaagtctttctaaggagaaggcttggtaactgagcagtcagcctatgtaagtggaagttgaggtacaggtggaaggtttatgaccaaaggttagaatatttcaacccaaagccttcctggttgccttgatcgtctaatacgtcattccttaaaaacaattttttttcttcctactctgccaggcactttgccaagtttggggaatgcaaaggcttaattagacccctcacctttccccaggtattgcccgcagtcaagggggagagccttggccctgcttgctagttagaatgtaccttctacaggttcagtaaggcatacctggaagtctgagtctccatgctcctttctattttgactcctgtctgccatgtccacgtttatgaaggggttaaaatgaaaaatcaaaattccccttagcccaaagtgtgtgtgtttaattcccaactaataaggtttggctctgtgtcatcaccaaattccagtggaattgtaatccccagtgttggagatgaa

SEQ ID NO: 97876 - DNA, 591 bp, Homo sapiens
agcgtgggagataaacaaataagcaggccctgacaatctagcagaacgaaagccatgtgagatcgtgccttggtagctttgggggcttcggggaagtgcactatgccaacatgtatcctgcagtatggaaattccacccgtggagacaggaagccctcttaagaagtcttccgtttaaaataaggtcttaccttggcttctcccagaaagggcagtctgagccgacggcctgtgtgtcagtggtttattttgataagccatcctaggggtctggtgtgagggaatcaagaagaaccaaacaagggctgggcttggtggctcacgcctgtaatcccatcactttgggaggctgaggtgggtggatcgcctgaggtcaggagttcaagaccagcctggccaacatggtgaaactccatctctactattaataaaaatataaaaactatccgggcatagtggtgcatgcctgtaatcccagctatttgggaggctgaggcacaagaatcacttgaacttgggaggcagaggttgcagtgagctcagattgctccactgcactccagcctgggcaacagggcaagagtccatctc

SEQ ID NO: 97877 - DNA, 700 bp, Homo sapiens
tctagaagtcgaccgggcatggtggctatgcctataatcccagcattttgggatgccaaggcgggtggatcacctgaggtcaggagttcaagaccagcctggccaacatggcgaaaccccgtctctaatacaaatacaaaaattagccaagcatggtggccactgtactccagcctgggcgacagagcaagactccgtctcaaaaaaaaaaagaaaaaaaagagaaagaaagtatcatgcttttctgcattctgtgaattgttttagtgagttattgaacttgagggcatggtgggaacctccaaatttgcagccagttggtgagaagtacatgtggtctgaggacacccaagcctgcaggtgtgtctaaagcgagggcagcctagtgggggtctggtggccttaacctgtggcatttgaggtaacatcagggagttgacatcagaattgcatcacataggctgggcgcggtggctcacgcctgtaatcctagcactttgggaggccaaggcgggcagatcacgaggtcaggagatcgagaccatcctggctaacacagtgaaaccccgtctctactaaaaatacaaaaaattagccaggcatggtggcgggcgcctgtagtcccagctactcgggaggctgaggcaggagaatggcgtgaacccaggaggcggagcttgcattgagccaagatcacgcc

SEQ ID NO: 97878 - DNA, 558 bp, Homo sapiens
actttagaggatcccctcacggcacgtccagcctgggcgacagagcaagactccgtctcaaaaaaaaaaagaaaaaaaagagaaagaaagtatcatgcttttctgcattctgtgaattgttttagtgagttattgaacttgagggcatggtgggaacctccaaatttgcagccagttggtgagaagtacatgtggtctgaggacacccaagcctgcaggtgtgtctaaagcgagggcagcctagtgggggtctggtggccttaacctgtggcatttgaggtaacatcagggagttgacatcagaattgcatcacataggctgggcgcggtggctcacgcctgtaatcctagcactttgggaggccaaggcgggcagatcacgaggtcaggagatcgagaccatcctggctaacacagtgaaaccccgtctctactaaaaatacaaaaaattagccaggcatggtggcgggcgcctgtagtcccagctactcgggaggctgaggcaggagaatggcgtgaacccaggaggcggagcttgcattgagccaagatcacgcc

SEQ ID NO: 97879 - DNA, 482 bp, Homo sapiens
cgcaagtgaagaaatatatacatatatatgtatatatctatatctcaaaatctgagagctcagggaggccgtggaaatttggggaagaagaaacagactccctgagcagagctcagggcagcagctccaggcatgcctgctgagcccatcaggccaccgccacctgcaggaagagcctctggcctgaactgctggggatgggctgcagaaagcctgagacatttgggccagcaccttcccaggggcacaggcccccaaggcggggacaccacctctgctctgcaggcctgcctccagggctctgaggagaagccgacttcacggccgcggtgccagtgagggctgcatagccagggccttgtctgtagtctgggcggcccgtggcgctgcccttcagcccaactactcattgccgctgcgtctttggcgaggctttcatttccaacctttcttccatctcagcccttttgttggcccgggtc

SEQ ID NO: 97880 - DNA, 221 bp, Homo sapiens
gttttgccttttgctaaactttatgatgcgcattcttcattgattaagattatcgtctggtttctctcttctaagtctatttctgatgttgaaccatccttttattcgtcatataaattctacttaatcctgatatgtcattattttaaaaatacatgattggattcacttgaacccgggaggcagaggttgcagtgagccaagattcataccactgcact

SEQ ID NO: 97881 - DNA, 563 bp, Homo sapiens
acatctgtcctcctcaggatgcagataatactcatgtaaattatggagcacaatgtaagacaaaaggagacactttacatatgtattgttgatacagaaattatcagggcatgaatgagctgatgtgacattatgccacttctttcttttggttctcccttattaacttggcatttttaatttgaccatagagccaaattagttctccatgctttcttcgtagaaaatccttttttttcccataatgttttcatgccctgagaatcagaaaaatactacagaatagaaaaagatttacagtcattggaagatttgtgttttgcaaacagtgttaagtgatattgctagatggtgatatttttttcagcctaaaactctgttgaaatctgtgatcaaaatgttttaaactatccaaaaaaaatttgtatatttgggaaaaatggatttttacatagcttttgtatgcagatataaaactgtaattatgaatatagtgggcgtagataaactcataagcttaaattctaaaaaagaaaaagcttataacagatatattttcctgt

SEQ ID NO: 97882 - DNA, 552 bp, Homo sapiens
acatctgtcctcctcaggatgcagataatactcatgtaaattatggagcacaatgtaagacaaaaggagacactttacatatgtattgttgatacagaaattatcagggcatgaatgagctgatgtgacattatgccacttctttcttttggttctcccttattaacttggcatttttaatttgaccatagagccaaattagttctccatgctttcttcgtagaaaatccttttttttcccataatgttttcatgccctgagattctgacacttccttccccatccccaccccagtgctggtcaatgtggcatttgtccagcttgtcagtagcttgcccctcagtgtaaatggtgtcttttttatcagcaagtggctttgtccgaattggtgcccactgtctttttatcgtgccgggacatagaatgatgaagggttcccctggtgttgtacgtttttaatttatttaaaactttttttagatcctatggttgtagtggttgtagataatatcatagccattgtgtctactaaagaaaaagcttataacaaa

SEQ ID NO: 97883 - DNA, 459 bp, Homo sapiens
gttttattacttagagttaccttcagtgaattatggaatgaaggatcctaatcattggaggaacccattgaaaggccctataataagttgatgctcagatgtgggttgccaaaaaaaaaagcagcagcttttataggtatttctggctcagtaatgctttgcttaattagtaacctttgactgtagagtgagcaaaacatctctttgagcatttttatggtgcaccataaaagggagaatgcaaatgttatatgttttcatttgccactcctgtttgtctgctcagttacctctgtaaacccctgccattcgcagccatttgctgtgctctaatagccaaaataacgtctagtcttctcaaaagcctgccctgagcagagttttccataatgaagatgctagtggtaacactttaggtacagctaaaactgttttcattctgaaaatggaaagcaaaaa

SEQ ID NO: 97884 - DNA, 304 bp, Homo sapiens
ttaaacaagatgacttatgtaaagctcttaatatagttcaaggcatataatgggctctaggaattagttattgttattaataaggtatggaataaaaggggttggtttagagaaagaaaattggtaaaaacaaaaataagataaaaacacagaatgtaacatgatagaaatataacagagcccctcagtcaggttgggcttcttatttagacctaagggtttacactgtgttagggactctgccactgagtgacagggaatattctcactctttgaacataccccatccatctgtggtagcctg

SEQ ID NO: 97885 - DNA, 160 bp, Homo sapiens
tagagagttcttccttctctccatgtgccccatcccaatcacaactttcttcctccctctaaaagtagccaccattctgactgttaggaagaaaccctcgacattctttgtcttcatcaccgagctgcccctcaactatggttgagtcttacccattgtt

SEQ ID NO: 97886 - DNA, 404 bp, Homo sapiens
aaccgattatacttgttagagggggaaccccctgggggctttgcacgagaggaaaaagctctcttactgtctcatctgggcgagacctctcctgttgttggagcaggcgtttttatcctgctctgtaaatagggaagtgtgacccctgctcccctagtataacttgcgagttgacagcagagttagaatccagatcgcccctcttttgggctgggcagggttgcagcctctttttgaccttgtctgacgagggagaaaggaaggacgtcacttggaactgtcttatgttcatttggctgtttatcgtctttcacagccacctttgagttaattattagagaccaatctggaaggatttcttcgtatcaaccatagtactagaaattgttttgtgggtgtatgaa

SEQ ID NO: 97887 - DNA, 199 bp, Homo sapiens
ggctctttttttacaatttacattttgctcttgagattgcctatttggtttgttattaaggccatattttattttaattcttttaacatctttataaaggttgctttaaagttttgtctactaagtccaaaatctagactatcttgtttcagtttctattgacagattctttttttttttttttttttttttgccctat

SEQ ID NO: 97888 - DNA, 210 bp, Homo sapiens
gggaaatgtgtgctcatctcttttccctgtttcctttatttttatactattgagtttcgagagttctttctatattccagaaactaggtccattgtcaggtgtgtgacttgcaaatattttctcctagtctatatttatctttacatcttcacatggtcttttgcagagaaaggttttgtttgtttgtttttgtgagaccagtctggctc

SEQ ID NO: 97889 - DNA, 580 bp, Homo sapiens
attttcggtttgccaacgacaacagggtaccggcaaaagcactgctgagttgattacaccactctgcggctcaggtccacccagaaacccgctgttttgcataacatgaggtaccagatgaacttcaatcgcgaggggactatgcaactctctgaatgccctccccgcagccgggctattcccagaatggtcctgctctgccctttggtaatcacgacccagaaggtgaatggagaagccaacaaacaatcagtggcaaactgtcctgagagttatttctagggcatcaagttcttcaaggatgttcccatctcgttttggtttttatctgttccttactgcctcctttttgagaatattattacaacaagaaaaaagtaaagggtattcttatttcaaagccatctggaaacctaactcacagcaatagtcttagactcatttcggttctctcattcttgagagttgttttttctccttgttggaattatgtggcacctttccctacataaactgaaagtctgaatcagtcagtctctttctctctctctctttccctctctctctctctctctctctc

SEQ ID NO: 97890 - DNA, 172 bp, Homo sapiens
tcaaagtcagcttcttgacctgcagggcttcaatttgtggctgacagttttaactcagaaaatccctgacttgattggctacataaattatatgttatatagccattaagatcatggttttggaaagtattttaatgatacaggaatgtgctctgaaataataagtgagagt

SEQ ID NO: 97891 - DNA, 131 bp, Homo sapiens
ctgagcttaagttttctcatctgtgaaatagggaaaataatagtgtccacctcctagggttatcaagactgtaactcattataaatgagttatgtttcttcaatgagtcattcaaagcacgaagccctgtg

SEQ ID NO: 97892 - DNA, 746 bp, Homo sapiens
attagggagttccaaagtagatttttgcagctaaattctttggccatgcagggtgagcagctgttgcccagacactatcctcaaaggtaaagctcccaacgccacggtctgcagagcacttgctcctcccaggctggcctcagttagccatcgtcggggaagcccgtgggaccacatcctgcagtcccagcttgcaggacctatagagccacttcaaacattatttccaagagagaccccattgacctcttctgttattattcagacatatgttaagctctgcagcaggactggctagatcatatgcagtgcccagtgaaaataaaaattcagggcttcttgttcaaaaagtattaagaatttcaaaactcaccagtggggcattagcccagcatgggcctggtgcaactgatgccacatgccatgaagcagtcctgctttgcagtctgaatcatgcgtatgatctgagctggggttctttctctccgtccctctctctgctcaggttctaccatactcttctacacaggaagccaggctgaggtcaagagtcattgtgttctgtacacaatgcatacatgatggattatttaccaggtgagggcctctttatttgtacctcatgatataatccctaaaagctgctattcatgaaaggaagtgtgctattcctgactgaagaatacgaaaatgtcctccagcctaagattcaaatattgttgaatgtctttgagatcctcagccag

SEQ ID NO: 97893 - DNA, 879 bp, Homo sapiens
ccttgtatgtcgtttttattaagggaaatttgatttttcccaacaggcctcaatgggctctaaatgatcccttcctagattctacaaaaagaatgtttccaaccttctgaatcaaaacaaagtttaactctgtgaaaggaatctgcacatagcaaagcattttcacacattgcttgtttctagttttaatggcaggatattcggtttttcacaatataccttaatgggcttcgaactgtccctttatagattttacaaaaggaatgttttctaactgctggatcaagacaaaggtttaactctgtgaaatgaatccgcacatctaaaagcatttccacagtttgcctgtttctagtttttatcgtggcatattcagattttcactataggcctcaatgtgctttgatacgtcccttcttagattttactcaatgagtgttttctacctactgaattaaaagaaaggtttaacactgtgagatgaatccacacattgcaaagaatttccacaggtagcatctttctaatttttatcgcaaatattcatttttttcacaataggcctcaatgggctctgaagtgtcccttcatagataccacaagaagcttgtttccaacctgctgaatcaaaacaaatgtttaactctgtgagataaatgcatgcatcataaagtattttcaaatataactagtttttagtttttatcatgggatattcagtttctcactataggctgcaatgggctaagaaatgtccctttgtagatactgcaaaaaagtgttaccaccctgctgaatcaaaacaagggtttaactctgtgaaataaatgaacacatcacaaagcattttcacagatagcttttttctaatttttatcg

SEQ ID NO: 97894 - DNA, 244 bp, Homo sapiens
atactaaatagagtgttttaatacatacttgacaggattaagtttatatattttgacactaaaaccacagtaatttttttataaccatggaaacattttttaatggctcatttgagagattggaaagaaaaccttaccaattcaccctaacttcatcagtggttacatttcaggttatgagtcactctaatctctttatgtacaccccaaaattttacagttaatattacttctacttacagat

SEQ ID NO: 97895 - DNA, 500 bp, Homo sapiens
caacatggtgtagtgaaaagaaagcaggctttggaatggatagaactatacttgaatctctgctctatcaccttatcatgttatgtcaagcaagttacggaacctccatcatttgtcagggacctgaagatatattttaaaagaatgcgaaatgcagtatttgcttataagaaaataaagtcggccagtcgcagtggctcacgctggtaatcccagcactttgggaggcctaggccagcggatcacctgagatggggagttcgagaccagcctgaccaacatggagaagccccatttcaactaaaaatacaaaattatcttggggtggtggcgcatgcttgtaatcccagctactcagggggctgaggcaggagaattgcctcaaccctggaggcggaggttgtggtgagccgaaatcatgccactgcactccagcctgggcaacaagagcgaaactccatgtcaaaaataaataattaagagatataaattaacccgga

SEQ ID NO: 97896 - DNA, 493 bp, Homo sapiens
agtggacaagaaagcccaatagaaaattttctaaacccccatgaagctagaaaacatggattagtatgagatgagaaaaccaagactaagagaggacaggagtatctcttctctacacaaagccacttgagcccatttgaaatgtaacttttgccatggaagaattctaccaacacttttgtcgtcatttaaactacccactaaataccttttctattttttatactattttttgttactgtgtgtgtgtgtgttttatttacttttcttaatatcataacaaaacaaaattaaacaaaaaaattgggttttaccagtgttgccatccaaaatatagaatacccagtttaacttgaatttcacgtaaacaaaattatttaactggatatctcatcttttgtttgccaatctagcaaacttagtttttgcaatcagtaatgtgttggttcctaatgctgctataataaattactataaacgttgtgtcttaaaa

SEQ ID NO: 97897 - DNA, 606 bp, Homo sapiens
  misc_feature (3)..(4): n is a, c, g, or t
  misc_feature (261)..(261): n is a, c, g, or t
  misc_feature (333)..(335): n is a, c, g, or t
atnnagcactttgggaggccgaggctggcagatcacaaggtcaggagatcgagaccatcctgactaacatggtgaaaccctgtctctaccaaaaatacaaaaaattagccgggagtggtggtgggcgcctgtagcccagctactcgggaggctgagccaggagaatggcatgaacccgggaggcagagcttgcagtgagccgagatctgccactgcactccagcctggcgacagagcgagactccgcctcaaaaaaaaganaaaaaatgaatgagtactccaaaaatagtcaaatcacagaacataaaggactagtttcctgactagattaannnaggctgcagtattaaacacagaattaactattagaagagaaggtggagtgccttttattcgtattttctcagagatctatagcaagcagtttgagcttacaaaagattttaactttgttttaggtcaaatttttgtaatttactcaagagaatttttaaagctagctacaacactatgatgcgtctttttcttttaattttatctttccatcacctatttaaaataaaagatctccaaaatctttttttaatgtaggagtccaatttaaag

SEQ ID NO: 97898 - DNA, 484 bp, Homo sapiens
ggttttagatttcaggatttattagattttagaaaggtaatatgggccatgattctcatggtactccagtggggcctgcagcaacacctcagtatcaaacacaatattgctgcagtgaaatgtatggatattcacactaaataagattttttttttaaagatgataaataacctcacatccattcaggacaagtttaagaactgagtacgttaataaataaggtccagttttcagtttggggatgtctgagttgttgataaggtcctgtgaaccagaatgtcttagtctctctggctgctatcacacaattccttagactgcataatttataagtaatagaaactcatttctcatagttctgtagtctgggaagtccaagctcaaggcactggcagattcggtgtctgctaagggcttgttctgtgctccgtagatggtaccttgtggctacatcctcacgtgggggaaggggaagacagctct

SEQ ID NO: 97899 - DNA, 216 bp, Homo sapiens
ccccgtttctactaaaaatacaaagaattagccaggagtggtggtgcattcttgtaatcccagctacttgggaaactgaggcaggagaatcgcttgaacacaggaggtggtggctgcagtgagccaagatcatttcagagaatgaaaagtaacgtgaaagccatgagccgggggctgtgtggctctgagagactggctgggaaggggctacagggg

SEQ ID NO: 97900 - DNA, 339 bp, Homo sapiens
agaataaagagaaactgcaacctaaggtagtactgaaacaaactggaatctaacttaggagtctaacttatgtaaaaaaaaaaaaacaggtctcagccaatcataagcagcagtgctttagccaatcacagacagccaactcatcagaccatatccaaataaggcaaacaccttgctgtaacaaatcagatgtgttctctacttggcttccatgttcagcctatggaagctcacttctcatgctcctgggtggagctctttgaacctcttctgattctgagtgctgcctggttcatgaatcattttttgctcaaataaattctgttaagtttaatttgt

SEQ ID NO: 97901 - DNA, 621 bp, Homo sapiens
accactatactccagcctgggtgacagagtgagactccgtctcaaacaaaacaaaacaaaccatgaaaataaaacaacaataacaaaaacaactaaagagcagaaaatgctaaaatcttaggtattagaatgtcctgaaaatgttttatcatgcctgtatgtgtttagcacttcaagagttcagaaaataaaattaaagagccatgctcagatgaacttggttacttttgctctctaagatgagacaaagaggcgtgccagtgaattgcctctgtgctcgttttaaaaatgcagtgttctaggcctaatattcatagattcccatctatcagttttgtgttagagtctaaaaatacatatttttgacaacttcctaggtgattctaatgctgttggtctatgaaccaactggaacaagggtaaatagaagcgaaatggcaacttttcatttcctgttactaatagcattgtttgcaatattggcagaaaaaaaagtactcctttgggcagtatgcttttagagattaacagaagcactgcaccagctgaacaaatttagatcctgacttcagcacagtctggggcatagttaacaaaataattgtgatgcctatactatca

SEQ ID NO: 97902 - DNA, 617 bp, Homo sapiens
agcggattctgaggtactggcgttaggacttcgacacagaaattttgggaggacacaattcagcccataacagagcccatgctggaagacagtccctgaaacactgagtggacatcatggataatactcttttgatggatggcttctctatctgctcctgaaatatcagtgttccttaggaacccatctgtggcctataacctgtctcaccctacaacacccctgggctataaattcaacaactttctatataaaggtgcccattatttttggcttcacttttacaacatcctccaggctggacccctttcaattcactccaagagaactttgaagatcctggcacttacagtctatctgctgcttaaagtctgcagtgactctccattgcctacagggtttttgttctttaagctacgactcctcagcctgacctttgaagacttgttctcaagtgcctgcctccctgtccagcctcgtttgcctcagtctgtaaaatccatgaggacagggcccaggtgtgtttcagctcacacgcctcacatggtggactcggaactgcccctctctgagctggagaaggaggcccacgagagcacaccggagatatccgagag

SEQ ID NO: 97903 - DNA, 441 bp, Homo sapiens
catgcatggtcccggtgctatgctctggagttactgccgacagtgagttccgttttcgtccgcacgcagcactcccaccctaatttcatcctccccctccctccacacatatggagatccactttatttcattgtgttttatattcttctctatgtatactcactgcttcccttcaccaaattataaatgctgtaaagcaggggtgtctaatcttggcttccctgggccacattggaagaattgtgaattagtaaaattcactaacacgaatgatagctgatgagctaaaaaaaaaaaaaaaaaaaaatcacaaaagaaatctcgtaatgttttaagaaagctcttgaatttgtgttgggccacattcaaagccatcctgggctgcatgtggcctgcgggcggcaggtggacaagcttgctgtaaagggtacagagtgtgt

SEQ ID NO: 97904 - DNA, 492 bp, Homo sapiens
cgggtgacagttaactcccgcgctgggcaggggacgtgtgggcacggtgccgggtgacagttaactcccgcgctgggcaggggacgtgtgggcacggtgccgggtgacagttaactcccgcgctgggcaggggacgtgtgggcacggtgccgggtgacagttaactcccgcgctgggcaggggacgtgtgggcacggtgccgggtgacagttaactcccgcgctgggcaggggacgtgtgggcatggtgccgggtgacagttaactcccgcgctgggcaggggacgtgtgggcacggtgccgggtgacagttaactcccgcgctgggcaggggacgtgtgggcacggtgccgggtgacagttaactcccgcgctgggcaggggacgtgtgggcacggtgccgggtgacagttaactcccgcgctgggcaggggacgtgtgggcacggtgccgggtgacagttaactcccgcgctgggcaggggacgtgtggg

SEQ ID NO: 97905 - DNA, 675 bp, Homo sapiens
tgagcggtagcaaggtttattgtgaagagcaaaagaacaaagcttccacagtgtggaaggggacctgagcgggttgttgctgctggctggagtggccagcttttatccccttattggcccctcccacgttctgtttctttcctatccgagtgcacttttttcagttctccctgtgattggctacttttaggatcctgctgattggtgcattttacagagcgctgattggtgcattttatagagcgctgattggtgcattttacagagtgctggttggtgcattttagaatcttcttgctagctacagagcactgattggtgtgtttttacagagtgctgattggtgcattttacaatcctctcgtaagacagaaaagttctccaagtctgcagtcaacccaggaagtccagctggcttcacctctcaatctccccccacccccgtctaaacaggacaccccagctgctgttgggaattgggtgatgaccgctctagttacttcttgctggataggggcgaagaaggggccctgcagttgtagtgtcctctggaggtgaattctctaggccagtcaaagggccagtgggttggtccaggggtcctcagtagaagttgtgagttgagctcatttggggtgccatttgtaagaccatctgtagcttgatggcctcgat

SEQ ID NO: 97906 - DNA, 301 bp, Homo sapiens
ttgctaacacgctgctggtacttcccaagtatttgaaacttctgggagaaaattcacgtggatgcaactgagctttatgcagcagggctgcagtagtgtggccacggcagtagaaacgagtgttgagctgtgtcccaggaaggagacttggtgccttgtttgtttaccagttttaggaaacagtgacaaagattggccaatactactgtgaagcttgcttgcttcttttcgacttttaattcatattgtgaaaaatacatggaaacatattctctgtctgtggaagcctctgaaagagcat

SEQ ID NO: 97907 - DNA, 771 bp, Homo sapiens
acgtaagtaaaacttggcttgcttgcatttgaattttatgtggtcacagcagatgctactcagtggtaaaattatacaccacagagagggcagaaactcagaagcagatgtgctagggcttagggaggtttgtttctgtttgggtaactaaaaacaaatcacataatggtattagaaatgcctttaaggcagaagtaaaacaggtgaataaaaatcactcttaaaggagcccttattttcaaaagtaacgctttctttagggcttaagttacatatatggaagaatagtctaacagttggtgaaagaggtatgtgataaatcactaggcgatgcaaaagagtgactccctttttcttttaaaaatgatgtctgcatgtatatttgcatatgctagtaagtgcatagaaaatgattgcagaaacagataccaaacgtagtggcactggagggagaggtaacaggaggctgttcctttttccttgatatgcatttgtattgttttgattttctgcactccagcctgggcaacagagtgagactatgtctccaaaaaaataaaacaaaaaaacagaggattcgggtgtacactggcgctgatgatcctttaaccctgtaatatttactactagttgcgcaacatggaattgacacagactaggcacaacaaattctgcctaccttatctcacctcacctctgggcccaagtccatgaagattccacaatattgcaacaacaacgaacaaatgtccatgttgaaatacttctaca

SEQ ID NO: 97908 - DNA, 480 bp, Homo sapiens
tgcctcagcctcctgggtagcgtggattacaggcatgcgccaccatgcccagctaatttttgaatttttagtagagacagggtttcaccatgttggccaggctgatctcagactcctgacctcaggtgatccacccacctcggcctcccaaagtgctgggattacatgcatgagccaccacaccgggccaattatcttttagccatccctactctctggtcagtctcattttaaaagcagataattgatttatcagtattcgctacagaaagtagttgaccacatttgactttgcagacatttcagaagatgtggtggtggttagaattttctgcatcccacatatttttaaaatctgcaatttagagagaactttatccagtccagccctaggggtagatagatgcatcctactggcccaactcattgcaaggccatggaaataggaactgacagtgttgccccagaaagctggagaag

SEQ ID NO: 97909 - DNA, 312 bp, Homo sapiens
catttccccactatcccccgtccccccaaagctaatattctaacctgtttattatatttattcactgttggtcttatgtttgaacaaaatgattttgtttatctccaaaaagcaataaggcgtcaggaccatgtattctgttatagaggcacatagctacttgttttcaggggtgctttgccattaaaaccatggcaacattttcaaagtgacttattgatcaatgtttcccctgagcacaggccaattacaatatcactaattaaatgtctctcaaacacctttaacaggaaaaattctttgtaagagaaa

SEQ ID NO: 97910 - DNA, 356 bp, Homo sapiens
gaaaaaaataaataaaagaatggctactctacaggcaaagcagtagtttatccctctgtacagagtgtgggctgtggtgatccaaaggcctctcccctgcatgggtgctgggacccctgtgtagcacacaggaggtgccgagggagctccttgtgttaagagatggacctgatttgggctcacctgggtcatcttacactgggccctggaatccgggccttgcctacctacagccggggggtggagctcccccaggtatggccccagcacctgggcctgccaccagaaaccttcaatttggagatctttctgccaagaacccttcagaggagggggccggcctggccaggcacatg

SEQ ID NO: 97911 - DNA, 509 bp, Homo sapiens
gaaccagcagcagcatccattaatttgattagttgtttatgggctggaagagaagcctggcacctagccctaagcaaatcaattgtgtgaggtctaagcataagtatccatccaagccagccttgccagccaggattctacacagagtgacaacagtggagggagggcaaaacgttagacaagaagtgtcttacggcccctctttctgcctgcttggcattttaccatcagttacctcttatctaaaggcagtgagtgtaagctgtttttctactccaccctactccggccccataccctgttgtcctttctgaaggacagagtagagggatttctgtgggtggttgttttttttttttgtttgttttgttttggttttttttttaaacctaaggacttaaatatgtatcatcatccaagcctgaaaacaaataaatctgggacattgaaggaaaacagggagcaagagcccaggggcccaattccactgcaggttcctctgtttttta

SEQ ID NO: 97912 - DNA, 619 bp, Homo sapiens
ttctcctgtcaacactcttctggaacaaatatttttaatgtgtgactaatatttaatagtattaagttgtattaaaatgtaattctgtatttttgaaaaataccgatattctaattaggacaattcagctttttgagaaagcagataaaactgaataaatgaaatatttaatgatttttgcctcaatccaaaatgccataacattgtgagtaaatttttttttcttggaaaatcgctcagaacatggcctcaggtatatgcgccaagctgaacggcagaggtctgttctgaacaacggcccttgtagggtgaccgtatttcatttggcaaagtataccagtaaaactgaagccagccgatggaagcctcctgcctgcaggcttaccaagcctggctccccatggaaaccagagagaagatgtttgttgcagggaaagtaagttctccgtgtgaacccacaataacaatacactctttaagggtttgtccaggttgcgatgaaatttgacaagcatctttcctgcaaaatgttactaactcagaagtcacaagatcacagtattctgttgattgcccttgcaacagtcaaaataaatatagccatgaatcttcccattaa

SEQ ID NO: 97913 - DNA, 441 bp, Homo sapiens
gaaaaaaattcacatataaatggatacgtggactcaaacccgtgttgaaccagttcatacctacgttgttcagggtccactgtagttgcgttttcttttatgtgcatgaagtaatcctagaagaataaaactggttatccaggaagggtgcagagaggaggagatgctagaaactgagcaaatggggcacagagatgggagcaagctctctctacatgtgtgtctgtgtactgtatgtacatatattatatattgtatatatatgctgtatacataatttcatccacatatacattataaattaatattaataaaacattaatatttattaatgtcataatcaatatagtattatatatttctatttatattatatacttgtataattatatattattataatgttataattaatacattaaaattgcacattaattaata

SEQ ID NO: 97914 - DNA, 451 bp, Homo sapiens
ctcctgatagtccctaaagaccacacacatggtctgcttccttatgaaaggctccactgccaatcactgcagtgatactgatgacaaaggatggcaacaataacaaagctaggcaagcttcaagggctccagaatcttactcaggtatctcagccacgagcccgggtctagggggactgaaagggactttggccactgccattattcttgagagtggagctctccacccagtgcctgaaagtaaaggagatgcgggttcagcccattctccactttgtaggcgtgaagatgcagcagaggcagaagaacagctgctgccctcagggacaagtgtgcaatttctacctaagaggcctctaggctgcgtgatgtgcatttcacaggttctcggcctctacctcttgatgttcctcacaatgtccactaaaaactgtgtttctaattaaaaata

SEQ ID NO: 97915 - DNA, 603 bp, Homo sapiens
agtgagcctagatcacaccactgcactccagcctgggagagaaagactccgtctcaaaaaaaaaagtaattatatttcccaacataaatgaatagagccattaaggaaaataacatggagattcatcagaaattaaaaatagaattactgtatgttccagcaatcccacctgtgggtgtatagctaaaggaattgaaatcagcatactgaagagataactgcactaccatattcactgcagcagtatccataatagctaagatatgaaagcaacctaggaggccagcattagatgaatggataaagaaaatgtgatatatatacacatacacacacagacatgcacacacataaaggaatactatttactctttattttatttattttattttgagatgtagtttcactcttgttgtccaggctggagtgcaatggtgtgatcatggctcaccgcaacctccacctcccgggttcaagtgattcttctacctcatcctccccagtagctgggattacaggcatgcaccacctagcctgactaattttgtacttttagtagagacgggttttctccatgttggtcaggctggtctcgaactccc

SEQ ID NO: 97916 - DNA, 387 bp, Homo sapiens
ccacacttccagatggtcccttgaataaagcaagctatagacaaagggctctgtcatatggtatccagctcctgtgggcatctatgccatctgggaaatgatctatagtgatgtgggagatagtatgacatagaaacatgggatttagaacaatacagaaggaatccaaattcttgcttcaccatagttgagctgtgtgctttaagtaagtcacctgtaaagtagggataatgctaatcatgaccgcctatggttgttgtaaagaaaaaaatgagataacaaattaaaattcctagcacagtgcctgttatacagtaagcactcaatagagtttaaccattactcttatttctgcttctgtactcaagaaagtacattgagaagact

SEQ ID NO: 97917 - DNA, 233 bp, Homo sapiens
accagcgcacctggccgcatatgtgtatttttaagaatgtaatagtgttttatgaaattggaatcatactctatatattgtttataagcttttaaaaactttagtaatgtcttatataatgcaaacatttccatgtctttaaatattttgctgctgattttttgtacttagtgttccttagtatgggtatagtttaaccagtcactttgctattgttggacccttagattgtt

SEQ ID NO: 97918 - DNA, 403 bp, Homo sapiens
ggaggatcacctgagcctgggtaggttgaggctgcagtgagctgatatccagccattgcactccatcactccaaaactgttcacaagtatagtttcagttatgtttaatgataaatattattaaaggatatggagatgctatatgggggaaaaaacttcacgcacaagaaggaagcaatccaaaacagttacagtatttatttcagggttgttcaattatagctgttgcttttcttctttatacttttctgaaattcatgttttctgtaatgaccctttattacttttacattaccaaaaaaaggtagtctagcatcgttagaacttctttatgaacttcttaagtgtactaaaatccttgtgacaattctactagaaatgctatttcaacctgtgagattcc

SEQ ID NO: 97919 - DNA, 252 bp, Homo sapiens
taattttttttttagagatagggtctcactatgttgcacaggctgatctcgaactcctggcctcaagcaatcctcccatttcactcttccaaagtgctaggattacaggcatgagccactgtgcccagccatgataccatttgtttttgaatgttcattctggatgctgaatgtggaacaggtgatggtggagcaagggtagaagcagagaaactagtttgaaggtgactgtggtaatcagggaggaaggtc

SEQ ID NO: 97920 - DNA, 345 bp, Homo sapiens
ttctttatatattctttatgtatggcccttatcagatgatttccaaatattttctcccattctctgtgttatctttttactttcttgatagtgtcctacgaagcattaagttttaaattttgatgaagtccaattcatctattttttcctttggatgcttatgcttttggtgtcatacctaagaattcactgctaagccacagtcatgaagatttattcaagtttccttataagagttttatagtgttagctcttcaatttaggcattttgagagtttttgtacatggtatgaggtaggaatccaacttcattctcttgcatgtggatatctagttgccctagca

SEQ ID NO: 97921 - DNA, 657 bp, Homo sapiens
gtctttagataatttaacagtttatttcacaaaaaggcattataggcaacattaacaggcaaatcgaatggagacaatatttacaaatatgacaaagaatttattcttaaagatattaagatataagaagtcttataaatcagtaaaaaaaagactaattccccattgaaaaattacaagtaaaattccggataatctaaaaaatgctcagcctcatctataatttttgaactgcaaattaaagcaatatgtcacttttaaggtattaaactggcagagacttcagaaattataagtagtggtatgctcataaatgtttaataaccacctctggcgggggtggggggttgttttgtaactttgccaatttctgtggtgtcaatacttctcaccatggtgatttcaaactacgaacatgacatcactgaatacagcagagttaagagatgggcatttgcctcttataagctgttactatctggctccagcacatttccaattcatactctgctgtcaagggtacatcagaatggacatgtccatgtatttctggtatcaggattccgggagcgtggtccatcttgtgcatcattcaattcctccgcccttcacctgcacaccatgtcatcatacgtttttatctttgccaggctgaga

SEQ ID NO: 97922 - DNA, 294 bp, Homo sapiens
tctactggtttctatagaagcctctctaccttaactattttattaaaatacttggatttgttaagtctaagcagaaatcacatttattccttctacttccttttcaaacctgttctctcaaatagttcttttcttgccaatggatgaagtcttaggtaagccctagagctatgctagtcccttttagcggtaatatctcatttaatattaaaaagcgtgagctgatataatattaaaactggaaattatgtggtagggaagctgggtgaagtcagcatttactttcatccacac

SEQ ID NO: 97923 - DNA, 395 bp, Homo sapiens
aatgggaccatacttgttttcccacttgatacattatggatagtttgcccgtgtcaaaaagtagaactccatgttagtattttttatggctgtgtagttgcagtagacatttgctcctgccatcatctggacacatgttgggatcccacgtctccatttgaggtcaagaaaggcccttgtaacttgctttagcaaatgaaacgtgggcagaagctctttactgcaggtgagcctctggtaccatgacactttcttccatgcccctcatgaagcatgtgttggtgaagtgtgacgctaagccattctacagatcacaaccgctctaggactgcagtggactttgcatgatcgagaaataaatcattgttttagcccactgtggtaggggtgtgtgg

SEQ ID NO: 97924 - DNA, 226 bp, Homo sapiens
cctatgtaccccttgcctccattaatgattgtgtgcttgccacttgtggaggatgagacttcgaagcaggtggctttctgtggctgaagaaaaccttaaatgtgctgacaaagttttccaaagagacagagaatggcatctgccatgtatgttgcccctttccaaagaggaagcaacaagggtaatggcctccaatggctctgtatgcagataggtggacagtaat

SEQ ID NO: 97925 - DNA, 368 bp, Homo sapiens
tgtcagcatctgcttagggtctaaggaagctttaactcacaatgtaaggggaaggagagccagcatattacatgacaagtgagggagcaaaagaaagatgggaggagttgtcaggctctttttaacaatcagatctataggaaactagtagaatgagaactcactgattattactatgagggcagcaccaagacattcatgagggacctgccctcatgacctaaatacctaacaccagctacgacctccaatattggtgatccagtttctacatgacctttggaggggacaaatatccaaataatgtcagccattctgggtattttgcctcttcatataaactttagaattagtttgtcaatattcac

SEQ ID NO: 97926 - DNA, 474 bp, Homo sapiens
ggctttgccagaatgaaaaagtgaatggtttttggggccttcaactttttgtgctcttgaagaaataagaagacaaaatagctttcaatccacatcaggcccaatttgcattgcttcgggagttcctgggaaagtgacggacttctatccaaaatcgcgccgtgaatttgattattggtagttctacagtcagcttgagggttgttggtttgacagttgtcagagcatgttgcagctgtatgaggtgggtatctgtacatatggatgtcccatattctccagcattgcataggaatagctggtgtctagatcctgcctcaggagctatgtgtcctgaatttaaaaatcaggtatgttatatccctggggcatgtcagacatacaacaacagtgcattagtccattttccattgcttacaacaaaataccttaaactgggtaatttgtaaagaaaataaatttcttactgttgtt

SEQ ID NO: 97927 - DNA, 241 bp, Homo sapiens
actgtgtccttgaccaactacttaacttgttcaagtctcaacttcttcatgtgcaaacgaggtactcgccaatccaagccaacccacaagattggaatgtaagggttaaattgaaacaaagatgggctgggcaggggctcacacctatgatcccaacattttgggaggcagaggtgggaggatcacttgagcccaggaattcgacaccaggttgggcaacatagggagaccccatctttac

SEQ ID NO: 97928 - DNA, 382 bp, Homo sapiens
agagagagagagagagagagagagagagagagagagagagactgttagcgaggttacaacctcagctttctttttatcatttacttggcatacttttgctcatccctttatttttagcctttccaaattctttgttttatgtgtgtctcttgtatacagcgtggaattgggttttgttttgagagccagggccaatttgattgatttgaactgtcattttgtgaaataatgtccctgtgtttttttttttctctgctaagcatacttttgtctttctcaattttcttttggtatttggggaagtttgtatttttgttctagtggttacctttattcttacacctttttaatgctctcttactatctgttttgacagttttaa

SEQ ID NO: 97929 - DNA, 443 bp, Homo sapiens
ggtattttttagtggagacagtgtttcactgtgttagccaggatggtctcgatctcctgaccttgtgatccgcccacctcggcctcccaaagtgctgggattacaggcatgagacaccgcgcttggcctcccctagcttttttaaaatgtacaccctcctaagtagaatgaagaccaatggatgtagcttaaagagctacataaaatatgcagtgataagctacaatggatgtagcttaaagagcaacataaaatattcagtgataatactttattgcaactaaatgaactcttgcaaagtttcctccagttgtgaaagtcatgggcttcagataataatgagggcattttccatttttaattggactagtttccatattaaccaatcatattactgatttggttacttgtggcaaggggatgatagaaataacacactttgt

SEQ ID NO: 97930 - DNA, 253 bp, Homo sapiens
tgattagcggacttgggcacttagcagagggtgcacgtgcccgtgtgtgtgtgtgtgtgtgtgtgtgcacgcacacctgtctcagggggtacctagcatataccctgagcagatttttaacacctgccctcttctataagacaaaattattggcagtagtaatcatgaaatgagtaacaataaatggcaggcagccaaaattttcttttattgaatttcctatataaactcatgccaattcaaaaataaataa

SEQ ID NO: 97931 - DNA, 301 bp, Homo sapiens
gaggaaacaggctcagggggttaaggggtttgctcaaggcacacagcaggtcagtggagagtgtgtgttggaatccaagtaaatgggtaaagaccaagagaccacagtggatacatgtttcttttcttggtttttcaagtccccttttaaggggctttttaactagcagtgagagtacacagaggtgctctccaaagggttatactctttgtgatttaagtaagtgaagtgaataaggggaaaaatgaaagaaaaaagagacaaaccacaacaagtttcatgtataggcctcttcagttgg

SEQ ID NO: 97932 - DNA, 391 bp, Homo sapiens
  misc_feature (107)..(107): n is a, c, g, or t
aatgaatagcatatgcaaaggcagaggccaaacttccttagtttaaggaaggaaactaacaaatataacaagctatgcttacttgaagtcagaggtgagggctaganaggaatagagcttaaggaaacctgtttttacttctctcccagatacagaacttcaaactgtttatggttgagacactcatgaaaaattagccatgtgggagtggagagagaatggaatatgacaatggctaagcatggcaaggtaactgacatagcaaatgttacaggtggaactataaagtggcccctacttggcagtacagtcctagtctctattctgagtctgataaggagggcctgaggattctgatggctccaagggtgcaattcaccctcttcctgaa

SEQ ID NO: 97933 - DNA, 296 bp, Homo sapiens
tgcagtgcctgctatgaagcacacacaatgcttatctgctgctccattggaaagccaatagcaaagaagggaaaggaccttctgattggagagtggaggagtgagttagaagatggttttatgtttactgcaatgccctttgtcctcatcagaactgtgaagtggaatttgattttgatgcactctttaacaaggatgctttgtgttatccatgcaatcccctactactctgaaccataacatacacatgctacatcccaaaagccagaacccccaaaaatgggttgttcctggtt

SEQ ID NO: 97934 - DNA, 831 bp, Homo sapiens
ctggaatctgggtctccccaccctgtgggacccctcgtatcatgttttggccgtgcttgggaactcaggagggggtttcctgcttgcaaaatgcccacgcataacaggacagccctgtgtctgatacagctgagcaaagtctgggacacgacagaacaggtgtcacatcctggctttgccaccagagcctcagtttatgtaaattggggaagatctccaccctcacacttgttcacagcagagctgtggagccgtgtaagacctcaggccctgccgtgatgcttcttccctcccaagcccggctccggcgcctgccagcagtgccgccttggcaccaccttcttggccctcgccaagcctcagcttcctcatttatgaagtgggcatagtggtcctatctatttcacaggatgctggtaaagatcaaacgagctgatccaagtgtcccctgaagtgctacaccagccatttagcaacctcgccatgcgccacctgcatgcagcctggagtggcaaaggccctgaagacgctgaagctgttgaccttttcctctttttcaggaacatggtccctgggagtcattttctttcatcatccacaaataagaaaagacgttgttacattagctccaagatagctctttccacaatgggaaatttctgctgacagtcactaaggaaacacaggcccaccgggtggggctctcggccagcatcttgaaggcgggtacaggaagcaactcactagtgactttgagtgtcacctagcaggtcaccactgcctcaggagtggctggcaagggcagcgcaggcctccacctccacggagggg

SEQ ID NO: 97935 - DNA, 481 bp, Homo sapiens
ctcaagctacttttgctcttaaaccctcacatccaacaaaatactgtagatttgattatctcccctaaaatccttcaatctgtaaactcttctctgccctaccaccacagccctggtttcaaacctcgtaatttcttgattgcatccctccagtggcccaatatctctcagccactagtcctctgtctcctccttccatcagccctccgtatcctccactggctcctcagaatgtttcctaaaatacagaattgatcaggaagcctgactttatatccgtcattgacttcccttatcactctcagtattttatcccaaatccctggtgcatggtatacaaggctcttcatgaactgtcccagaattggtcctgctccctctaatatcacacacatgtgcatgcacacacacacacacacacacacacacacacaccatgttccagtgcaatgaagggggcaaaggatctgaacagacattt

SEQ ID NO: 97936 - DNA, 775 bp, Homo sapiens
ctagagtagctgcaacactagaaagatggcggagcaagagcaaagaaaaatcccttggttccagaaaatctcctgaaaaagaggaaggcttatcaagccctcaaagccacccaggcaaagcaggcacttttggcaaagaaggagcagaggaaaggaaaagggccaggtttaagcaactgcaattattcctacatgattcctggcagcagaaatatggcaaggtgagtctttgacgactagaagtgaaacctcatgacttggaattgccagataaacattccttggcctttgttgtactcatcgaaaggattgatggcatgagtttactggtgcagagaaccattgtaagactttgcctaaagaaaatttttagtggtgtctctgtaaaagtcacccctcagaacctaaaaatgctgcatataatagaaccttgtgtgacctggggatttccaaatctgaagtctctctgggaacttcttttgaaatgtggacaagccaaggtcaagaataagaccatccttctgacagacaacacagcgattgaggagcatctggggaagtttggtgtcatttgcttggaagacctcattcatgaaattgcgctcccagggaagcatttccaggagatttcatggttcttgcaccctttccacctctcggtggcctgccatgctaccaaaaatagagtgggcatcctcaaggagatgggcacatctggctattggggtgaacgcatcaatcagctcatccccctgctgaactagacccaggtgcc

SEQ ID NO: 97937 - DNA, 635 bp, Homo sapiens
gcttacctggaaaactgtaacaatctccaggttgacctttctgtctccctctaaacacatcacattggctaaaattatcttttgttaataaggattatattacatataaaagtatttaaatattttaatgactcttacccttaggatagggtctgaactccttagcaggcttcatgatatattaaccttgttgacctctttggtctctctcagtacttctcaattcatactttgctcttcagccacagtaagttagttttagttccctgagtatgttatcagctctctggattctgggctttgctcatatttcctctattcaaaatactcttatacttcatgtctttcttgccacaccccccaccccttcccaccagcatatgtgtatgtatcacaattactcatccttcagatcagattcagtttaaatggcatttctttgggaagcatttcctgattctctacctcccaggctgggttgattgcatgtatagcaccttctactgtagtacccttttcatggcatttacttaccatagcctatttgttattgccctcaagctccattagggcaaattgttttttcattgttttaaagtcagcacctaaatctccctggccaaaaaaaaaaagaa

SEQ ID NO: 97938 - DNA, 207 bp, Homo sapiens
atgcttcccaaagaaatgccatttaaactgaatctgatctgaaggctgggttgattgcatgtatagcaccttctactgtagtacccttttcatggcatttacttaccatagcctatttgttattgccctcaagctccattagggcaaattgttttttcattgttttaaagtcagcacctaaatctccctggccaaaaaaaaaaagaa

SEQ ID NO: 97939 - DNA, 391 bp, Homo sapiens
ggataaaaaagaaagatatattccacacaaacgaaaaccaaaagcaaaaagtagctatacttaaatcggatgaagctgacttcaaataaaaacaggaaaaaaaagacaaagaagctcataacataacaataagggaatcaatttaacaatgggatataacaacattaagtatatatgtatacaacaacagagcacccagattcctaaaactagacctaataaaaaaccaacagtaatacaataataatagaggatgtcaacagctgactcacagcactagacagatcattaaaacagaaaattaacaaagaaatcttgggcttaagttgacttctatatcaaatggacataactagatatttacagagcattctgtccaacaactacagaa

SEQ ID NO: 97940 - DNA, 249 bp, Homo sapiens
gggttcatggagggaagtcaagggagctgagatgggatgcaggagagactgtaaggatctaaacagcacaaaatgaacatctaacccttgctcctgctcttctcctgccaactggtcctgttccacgttttctgtttagtgactgtgccactgtggtagagattgctggctgtcccctgattatctacaactatgtgtggccatgagactcagttctgacccttgggatgtaagcaacttctgggtggt

SEQ ID NO: 97941 - DNA, 263 bp, Homo sapiens
tgtctctgtcaggacatgatatcaggaggcccataactatttgtagttagtagtattggtgatgtgaagttcgatcatttggttgaggtggtggttgccacctcaatagctaatccgtagaatgataaatttcagacattgtgactatcctgttgtttcacagtagttttagcatctgttggtaatttgtacctaaatcacggtggatgctaaatggtgatttgtctgttagtacttctatgtttattagctgttactctttt

SEQ ID NO: 97942 - DNA, 470 bp, Homo sapiens
aggttgtcactcacagtacttgtcacctcactcgcagggtgagcacctgaccctggcctcctaatcataattcaggctaatgctggagtccaagagaagggccttgtgaccaggcaaggccaattagaatctttccctaggactgatgtataaaagctggggggaaaatgctttctctttcccctggggttgctggggtagagtctaggtctctccctatcatagagatctagagtcatagtctgtctcaggatggggtcatgaaaaggcaaagaaacaccctagttccatgccctgaggccctggttgaggtctctctctcttgcttggattcagccacctactccacttccttcccagtagttgctctcacttccttaagccacttaggcttgggtttcagccactcccacaactccggcccatggccatgtcctcccactccatgcctaggagcccgtctctaaggc

SEQ ID NO: 97943 - DNA, 598 bp, Homo sapiens
tagaaatttcccagggctacaaagccttccctgtatgagctgcaaatcaagccaaaacgttaccagagatgaagagatggggacagccatcaggcctggggatggacctccctggagctgggcattcaagaggatgagtgcagcagaagacgtatccagggagcctttcagtgactgtttgggcaaagcctcccttgtggtagaagatgcctcacttctggggagaggaggctcctcatcttgcagacaagaagcagcacccactggttcctgctccaaaagccattaacattataaactggccaggtgcggtggctcaaacctgtaaccccagcaccatttgggaggttgaggcagaaggattgcttgagcccaggagtttgagaacagcctgggcaacaaagtgagacccaatctctacaaaaactagagaaaaaatagctgggtgtggtggcactcacctgtactaaggaggctgggctgggaggatctcttgagcctaggtggttgaggctgcagtgagccaagatcacacctctgcacttgagcttgggtgacagagtaagaccctatctcaaaaaataaagtacaaactgat

SEQ ID NO: 97944 - DNA, 553 bp, Homo sapiens
tagaagacagttgaataatatcttcaaaatgctaggcacattttcaaataccaggtaaaacatgattcaagaattaaggcaaaatattctcagactgctaaaataattactaagcaatatatttgtgtaaaataaaatgaaactagaaggaaggagacagcgatgtaaagctgtataaaattgttttctctgtaaataagaacatttattaaaaaagcttataatcctaaaatttggtcagtgccaccaaggaaaacacagaatactaggagaatgcagtgtttgactgatcctgtgtaaagagagagaaatcaaatagaagacttattgcatatcctatgaattacatatccttaattcatatcctgcatattacatatgctatgtaaagggagataaaaacaagacttattcgagataatggcaacaaatataaggcttgtgcataatgtgttctatgtaaattattaccaattataatgtttctagatagcaaaaaagtgctaaacctctgaaatatgtatacatacatgacctttccaagaacagcagc

SEQ ID NO: 97945 - DNA, 453 bp, Homo sapiens
ttcagtaaattttgacaaatgtatacacctgtgtaaccatgacctcagtcaaggtacagatatgcagtgactttttcactatcacacccattcctgccactttttttcatatccttaccactatctggaatttttatgtgtgccatctctagtaaaatacaatctgcatatgtgcatggatctggtaaaattgttacttttgctatccccttctttcctactaagtgcatcaataaatagcatccactctatatttgtgtctttcctcaagtaaattcatgaaaacgagatcctgcaagtttgtgtttttatattaagtgttaactctagagattacaacactgttcttgtaggatgtgtttttggggaaagcattcctcttatggcagccctgttagcctgaggcagggcttaaacaaactgattgagcaggctcaaaaggacagtatcgta

SEQ ID NO: 97946 - DNA, 465 bp, Homo sapiens
gatattatagatttatagatttttacatagatttatatatagaatatatgagtcactcttatccttcataagcgtaggagttaatctgccttcatttctttcatcttgcctttttggatcagtataccaaattttttcagacctatattccagttcactgagttcctcttcagtgtatccaatctgctatttaattcatccataaaattttaaattttgtttgtacatttttgatttctagaagttctatttgattatgtttccaaggtgttaggttactttttgttatctcttgtttgcccaaagggcaagtagattttcagtttatttaggcatattccatagttccatatttcatacttcatttacaattcagtttctgataataccagaagtacttgcaggtctgttttcatgtttcatctcacttgttctcacaggacctcgtgtgctttgggattttct

SEQ ID NO: 97947 - DNA, 451 bp, Homo sapiens
tgcctttggggaccagttgttaaatttgtgacctaataactagaataaagtttgatatagaaaaaacatgtctctgtctagtgaccttatcttgccttagcagagggtgtgcttagtgattccctgagtctttcctgtggtcttattttatgaaaaaccatagaagccatacgaagcgaaggcttttctgggatatgtgcataaaacagtactttaaagctaacctttaaggtaattgcaccaagtagtactttcttataacaccatttagtagcagaacgtgcctagataattctagggtagtaagacctctgggacaccagccacttagagaagataacaggtatagttttttgttttttagggttttttttccaatgcccaagcagaggccactacacccagggatcaaggttatgggatgaggattatattttatcccgtttctatg

SEQ ID NO: 97948 - DNA, 657 bp, Homo sapiens
tataggaaattcaatagggcctgaaaagggggtcaaccaagtactgcgactttcacaataaaatgaatcaaagctctcatgagttcataacctgagccaaagaaaaagacggagtctcgctctgtcgcccaggctggagtgcagtggcgcgatctcggctcactgcaagctccgcctcctgggttcacgccattctcctgcctcagcctcccgagtagctgggactacagaggcccaccaccacgcccggctaatttttttggatttttagtagagacggtgtttcactgtgttagccaggatggtctcgatctcctgaccttgagatctacccgcctcggccttccaaagtgctgggattacaggcgtgagccaccgcgcccggcctttaaagttattttcaataacacctagcaattaggaagcttaaaattacatgtttttaagacttggaatcaaataacttcactctctaaagacttaaggcaacgaaaattttttcgttttaagtttcactttcgttcttaattatgacactctaggaatttctgtatttgtcctttaaggtaattctactcttgggtattataaaatgtttgtcttgtctttatgtttgtttctcttggttctataaattgcatcctcgagtccagaaaa

SEQ ID NO: 97949 - DNA, 371 bp, Homo sapiens
cttggctttctgcggttaggatgcgctggccgaaggctcttctccctcccttgaatgggctctgtggccaaccctggagcatgagaaatgctggctcctcacttgcaggtgggataacagtgacaggagttccctcagggtgtgtgacagctgagtgaagtgacctctgctacctccatctcctcaccttggaggcctgcgtcagagccatgggaggtgagaccctgactgcctcggggggtatttgcctcaggctgggagctgttgcctgaattgagtaggaagttcggatcacctacaccctgatcacctacaccctggtcagcaacagcccatcacctacaccctgatcgtctacaccccatcaccta

SEQ ID NO: 97950 - DNA, 374 bp, Homo sapiens
atttacaaagatgttttctgccactttcctcacctcaaagaacgagtcagctgcagtcctgtactgctgcccaggagactggggaagaggggcccgaagctccttggacatgtggatggtgactccacccccacaggactgcacactgttgggctggttgggggtgtggggctcgggcagagaggagccatctctgcttcctgggctgttatcaatggactgtcaacatgtggcatagagacatgggcgctacaggcgggagggccacggcacacaccaacccacccacagaacagagtggacacaccctggtcagatggggcaggaggggatccttgtagcaaggagagaacaaagtctcaaagtgggggcgc

SEQ ID NO: 97951 - DNA, 499 bp, Homo sapiens
ccttaagtgatccgcctgccttgacctcccaaagtgctgggactacaggcgtgagccaccgcacccagcctccaaagtgttaggattataggtgtgaaacgccatgccctgcccatttcctcttttataacgatgaacatgaaatcgtgatagtagttgctctcctaatcagactatatgtaatatatgggtcattctcatgaggcatttgctggagttaaaatatctgtatatttggcaccaggttagaatgctatttggttaagatgaatggctttgtcctcagcccttccagttgtttaatatagtattataatataagcagaaagaatatatttgctgttttcagtggttaagatgaaagcaaaaggaatataagatttgatatatcagcataaatcagcattggaatggagtccttttagtaaaactgtgatatagataatctgcttaaaacctagtgaaaccactaagttttacgtaagttcaaataaaaaga

SEQ ID NO: 97952 - DNA, 356 bp, Homo sapiens
tattctccttacacactgccagaatcccggtcaaagccaccatccttttatacctgggcctctgcaggagcttccttaattgtcaccctctcttacttttgcccactataacctgttcccatagtagccacgtccatcgtccctcacttaaatgccacaagcactttgcttcatgctttcagtaaaatccaaactccttacctggtccacaaagccctaccgctttctctagcccccttttgtttcctgctaccctaatccaccacttccttcctcattgctgcctctgacttgtcactctcacatgactttatcttcattttttgcacagcatttacccttattgatcttatatt

SEQ ID NO: 97953 - DNA, 816 bp, Homo sapiens
agcggcatttgctttatacttggaagtcttagcaaattaactctcattccatgtgaaaagatatcctgggcttgaaaagaaattcaggtcttgaatttggttgagaagttgggaagtttgagaatttttttttgtggtcaaatggtttagtaagagataagttattattatatagaaactagcccttaggccagacaaggcggctcatgcctgtaattccagcactttttgggaggccaaggcaggtggatcacctgaggccaggagttggagaccagcctggccaatatgatgaaaccccgtctctgctaaaaatacaaaaaattagctgggtgtggtggcggggacctgtaataccagctactcgggaggctgaagcaggagaattgcttgaacccaggaggtggaggttgcagtgagcggagatcacgccattgcattccagcctgggtaacaagagtgaaactctaaaaaaaaaaaaagggaaaagaaaaaagaaacagtccttaaaggacaagtatctttagcactgtctgccatgagaaacattttcttcattttttcccctgagtttaccctgacttaaatactttctgaaagtcatcatcactaatgagaaacaaacaacagaatctgaatcagtatgtgtttttgaaatgtgaaagtgtcttttccttcactttgaaggcccatccttgggtcttcttacctatccaaattctatgcacatctgaagattctccctagttcctttggcttctgtgccatcttccatgactattccaaattctagtcaccccaaataatatctcccca

SEQ ID NO: 97954 - DNA, 429 bp, Homo sapiens
gcaacatatttatttcatctctgaaggtctaaatatcaatgaatttcccatcattgaacaaatattttggggtagctattatgttctagaagagtattgacaaagttatgtcttaatttataggacatttttatgactgaaattagataacccttaaaatagaaaactagacatctgtctttaataagaaatgctaacactaagaataaagggatatagaaacctaagacttccctcacatgataacatcttgctaaaggaaatagaaatcatgtggttaaaaaagaaaaaaaaggaagaaggaaagaaggaggtggtggaggctgtgacccatggtagagacaccacccatgatggttgtgggcattgtgggctacgtggaaacccctcgagacttccggaccttcaagactgtctttgctgagcaca

SEQ ID NO: 97955 - DNA, 414 bp, Homo sapiens
ctttcactaatggatgtaaaaagaagtgaaaggatttgagatgtatcttgagttaccatcaagaaggcttggttactcactacgtcccaaaaggcccaaaaggaatgagttgcaaaggtataaaagaattataaattcagtttgtacatgatgcatctgagatgtccttgaatatgtttatttgtaattttagaggctcagaaagaaaactgggctgaagagataaatttggaagttgccagcatataaatagcaactaaagccttgggagaagaaaagaagagctacaattaagtcattaggaaggctgatgttcaaaggtaaagtggaggtgggtgggcctgcaaagaagacccaggaaagagaccagaccatattaggaaagccaggaaagtgtgacattgggaaaacaag

SEQ ID NO: 97956 - DNA, 444 bp, Homo sapiens
ctgaattgagataaaagcagggtaatatgaaatggcaagggaggaggaaagaaaactagaaaagttgatatcttgaaatattatttttagtctggtttaaaataagccccaaatgatcataaatctttcagaaataacgtatcctttcttgctggaaaacagaaaaataactggagtccttttgtaaatactattgttgatgttatttctcctactgtttttcactttcctctttcacatatattaatttcctcttaccgctccaaaaataataaagataagatctaccgggaaaggacaaatgggaattgatttgtacctcgtaagtattacatgaaaaaaaaaattcttaaatatggctacaaattcttttgaacttgtttgttttgtgttccaatatgtcaaggaatagatatccacatgtaatactaaggtcttgggaga

SEQ ID NO: 97957 - DNA, 266 bp, Homo sapiens
ctcccaggttgaaggaattctcctacctcagcctcctgagtagctgggactacaggcgcccaccatcacgcctggctaattttttgtatttttagcagagatggggtttcactgtgttagccaggatggtctcgagatctcctgacctcgtaatccacctgcctctgcctcccaaaatgtgggggttacaggcgtgagccactgtgcccagcccatgcttggctgatttaaaaatttttttgtagattcagtgtcttactgtgttt

SEQ ID NO: 97958 - DNA, 614 bp, Homo sapiens
ttttgagacagagtctcactctgtctcccaggctggagtgcagtgttgcgatctcagctcactgcagcctccacctcccgggttcaagctattctcctgcctcagcctcccaagtagctgggactacaggcatgtgccaccacacctggctaatttttgtatttttagtagagatggggttttaccacattggccaggcaggtgtcaaacttctgacctcaggtgatccacccatctcagcctcccgaagtgctgggattacaagtgtgagccaccatggccagccacatttttctatgagaacaaagtcatgtgaaaagagtaaagaatctccacatgcgaaaatcaccattttggctaaagtttagaagtattaataattaatttcatagcttaggcaaaatgtccattgttccaaaagtcatcatcaaatattcacactagatacgaatttcagtaattaatcctatttgtaaattaaaaaccaagatttcagcttgaataaatgatgaagatcagccaagcaacgttcacttcttaaaagcgtttgttttgtgaaaaatgcaacaagactccgtctcggtggaaagatgtgctaaatattcatttatctc

SEQ ID NO: 97959 - DNA, 1625 bp, Homo sapiens
acaagacaaggatgtctgatcttgccacttctacttaacaatgcaatagagattctagccagggtaattaattaggcaagataaagaaataaaagatatccagattggaaaggaagaagtaaaactagttcaatttgcagatgatctgatattgtatatagaaaatcttaaggaagacactgaaagaattagaactgctggtaatatggacagtaaaagaaaagaaagcccacaagaactaattgatgagtttagcaagattgcgggatacaagatcaacatacaaacatcaattatatttctatacaccaactatgaacattcaaaataaagcaattacatttataataccatcaaaagaatataaacttaggtataaagaaaaaaagtgaaagacttgtataccaagaactacaaaacgtcactgaaaaaaataaaaaagatctaaataaatggaaagattatccatgtttgtagaccagaagacttaatattgttaaaatagcaatactctccaaattgatttacacatcaacacaataaactatcaaaacccaagctggctttttttttttttttttttggtggcagaaattaagctaaggcaggtgtggaaatcatttactcaaagaatttatatccagaatacagaattgtttcaactcaataattaaaagagagctcagctgtttaacctcattagtcattagagaaataaaaataaaagccacaatgaaatgtcacttcacacccactaagatggttacaatcaaaagatggacaataacaaatgttgacaagatgtggagaaattggaaccctcatacatagctggtaggaacgtaaaactgcagtgactgtgggaaacagtttggcagttcctcaaagttaaacacagaggtaccatataacccagctcaattccactcctaggtatatttctgagaaaactgaaagcacatgtccacacaaatgcatatgaatgttcatagaggcattattcagaagtcaaaaaaatggaagcaacccaaatgtccaactgggggatagacgagtaaaatgtggtagatgtatccacacagtagagtgttactcagtaataaaaaggagtgcggtacttgttcatgtggctacatggatgaactttgaaaacatcatgctaagtggaaaaccagtcacaaaaggccacatattgtatgattccactgatatgaaatatggaacaaaggcaaatttatagagactgaaagattagtagttgattaacgcaggatgcagcagggatacagggaatggggagtgacagctaatgggtggaggattcttttgggagggaccaaaatgccccaaatttgatagtggtgatggctgaataagcctatgaataactaaaaaacactgaaaacactaaactggcgaattgtgtggtatgtgaactatatttcaataaagctgttaaataaaatcacagtattatagtttatattctttgtaattaattagcttaataacttttataattagctaataaaaatcttgagcccaggctgcagtgagccatgactgcaccaccatacttcaccctgggtagcagactgagactctatctctgggaaaaaaaacaa

SEQ ID NO: 97960 - DNA, 434 bp, Homo sapiens
actgcaagtaaaaacttacatagaaaaatacaatggaacaacaggtgagggttaaaatatgggatacatatggtaacctgcagttctagactttcctcagttaacattatcatttccctctttgtcatccaatcatctcaagaacacaagcagtgactctgctgtatctcattctcctgaagggctcactgtggcctctacagctcctactctggccaggggtctctaatatgaaaagaatacaagaatctcgtatatacctttagaaaacagaacatcctctcactcataggtgggaattgaacatgagaacacatggacacatgaaggggaacatcactcactgggacctgttgtggggtggagggagtggggagggatagcattaggagatatagctaatgttaagtgacgagttaacgggtgtagcacac

SEQ ID NO: 97961 - DNA, 422 bp, Homo sapiens
gccacggcactccagcctgggcaatagagccagactccatcttaaaaaaaaaaaaaaaaggagggacaagaggcaccagaagctcctgtccaggtctgggcctcccttgggtcactcagttctcccccattcattcattcattcattcactcactcactcactcactcactcactcattcccacactctgcagccactgacttcagctagccatgctggatgctaagacatagagtcccggccatcaaggccagtccatctcagtggcatctagacatgcacagagatgaccagggagcccttgagggacagagaggcacaccctgcctcctgatcccatctgggggctgcatgaaggaggggcacaggtgtggccttgaaggctgggtaaggggctgggagggctttaggggcattccagg

SEQ ID NO: 97962 - DNA, 296 bp, Homo sapiens
cagaaagaagatggaagaagaaggaaagaaaaggcataatgtaaatataaacgctgtctttatttctggatctagcaaagagttagtttgaaagagcaattgcttataagactacaaggctgatttctcccatccctgcaatgctgaaagtctgtgcccttctaagcaaattctagtttccctgacaattagtctaatggaatgcctggatgtaggaatattgattccgatgacagtacttttacagatggacctgagatatttctgctggttcttcactgacaacacacaacata

SEQ ID NO: 97963 - DNA, 300 bp, Homo sapiens
caccggctgggagagggagtgggcctccaccgacattgttgggagaggtggccttgattatggatgaaaggcctgagtggataactaggcctcttctacatcaccctggtggggaagggaaggagtacttcattacagcctaacaaggtttggagatctaggctttccacttggcctttgctgatgggggtgagggtggggctggagtagaggggctatagtctaaaggctgtctgtcggctggatgcagtggctcatggctgtaatcccagcactctgggaggctgaggcaggcggatc

SEQ ID NO: 97964 - DNA, 580 bp, Homo sapiens
atttgtttgtagaaacagggttttgccatggtgcccaggctggtcttgacctactaacctcaggtgattcaccctcctcggcctcccaaagtgccgggattacaggtgtgagccactgcacccagccacctgcattgttttctaacagcaaaacttgggagcatgctgaatgtatttaataaggaatgaatacaatagaatattgtgctgtcataaaagacagtgaagtaaatggtccatgatgtatatttgtataaatatatattgtttatgctgctgtccatgcttagaaaaaaatatcaagcaaatgacctcagaaattaactgtgtttgtgacctctagagaatgggaagagaggacttaggaggccaggttgcactttatgccctccagtacttttaaaaaattgttttactgagatatggtatatgtatcatgcagttcacccacttaaagtatacagttcaggctgggaatggtggttcacacttgtagtcccagcactttgggaggcccagacgagaggctcacttgaggccgggagttcaagaccagcctaggcaatgtttgcatgtctct

SEQ ID NO: 97965 - DNA, 756 bp, Homo sapiens
agcgggtaaaaactaagatgtcagactcgaagtgtggggtatgactttatctttccctggatctgcatgtggagaggacggagagtgggtgcacacaagccaaatctgagctactatcacactgaagcacacaatggccacgaaaggcatgaggttgaaatccacaaaagaggtgttccctctggcacatgtgtgcaacgacacaaataagatgacattaattaacccccaaggagccaaactcaatatctacaagcgaaaagtggaacaggcaattcaatcctatgaaaagcgcttgaataaaattgtttggcgagcattatctcaagaggaacaaagaaaagttagatgcaaacaaaccaatacagtacttggaaaacaaaacagttttaaaccaggctttagaacggttgaattggcccatttcactgaaagagctgtcgatgctggaaagtgaaatcctagctgggaaaatgtacatccagcaggccatggaactccaggaggctgccaagaagaattatgcaaacaaggccccgggagagcaacagaaattgcaaggaaatccaacaaagaaaaccaaatcaaaaagaccagatcccctcaaaggacagaaggttattgcaagatgtgatgaaaatggcttttattttccaggggttgtgaagaagtgtgtgagccgcacccaagcactggtgggcttcagttacggagacaccaaggtcgtgtccacctccttcatcacgcctgtggggg

SEQ ID NO: 97966 - DNA, 366 bp, Homo sapiens
ctacatgcttcatttgcagtgtaatattggattgtatgagactttgggttttgtgttaatacctacagaaaatgttgatattttctcttagcaggctgtcaaccaggttaggttcaggtcataagtttctacccacattctttgaactgtagttgtcattttagtttatttttcaaaaacttttgcagtacctttttggtctgtcttgtgtgtgccttgcagtgaacagtctggatttggacagtggtctgtctgttagttcagtttctcaagcctttgtcacactaataggattggatttatgtatgtccagcttgggaattattacaggaattaaaaacaactttttagagtgctttcctgagc

SEQ ID NO: 97967 - DNA, 197 bp, Homo sapiens
ctgctgtgcagcccagttcctaacaggccacggactggtatccgtgtatagcctgggagttgagggcccttgctgtatatcagatgttgtaatttactccagatttttcctaaacatatattactgtgtttcactaaattttgttacatgccttctatgtttcagtaaaaagtatattattgctattgctattgctg

SEQ ID NO: 97968 - DNA, 920 bp, Homo sapiens
aataactaataccgtttccgcacccgacgcccgagccagcgagtcataagcaggtcatgaattaccctccctaaaggaacggcccgatctatctttattgtactgagttcatacaagtcaatttaaaaatctattaagttctaataaataagtgaacagaagttcacgtcacaaaatatagtaaacaaatagatggaaaaactttagttttgctaacaataaagaaatgtgaagttaagataagggcatcttcctttttcctcatttatgtttgccaaaaaatttaaaagcatgatacttattatgagtatggattcagtgaaattggtactgggatggccactctgggtcctatgcttttggcaggcagcctggtgttttaaaaaggcttttgaatggcaacagactttaccattatattctacagaaatggtaaataagccatgatttttattttatatattcagatatacgtgtgaatgttaattgctttgtgccttcgctgtttttagaacagccttctttcataccttactggtgatgtattaatagcaccattttggaatgcagtttggtatagtatgtttcaagaatcataggattcttgtctttttttgaattccgagtcccatttctgagattctctactaaggaagtaataaaaagtatagtaacaactatatccttaaaaatggcctatataacaaataaatagactctaaatgccctattaaaggaaagtggagccaggtatgattacttgcatgcctgtaatctcagctacttggggggctgaggtgggaggattgcttgaacccaggagttaagagagccaccgccctttaagttgagatgggggggacaaaccacttgctggttacgaatttactgggaagggcgttatggacaaaaaatcactg

SEQ ID NO: 97969 - DNA, 551 bp, Homo sapiens
atatgtgagcattaagtgatagaaagcacataaagcacttagcagagaccctcagtaattgagccttgtggtcacattgtcgtcatcatcatcatcatcatcatcaccatcatagcaatcgacatcataccaatcatcattgtcgagcaaagtggacaggacattccacagggagggacttgaggagtggagcacccaggaggcagccagcttgcctgtgatttccacgggaccaactcacctgagctattctcagctaaagtctgcgatcctgataacagacttcagtggcttctggggagtgttgtagcaggaatgatcagccccttgccctcatcggtcggctctgttcggattggctgcattaacccatactgcccagtggtctggctgtgcatttcctcctccaacagtggggacgctcactctggaacccagtctccagaatgcatcagtggagaacccctgcatctacagaccctgaaagcagatcctcctcgtggctgcatttctcttgaagagagctcataaagacacccagcagccacagt

SEQ ID NO: 97970 - DNA, 189 bp, Homo sapiens
tttcatttggttcagcctaactctttgtatagtgtcagaaatactgtggcatataatgaaacatcctaggataggatggtcaaaatacaaggaagattctctcaggttgtgttatgttattaagataaaaactatatttatattttaatagatttctgacatttagtgacattaaaaatgcagggtaag

SEQ ID NO: 97971 - DNA, 338 bp, Homo sapiens
gcatgtgccaccacgcccggctaattttgtatttttagtagagacggggtttctccatgttggtcaggctagtcttgaactcccaacctcaggtgatccacctgccttggcctgccaaaagtgctgggattacaggagtgagccaccatgcccggcccagaaaatacaactttctactggctactgctttttgtggtaccagtcctaggaatgttttactaatttatgtgcaattcatgttaccttagatgatgggaaggatcttcctttttcctcatagatgcctttacgtcttggttcaggaaatgattgtacaattaaaaatgaattgcttgttg

SEQ ID NO: 97972 - DNA, 505 bp, Homo sapiens
acatataagatcatgtcactgacaaacagaacttggttctgtgttttagtttctatttctttgttaatgttctaattttgttcatgtatcattttcttgattgtttagctttctgtctgtatcctctgatacttcattcagcttctttaaaacaattattttgaattgtttgtcaggtaattgatacatcatcttttctttcaggtgggtttttgagatttattttgttctttcggttgggtcatttttacctatttctttgtacgtggtattattttctggaatttgtgcacttgaaaaaacagccacctctctcaattttcatggtctggattcttatagggaaaacccttcaccaatcatcttgattagagagcctgagggtctctcaagctttttctgggaatcatgcatataatttcccaatgggagaagtttcttgttttatcaggaacttgtaatttcttgctccctcttgtgtatatctgcagtactgcaagtgctc

SEQ ID NO: 97973 - DNA, 494 bp, Homo sapiens
acaatatatgtggctaaccctcagttcatgaggtgaagtttaattctgtcctctacctcctaagaacagggctgacttagtgacttacttctacagaaaagagtataggaatgtaaaatagttaccacacactggagaaatttggcaaacagtaccttaaccaagtgatgaaggttaacatcaccattgatatcatatgggtagcatgtaaacccatatatggtgtgataaaaagggcaattcatctctgcggtattccttctgaaaacccataacctcagtctaataatgagaaaaacaagttatgcctgtacttctcatgaaatcaagcttatgaaaatagtctggccatacctcaaatggttaacagggagttaccatatgacacagcaattccacccctaggtacatagccaaaagaaatatgcctacataaaaacttgtacctgaatgtatacaggatcatcattcaaaatagccaaagagtggaaaca

SEQ ID NO: 97974 - DNA, 552 bp, Homo sapiens
tgtcatgagcacccctatggggagacccatgtggccagaaactgaagtctcctgctggctgccatgtgagtgaagttgggagtggatcctccagccccagtgaagccctcagatgagactgcagccccaggcaacagcttgactgcaacctcatgagagacctaatgagcagctaagccactcttggattcctgacccccagaaactgcatgagatagtaaatgtttattgctttaagatgttatgttttgggataatttgttacattgcaataaataaccaatacgtggtgctatcaagttagtgtaattataataacagaggtactcaaacttggaaactgctaagcaaattatgatatattatcttgatgaactcatggatattgttaaaattacaagcatttttgtgttttctctaagcatgtgtgtacaaaatggcttgaaaaaacagagtgcagatacatgcactaattaaacaatatagaaagtatgcatgtatgcattttcttaaagatcactgaaaatttggaattaaataaatagctaccct

SEQ ID NO: 97975 - DNA, 347 bp, Homo sapiens
ggttcatttatttattattccacttggaaataattttggggagagtcaaaggtcagcctttgattagagtgaaatttccttcactgacaggtcactggaagtatttgcaggaaatggaattatgggaaaagtccttctagggtgacataactgtgggtgggtcatttcaaaattggtgtcatcattcattctgtcatggttagtgaggaggtggttggcagagagccatgtcccattcctgactctcatccaaaccctcccccacaccctaccaccactccctgttccggaaaaggaagtggagcacagtccccgtaggaccgtctaactctgagccagactaacag

SEQ ID NO: 97976 - DNA, 448 bp, Homo sapiens
ggtctgggtgtttgtgttatcccaaaatttatatgttgaaagaaattctgacctacaaggtgatggaattaggagatggggcttttggggaggtggttaggtcaggaaaggaaagccctcatgaatgagagtagtacccttataaaagaggccctagaaggcttgttgattccttccacaatctgtgaacctgtaagtgccttgatctctaaattcttagcctccataactatgagagataaatttctcgtctgtgtgtggtgactcacatctgtaatcccagcactttgggaggcagaggcaggcagatcatgaggtcaagagttcaagaccagtctggccaacatagtgaaaccctgtctctattataagtacaaaaattagccaagtgtggtggtgtgcacctgtaatcccagctacttgggaggctgaatcaggagaattgcat

SEQ ID NO: 97977 - DNA, 580 bp, Homo sapiens
tgagaattggcatgttaagcagcgtcaggtttctcagctcaaagctggggcagagctattgatgttctttcagagagcatccagcactggctcagcaatcaataatttgacatgaaactctccagtttgcttctgagagtgacccaatttgcaatgctaaaactgggtgtttaccattactagtgcagacaatgtccctatgccagtggttctcaaagctcagtccccagaccagcagcataagcatcacctggaaacttgttagaatgcaaattctcaggctcgacctaccgcgacccactgaatcaaattctgcaaagtgtgattcacccagagttgaaatcatccagagagcttttaaaattcccaatgctcggccaggcgtggtggctcacgcctgtaatcccagcactttgggaggccgaggcgggcacgtcacaaggtcaggagatcgagactgtcctggctaacatggtgaaaccccgtctttactaaaaacacaaaaaattagccgggcgtggtggcgggtgcctgtagtcccagctactcaggaggctgaggcaggcgaatggcgtgaatc

SEQ ID NO: 97978 - DNA, 476 bp, Homo sapiens
tgctccagtagaaacctgtcagatgtttatctagctccctcgcattagctgagctgcttggtatctgccaggtggacaggagggctggcatcccttccaatctgcagctcggctttggcctccacgccccagtgtccagagagcagctgagggcagagagaggagggggctgggctggtcagggctcagagccaagtcttagaagtgacacctgagagctcaggaaatcagcctctcctgaagctcagggtcacgggtagggggagaatggctgccatggagatggggcaggcttggcctcagctttccatgtcccacctcatgtttccttcagaaccgtgcacatgacccgcctctctgaaaaggtaaccagcatcactgagctaccatcaatccaggccccatgggcctccagaacttgacggtcattctaggtcaggaatccttctctctattgaatgagctttctcttttca

SEQ ID NO: 97979 - DNA, 737 bp, Homo sapiens
aggccccagaaagctttgagctgctttgggggaaaaaaaaaatcaagaaacagagttaacccatttggaaactacaatacactctgagagaccctcagcatcacaggacaggaacatcatcttcctctctgtgttcccagagtacaggatgatacaagagcttgggaacagaattcatgtaatcaaaccactctacccaatcaacagctaagggcatcatacatgctttgaagaacataaccaagactgacttgattcaggtaatctgaacaaactgttaaaacatccacactggcctggttatatctttatacacacacacatacacacacacacacacacacgactgggaaatatgctgagattagagcaaaacagcaagacagacaggagtctggcttccaatggggtacctatttataaacgaatttacgatagtgggctagtatttagtaaaggttatataagtgcctaatttagaaaaatacaacccaggccatgctggctattagtcaactctgaaaaagttatttatggccctgagcctgagttttcttatctctgacaacgtgggataatactccttatttcacagggttatggccaggagtaaaactgtgaaatctaaaaagtatttagcagagaggttttcaggacattacaggcttacttggtttatggtgcttggcttaatggtgcttggagatatgtgtgtgtgtgttgttacattgaaggtg

SEQ ID NO: 97980 - DNA, 747 bp, Homo sapiens
ggagatatagcccagtacatagatggtacaggaaaaagcttcctagtcttagaggtagaggcatccttcagagggacccgctgaagtcccttcctgcagtaaaacttcattccctgttaaatgccaatttaggattccaggtgccagacaagtcacaggccaggccttcttaggtataacttactccttctgctgtgggtgttggaattgtgagcccagctttggcaaaatatccttagattttcccaaagtttgcaaaatcaggcaatgcccctttggccttttcctcactcctgtccctctctccagtggctgccgggactggggaaactgttttttaaatctggattaaaggttggagggttgggggcctgacctgtttcatcttatacctggagttaagcttctaaaagaagggtgcatctaaaagaagggtctttccaatggtctaattaacacttatcaccaaaatcgcatttttaattagcccttggtgtcaataggggaaacagaagagcttcttggaaatctagcttttcattaatcaatcaataaataagttacataagaggtatgaaagagaaccaaggaggcatggggggggctgggctgagtttctaatctaggggcttttttgcttccaaagggagcccgtgagccggccacttctgctaagccacaggggagggagggcagacccagccgccaaccctggcgcctttatctgtgcactgcgagcgagcggag

SEQ ID NO: 97981 - DNA, 257 bp, Homo sapiens
cagagatcgcgccactgcactccagcctgggtgacagagcaagactctgtctcaaaaaaaaaaaaaaaaaaaaagagtgttcacagcaagcagcattatgtgttatagtcagaaactggaaacaggccaggcacggtggctcatgcctgtaatcctagcactttgagaacctcagataggaagatcgcttgaggccaggagttcgagaccagcctggggaacatagcaagaccctgtcttcacaaaaaataaagaca

SEQ ID NO: 97982 - DNA, 441 bp, Homo sapiens
ctacctgtaatattataggattagaatgggaaaagattattttcatattacacacatgaagtttatataagtttatatcttataaataacattttaaaaaactgatgaagtacaaaaaaacaaaactcttctcagccccaccccagatcaacttaattagaatctgcacacagtaagatccacaaatgttttaaaagctactcaaaatttagaatatatgaagaactcataaattattaagaaaaagacaaacaaccaaaatgtttctatatgaagtaaaagaaagtgaacattctgtaaaagaagctatccaggctgggcacggtggctcacgactataatcccagcactttggaaggtcaaggagggtggacagcttgggctcaggagtttgagaccagcctgggcaacatggcaaaaccccatctctacaaaacaaaa

SEQ ID NO: 97983 - DNA, 170 bp, Homo sapiens
gcgatagagcaagaccctgtctctcaaaaaaataaaataaatttgagtagtgtaagctatgtaaacttggataatccggttaccttcattctttaatttttccatagcatatatttggcttcaatgtccaggttttcgagcacgagaaatctgcattttcattctaagaa

SEQ ID NO: 97984 - DNA, 945 bp, Homo sapiens
ttaacacttagccttaacggtttaagttcccctccagccccgagccaggagcagttctcaataccgggagaggcacagagctatttcagccacatgaaaagcatcggaattgagatcgcagctcagaggacaccgggcgccccttccaccttccaaggagctttgtattcttgcatctggctgcctgggacttcccttaggcagtaaacaaatacataaagcagggataagactgcatgaatatgtcgaaacagccagtttccaatgttagagccatccaggcaaatatcaatattccaatgggagcctttcggccaggagcaggtcaaccccccagaagaaaagaatgtactcctgaagtggaggagggtgttcctcccacctcggatgaggagaagaagccaattccaggagcgaagaaacttccaggacctgcagtcaatctatcggaaatccagaatattaaaagtgaactaaaatatgtccccaaagctgaacagtagtaggaagaaaaaaggattgatgtgaagaaataaagaggcagaagatggattcaatagctcactaaaattttatatatttgtatgatgattgtgaacctcctgaatgcctgagactctagcagaaatggcctgtttgtacatttatatctcttccttctagttggctgtatttcttactttatcttcatttttggcacctcacagaacaaattagcccataaattcaacacctggagggtgtggttttgaggagggatatgattttatggagaatgatatggcaatgtgcctaacgattttgatgaaaagtttcccaagctacttcctacagtattttggtcaatatttggaatgcgttttagttcttcaccttttaaattatgtcactaaactttgtatgagttcaaataaatatttgactaaatgtaaaatgtgaaaaaga

SEQ ID NO: 97985 - DNA, 1047 bp, Homo sapiens
ttaacacttagccttaacggtttaagttcccctccagccccgagccaggagcagttctcaataccgggagaggcacagagctatttcagccacatgaaaagcatcggaattgagatcgcagctcagaggacaccgggcgccccttccaccttccaaggagctttgtattcttgcatctggctgcctgggacttcccttaggcagtaaacaaatacataaagcagggataagactgcatgaatatgtcgaaacagccagtttccaatgttagagccatccaggcaaatatcaatattccaatgggagcctttcggccaggagcaggtcaaccccccagaagaaaagaatgtactcctgaagtggaggagggtgttcctcccacctcggatgaggagaagaagccaattccaggagcgaagaaacttccaggacctgcagtcaatctatcggaaatccagaatattaaaagtgaactaaaatatgtccccaaagctgaacagtagtaggaagaaaaaagtggtaaaagaactcagtgatatcaaagaattgaagaggaacaaaataagtatcaaagtggtaatgacgcatcaattacaagaaaaagaaatgattagcaaaggattgatgtgaagaaataaagaggcagaagatggattcaatagctcactaaaattttatatatttgtatgatgattgtgaacctcctgaatgcctgagactctagcagaaatggcctgtttgtacatttatatctcttccttctagttggctgtatttcttactttatcttcatttttggcacctcacagaacaaattagcccataaattcaacacctggagggtgtggttttgaggagggatatgattttatggagaatgatatggcaatgtgcctaacgattttgatgaaaagtttcccaagctacttcctacagtattttggtcaatatttggaatgcgttttagttcttcaccttttaaattatgtcactaaactttgtatgagttcaaataaatatttgactaaatgtaaaatgtgaaaaaga

SEQ ID NO: 97986 - DNA, 264 bp, Homo sapiens
cctctttgattagaacagccataggggaagagtggaggaagtaagtaagtgcttcattcttggatgaatatatgcataaacatacctgaaagaaaacatctagtcagctgggggtatgtatacccttgaaaatacagcaccaggccaggcatggtggctcaattctgtgacctcaacactttgggaggcttaggtgggaggatagcttgagcccgggagtttgagatcagcctgggcagcatggtgaggccccatctctataag

SEQ ID NO: 97987 - DNA, 309 bp, Homo sapiens
ctacttgggagaccgaggcaggagggttacttgtgcccaaaagttgaagctagtctgggcaacatagcaagacgccatctccaaaaatatattgcatgagccaataaattcactattgaaacaataaaacagataacgtcaaaaccggttacatgaccttttgtcagctcatgactctattgtgcatttaaaattgctataaattatttgttttccttcacatttaattttctaaaatttctccccatgttaaatcatagtatcttcctaactattcagtatttggctttgttgggctttgttgttgtt

SEQ ID NO: 97988 - DNA, 1075 bp, Homo sapiens
caaagatcttgaaagcaccaggtagagaaagatgtagccattgtcaaaagactgcctgttagatgaatgggacagtgggatgaccaccctgggttcagtggtaaagtcaaatggagtaaaggatgcctgttgccaccccagctgcacttgggtgctgaagatcagaagtgaaactacagaacaaatccagatgagagctcacctaggggctcacacatatagttcaggccaaggttcagtgatggaccatcatcagtactcagagcactgaacttgtcctgggtgtgatgtatttgagagtcacttaaaatcatcatatcgctgccattttggccacccaatctcataggattctgtgaaataaatatggcactgggcagcaggagcaattcacttgtcaggaatccctcctggaatcagggcttggccaaggacttcaagccaaccacccaaggcatgaatcccagaactcctgggggcatctggcaacttcatgtgcagaatatatcttctctgacctagtgtggctgatgatgagaggtctgatgctggttgaagttcttggttttcacaggtatcttttacatttctatctttcctgctaaaccttctcagtatcttctattatggatgtattgaagttttatagtgatgggtctagatgtgtgtgtgtatgtctgcatgtgtatgcacatatgtgagttgtcaacttgagcacttgggtacttgattggcttcttaatttggatactcatgtcctttgactctgggacaatcctttgcgataattctttgatttctttctttttgtttttctctttttgtcactcctattgatcagatgtggggcctcttggactgatcctcaacacatcttacctttctcattttcttacatcttcttgcctttgttctacaacattggttttattatattttacctactattagaatttcgggctcatatatttatttttcaatagtttttccttgttagctagttgtactttgttgatgcaatatttttttttactactctttctaagaatatttattaaagagtttttaaaggtta

SEQ ID NO: 97989 - DNA, 298 bp, Homo sapiens
aaatcacaaatagcatatatccgttttatctttaatagtgtttgagcccatcatttgaaagcattggagcatgtaaccaatatttctgaaaatgaaccatggttccagtcataatctatatgctttaaaattccttccctttattctttcttcccaaatccatgacatctgaatttcaataaggaagaaaataagcatgtttttaaaatgttttagaaaagattttcaaaattagattaaaatgtttgaggaaataaaaacttctttatgtattcattgtgatactgatttttatcaa

SEQ ID NO: 97990 - DNA, 589 bp, Homo sapiens
ctagatttgacatttttcatactattataaattatataatttaaaaatatttattttctctctttatgttgctggcatacagaagtacaattgaaatttgtatattgaccttgaatgaagcaatcttgctaaatttactaatcacttagatttttctagattttttaggtacacaattatagtatctgcaaataataacagatttttttctttctctccaatttatttatatttgccctactccccccagttttactgtctaggactccagtatagtgttgaacagaaattgtgataataggtatccttgtcttttttccaacttcatagaaaaaattcccaatatttcataaatgagtattagttagctaggaccacaggtgtccaccatcttgcctggctaatttttgtattttctgtagagacagggtttcaccatattgcccctactggttttgaactcctgagctcaagtgatccaccagcctcagcttcccaaagtgctggctgggattacaggcatgagccaccactcctagcttgtagttagtcttttggttaagttcatctttttgtctttctattcaag

SEQ ID NO: 97991 - DNA, 146 bp, Homo sapiens
tcatttctggtaacatgcctaaaactgacagatcccaaattatgcatgtacctgcaatttgttaggattttgtttgttttttgtttttttgagacagtctcactctgtctgcactccaagctgtagtgcagtggcctgacctcggt

SEQ ID NO: 97992 - DNA, 887 bp, Homo sapiens
agtgttccaggtagaagtagcgtaagagggttccaaatgattcaatttgaccaatgtttgatgtgtgtttatagtgtggcaaggctgggcatggtggctcaccagcactttgggaggccgaggtgagcagatcacttgaggtcaggagttcgagatcagcctggccaacatggtgaaacctcatctctactaaaaattaaaaaaaaaaaaagcctggtgtcgtggcaggtgcctgttaagtcccagctactccaaagactgaggcaggagaattgtttgaacctaagaggcagaggatgcagtgagccaagatcatgctagtacacttcagcctgcacgacagagcgagactccatctcaaaaaaagaaaagtaaatatagtatgacaaaatgatttaaataatatttcaaacattgcagcaaaataatttaaatatttccatcaaagtttattaattatgaaggcttgagaatagtgcataaaaatgactgcttgttcctaatttatagataggacttctaaggcagtttatgccctattttgaagatctatatcaacattccctttatgaatttaaatttttaaaattggaatttatatgcggtattagcgtaaaataggattcttctttaagaggtgaggtcttagccaggcacggtgactcacgcctgtaatcccagcactttgggaggctgaggcaggcggatcacgaggtcaagagatcaagaccatcctggctaacacagtgaaaccccgtctctactaaaaatacaaaaaaattagccgagcgcggtggcaagtgcttgtagtcccagctactggggaggctgaggcaggagaatggcgtgaacctgggaggcggaggttgcagtgagccgagatcgtg

SEQ ID NO: 97993 - DNA, 492 bp, Homo sapiens
ttctgtgtgagagatagaagactgagtgaaatattcatccagtatttaagtagagcttgtttatttagctactattatagccaggcattgggcgaggttctgacaggggaaggggagtgagatacaaagttgatgaggccgggctggtggctcacatctgtaatcccagcactttgggaagccaaagctggaggattgcttgaggccaggagttcaagaccagcctggtcaatcctgtccctacaaaaaaaaaaaaaatgtttttttcattagctgggcatggtggcacacacgtgtagtcccagctacttgggaggatcagttgaggccaggagttcaaggctgcagtgagcttgatcataccactacactacagccagggagacagagtgagacctgtgtctaaaaagaacaaaaacaaaacaaagcaaaaagatgaccatgatacaagcccagactttgaagaaattgcaatctggcaggaaagggtca

SEQ ID NO: 97994 - DNA, 299 bp, Homo sapiens
attgtcttcacgttgaggaggctaaggaggaggaggaaggggaggggttggtcttgctatctcagggatggcagaggcagaagcataatctgagtataagtggacccgtgcagtttaaatgtgtgttgttcaagggtcagctgtttgttgaataaatgaatgacatgaagtattacagtggcttttgggcggtgtcgaaacttctttgtaaggattttaaggatgaaataatcacttaactgtctggaatgaacactcagataaactgagtcctccagctttctcatcagatggcttgt

SEQ ID NO: 97995 - DNA, 656 bp, Homo sapiens
  misc_feature (214)..(214): n is a, c, g, or t
  misc_feature (532)..(532): n is a, c, g, or t
  misc_feature (542)..(542): n is a, c, g, or t
agcagggctaggggaggatggcgaggagatgggtaggagagacctggtgtctggaggaagcaatgaaggaaatgggaaggaagactgggccatgaaaacagatagcgatgaggcgatgtcaggcctgttgcctgtggtggggcaatgattagcatgataacacgagttggccactatggggagcatgattaacggcctgaggatcgaggctgcnacgcctgcgcaggtgcatgggcacccagcctagggggttgaaccgagtagcatgtcagatgcgccatagtccgtggacgatccgtgggtagtacatcacgtatctgcggagagttctacgttgcgtcagtgtgatgaacagtaccatagtgtaggacaaacttgggcagatcggaggcactagaagtgggtgctcacgagtttctgtcgacactgccaagaatgattcacttatgcacgtggttgagacccatacacgacgctgagcctcgcccgtgtctgtaaacggcttgcgtaggaccatattccggtgctgagnggcccacatngcccatgcgccgtgtttgaggtctaatctcacgttacacacattggacctgttccttacatgttgaacccaatcgcttccacaaactccgccgggttgcccctatgcgaacttc

SEQ ID NO: 97996 - DNA, 297 bp, Homo sapiens
aaaggatccagcatttggaggcatacatgaaactccatcctctccaatttcagggcaaccatgtggagatgatcaaaatgcttcaccttcaaaactttcaaaggaagagttaatacagagtatggatcgtgtaaatcgagaaattgcaaaagtacaacaccagatccttaaactgaaaaagaaacaagtaaatgtctttgcttaatatattctaagaatgtgtgtttttctccctacagaagatatttttgagttttccatattttgaaactttacataaaaggaatcatgccttat

SEQ ID NO: 97997 - DNA, 336 bp, Homo sapiens
aggatttctttggaaatgagatatcttcaaataaaagttacagagaagcattctcagaaactgcattgtgatgtgtgaatacaactcagacagttgaacacttctttagaaagagcagttttgaaacactctttctacaatttgcaagtgttcatttggagcactttgaggcctatgggggaaaaggaaatatcttcccataaaaactaggcagaagcattctcagaaacttgtttgtgaggtatgcattcaactcacggagttgaaccttccttttgagagagcagttttcaaacagtctttctgaagaaactgcaagtggatatttggagtgat

SEQ ID NO: 97998 - DNA, 187 bp, Homo sapiens
tggccactggcacacatggctattgagaacctagggtatggttaagccaaatgagttgtgtcatatacgtaaaatatgttctaaaatttgagagacttagtattaaaaaaaagaatgtaaactaccccactaatgatgttttaatattaactacatactcaagtaattttttttttttttttttgag

SEQ ID NO: 97999 - DNA, 405 bp, Homo sapiens
tctccccatgctcaggtgatcctcctgcctcacctcttgagtagcagggaccacaggtgcatgccacatgccaccatacccagctaattcctgtatattttttttgtgtgtgtgtagagatggggtctccctatcttgcccaggctggtctcgacctcctggactcaagcgatctgcctgcctcctcctcctagaatgctgcgacaatcagcgtgggacaccatgcctggcgtatttttaaaatctttctgaatttataaaactacctgctctggtctgaatgtttgtgtcccctgcccctaatccctatgttgaaatcctaatccccaagttgagggtgttaggaggtggcggctgtgggaggtgaagaggtcatgagtgtgacgtcctcccgaatgggattag

SEQ ID NO: 98000 - DNA, 269 bp, Homo sapiens
tgattgaaatttaaaaacaaaaggatgcctgtacctttggtgattgagacatttctgttggcttttgggaccccaactcacaggactgggcagaagtcaggctgcaacatacagagaacttaatggaagtgagcaggcagccgaagtaacccaggctttctcatctcaagaagctcttccattgccaagaacagagggcaagttgatgtcactacaaaagtgatttttaaagaaagtcaaaccgcttaaagactgcttcttatttaggc

SEQ ID NO: 98001 - DNA, 511 bp, Homo sapiens
ttgctgacagttccctaactatagcaatgcaagtgtgctgcattaatacaatattaacctcaaggatagaagatttcaagccatagtatattgatcaaaggattgaacacaaagaatacatttttattttgataatttcttgcctggagaggtctttgaaaaagtgacaaccagaagcagaaccacatgatagcattggtattaactaaaaacaaaactttttagtattgtggaatttcataagcctttgatgtatatctttatccatcttggctattttttaagctctttaggacacaaagcatcataggctctgtgtgtgtgtgtgtgtgtgtgtgtgtgtgtgtgtgtgtgtgttttaagtagatatgatattatccctcagagaccttacttttaaaaataggttaatgcatgagataccacaatctaaatgtgatcaaataaggttatcattaatatgttttctgagacatttagggttggggcagagaactgaagaggtgagttt

SEQ ID NO: 98002 - DNA, 483 bp, Homo sapiens
gatgaaccagttgtggaaatttgcatgatgctggaacaggtgatcaggttgcaaagatcaggtaaggtgggttttgtaggttattgttgagtcaggtaattaaataaaaatctgatgaaagaggaatcaaatagccattaacacccttcctattttttgaagagggaacagcattatgcatgttgggttttgaagctcatgtgatagaagactgaaattatgtcttgacagaaccccttttttcctaaattctttggcaatttattgagtgcacgaactcaatacaggtactatgagagcagaaagtgttcttgcctgtggcttgtagtagtggttagtggtgggctttatattaccttttagtgtctctgcttcatggcttaacttcactaagcaagaggtgctccagtgtaaatgagaataatagttactacatcctaacattactgtaagaattaaacaaaatgaatttatggatgtcac

SEQ ID NO: 98003 - DNA, 464 bp, Homo sapiens
  misc_feature (429)..(429): n is a, c, g, or t
gaagcagaggaaatgggaacagcaagggcttgctgatgggatggcctctttaagggaggaagaagtaaagaagtaagaaataagcctaggccgggcgcggtggctcacgcctgtaatcccagcactttgggaggccgaggtgggcggatcatgaggtcaggagatcgagaccatcctggctaacatagtgaaaccccatctctactaaaaatacaaaaaattagccaggcgtagtggcgggcgcctgtagtcccagctactcgggaggctgaggcagaaaatagattcgtgtctgtttaacagtaacccaaataagaagccatgttaaatagagacaacttttattacaatccttatagcataccttccttttaacattatttttatgatttagctccctccaataggaaatgttgggccagccactgntttggtgcttgatatacttatggcttgttccgctg

SEQ ID NO: 98004 - DNA, 719 bp, Homo sapiens
agcctttggctgagttggcagccaaggagaactcgccaacctcgctgtgctgccaagacctgacttgacactactgctcccctttgcccgttacccgtgaaagctttgctccacagcgccccctgcagggggctggcagggcagctggctgcctgcccttggcccgttccttggctgccccggcttctgcacttacccttggtcctggaccaactccaagaattcagtgactttacactggcttttcttagagcctcttggagacaacatcctaagatactgcagaccctgtgttttgtttttggttttgaaggccctctgagggccctcaaatggaccctgaggaaatggatacctgagcaggacaaggaccttggagtcacagaggttctcgataattagagaaaggggcctgatgatactgggggtgcacagatcacatttaggtccttgagggtcaatggaggcctctcttctgtcgtgcccaagtctgggcctctgcagagagacctccatgcccagaaatcagaagtcagattgaacaagaaatcccagcctttctaggtgagctcctgcccccaaaatgctgtctccagctcacacagcaccacaggaggtttcccgccactgaagaggaggagggggccagcctcattcctctcccggctgcccctccggagctcaaagacagtgagtgaggagggaccctggtctccctc

SEQ ID NO: 98005 - DNA, 520 bp, Homo sapiens
tactaacttagtcttctcctctcctctgtctacccttagcaatatataggtaaacatatccagcttgtctaacacatcacagattattagttaacaaggtgtagattaatgagcttatattgtattgctggatcttttgagttaataacaatggtaacttgtccagaaggcctatcatcattcctagtaggtgggcacagagtaagagatattaagaagcttcctgatgagtcatcatctagcgaaggccctgtgtagggctttattataggagttacattgacttctggggcattcaaaggtctcccctcttatccatatctctgtcattttgcttctccagccacgacaacacactttcctctccaactgctccctccccaccaaaaaagaagaccctctaaaaggcaaaggaataaatattcttagaagtaaattatcttcatcccatgctgcctttttcaaagaggtgttaggatatttatcctatttctgtatttcacagtagcttttcaggctg

SEQ ID NO: 98006 - DNA, 546 bp, Homo sapiens
cgtgtagatgctgtcctccatccctgagtgtcatccgtgtagatgctgtcctccatccctgagtgtcatccctgagtgtacaaaggtatcatgcctttgttatgtctgccctcagtgtagtaacttaattaatggcctttcacttttggtagtcaatgtggcattgattcaaccagagaagaaataagagaaaatgatagggaaatacagatctgatgtaccatacaatgataaatgttcaaattataactcctgtacataacacagttacatccctgactctacatatctttgggctagatggttttgttatttctgttgttactttttccattattattttcattatgactactagcacaattttactaacactttcctatggtaatgaccattagaattcttaatatttttcatagcatacctgtttgttttggttctagattttatcttaaggatatagtcaagtacataatctcactatttagttctaaaatcagaatacgacacattgtatgtgagtaccttgactttccccagtggtat

SEQ ID NO: 98007 - DNA, 430 bp, Homo sapiens
atggaagatactaagagcctcagtctggaagcatttacctaggaagcgcatatagacagagaagatcaaggactgaggcctgagacagtcagcacttaaagggtgagcaggagaagtgccaaggagacaaggtgagaacagcagaagagtagccaaggcccaggatgttgccacagaagccaggagaggtgagcatgaaaacagaggaggaccagctgctgggacagaagagccatatggaagagctagcagcgtggaagtgactttcaagagcatcttccatggcatcatggaacaggtacctgactggagaggttggaagggctaagggagctgagtgagcaggggcagtgggtacagaccactcggtggagaaattcagacatgaaggggaacaccaacttacaaagtccctggaagaagttccggg

SEQ ID NO: 98008 - DNA, 615 bp, Homo sapiens
atggggacattcaaacagccttatggagagggacacatgatatgaacttaaagcctcctgccagtggtcaatgccaaattaccaaggcactagtgagcagatccttcagccccaggtctgctggagtttgctggaggtccactccagaccctgtttccctgggtatcatcagcgggagctgcagaacagcgaagattgctgcctgctccttcctctggaagcttcatcccaaaggggcacctgccaagatgccagctggagctctcctgtatgaggtgtctttcaacccctgctgggagttgtctcccagacaggaggcatgggggtcagggacccacttgaggggcagtctgtcccttagcagagcctgagccctgtcctgggacatccgcctctctcctcagacctggcaggcaggaacgtttaagtctgatgaagctgcacccatagctgctccttcccccaggtgctctgtcccagggagatgggagttttatctgtaagaccctgactggggctgctgcctttctttcagaaatgccctgcccagagaggaggaatctagagaggcagtctggctacagcgactttgccacattgcagtgggttccacac

SEQ ID NO: 98009 - DNA, 2361 bp, Homo sapiens
actctagaggactcttcgcggtatcataatgtagaatctcgacgctgtactcgaggctcagcgttctcaagcagtccaagaccttgaaaattaggcaggcaccagagagaagcactgaaaaatcccattggatttgtggaaaaactccagaagaaggctgatattgggcttccatatccacagagagttgttcaattgcctgagatcgtatgggaccaatatacccatagccttgggaattttgaaagagaatttaaaaatcgtaaaagacatactagaagagttaagctagtttttgataaagtaggtttacctgctagaccaaaaagtcctttagatcctaagaaggatggagagtccctttcatattctatgttgcctttgagtgatggtccagaaggctcaagcagtcgtcctcagatgataagaggacgcttgtgtgatgataccaaacctgaaacatttaaccagttgtggactgttgaagaacagaaaaagctggaacagctactcatcaaataccctcctgaagaagtagaatctcgacgctggcagaagatagcagatgaattgggcaacaggacagcaaaacaggttgccagccgagtacagaagtatttcataaagctaactaaagctggcattccagtaccaggcagaacaccaaacttatatatatactccaaaaagtcttcaacaagcagacgacagcaccctcttaataagcatctctttaagccttccactttcatgacttcacatgaaccgccagtgtatatggatgaagatgatgaccgatcttgttttcatagccacatgaacactgctgttgaagatgcatcagatgacgaaagtattcctatcatgtataggaatttacctgaatataaagaactattacagtttaaaaagttaaagaagcagaaacttcagcaaatgcaagctgaaagtggatttgtgcaacatgtgggctttaagtgtgataactgtggcatagaacccatccagggtgttcggtggcattgccaggattgtcctccagaaatgtctttggatttctgtgattcttgttcagactgtctacatgaaacagatattcacaaggaagatcaccaattagaacctatttataggtcagagacattcttagacagagactactgtgtgtctcagggcaccagttacaattaccttgacccaaactactttccagcaaacagatgacatggaagagaacatcatttactagtcctcttcaacacatagcaatggtatcattgttaattatgtgcacagtttggaaagattctctgctttcccagaaatgacactcacagcatgagagcttcctgagtgttctcgtcaagtacagctctgcaccgttgtggctctagatcactgttcagcagctgaacattcctggtgagcaaaggtttccctggtgaatttttcaccactgcgttttaggtggtgatcttaaatgggtgagatggaacgagagcacacattaaagagagagtaaattccaaaggtttcaaagaacttggtcataaatatgataatgagaagacaaagtatttatattaaaacagtttagtagccttcagttttgtgaaaatagttttcagcacagaaactgacttctttagacaaagttttaaccaatgatggtgtttgcttctaggatatacactttaaaagaactcactgtcccagtggtggtcattgatggcctttagtaaattggagctgcttaatcatattgatatctaatttcttttaaccacaatgaattgtccttaattaccaacagtgaagcactacaggaggcaactgtggcattgcttccttaaccagctcatggtgtgtgaatgttataaaattgtcactcagatatattttttaaatgtaatgttatataagatgatcatgtgatgtgtacaaactatggtgaaaagtgccagtggtagtaactgtgtaaagtttctaattcacaacattaattcctttaaaatacacagccttctgcctctgtatttggagttgtcagtacaactcatcaaagaaaactgcctaatataaaaatcatatatatggtaataatttccctcttttgtagtctgcacaagatccataaaagattgtatttttattactatttaaacaagtgattaaatttagtctgcacagtgagcaagggttcacatgcattcttttatactgctggattttgttgtgcatcatttaaaacattttgtatgtttcttcttatctgtgtatacagtatgttcttgaatgatgttcatttgtcaggagaactgtgagaaataaactatgtggatactgtctgtttatattata

SEQ ID NO: 98010 - DNA, 2996 bp, Homo sapiens
ctgcttgcctgtggaacatgttaatcagctgactactgagccagctacagggcccttttctgaaactcagtcatctttaagggattctgaggaggaagtagatgtggtgggagatagcagtgcctcaaaagagcagtgtaaagaaaacaccaataacgaactggacacaagtcttgagagtatgccagcctccggagaacctgaaccatctcctgttctagactgtgtttcagctcaaatgatgtctttatcagaacctcaagaacatcgttatactctgagaacctcaccacgaagggcagcccctaccagaggtagtcccactaaaaacagttctccttacagagaaaatggacaatttgaggagaataatcttagtcctaatgaaacaaatgcaactgttagtgataatgtaagtcaatctcctacaaatcctggtgaaatttctcaaaatgaaaaagggatatgttgtgactctcaaaataatggaagtgaaggagtaagtaaaccaccctcagaggcaagactcaatattggacatttgccatctgccaaagagagtgccagtcagcacattacagaagaggaagatgatgatcctgatgtttattactttgaatcagatcatgtggcactgaaacacaacaaagagtatgtatcataatgtagaatctcgacgctgtactcgaggctcagcgttctcaagcagtccaagaccttgaaaattaggcaggcaccagagagaagcactgaaaaatcccattggatttgtggaaaaactccagaagaaggctgatattgggcttccatatccacagagagttgttcaattgcctgagatcgtatgggaccaatatacccatagccttgggaattttgaaagagaatttaaaaatcgtaaaagacatactagaagagttaagctagtttttgataaagtaggtttacctgctagaccaaaaagtcctttagatcctaagaaggatggagagtccctttcatattctatgttgcctttgagtgatggtccagaaggctcaagcagtcgtcctcagatgataagaggacgcttgtgtgatgataccaaacctgaaacatttaaccagttgtggactgttgaagaacagaaaaagctggaacagctactcatcaaataccctcctgaagaagtagaatctcgacgctggcagaagatagcagatgaattgggcaacaggacagcaaaacaggttgccagccgagtacagaagtatttcataaagctaactaaagctggcattccagtaccaggcagaacaccaaacttatatatatactccaaaaagtcttcaacaagcagacgacagcaccctcttaataagcatctctttaagccttccactttcatgacttcacatgaaccgccagtgtatatggatgaagatgatgaccgatcttgttttcatagccacatgaacactgctgttgaagatgcatcagatgacgaaagtattcctatcatgtataggaatttacctgaatataaagaactattacagtttaaaaagttaaagaagcagaaacttcagcaaatgcaagctgaaagtggatttgtgcaacatgtgggctttaagtgtgataactgtggcatagaacccatccagggtgttcggtggcattgccaggattgtcctccagaaatgtctttggatttctgtgattcttgttcagactgtctacatgaaacagatattcacaaggaagatcaccaattagaacctatttataggtcagagacattcttagacagagactactgtgtgtctcagggcaccagttacaattaccttgacccaaactactttccagcaaacagatgacatggaagagaacatcatttactagtcctcttcaacacatagcaatggtatcattgttaattatgtgcacagtttggaaagattctctgctttcccagaaatgacactcacagcatgagagcttcctgagtgttctcgtcaagtacagctctgcaccgttgtggctctagatcactgttcagcagctgaacattcctggtgagcaaaggtttccctggtgaatttttcaccactgcgttttaggtggtgatcttaaatgggtgagatggaacgagagcacacattaaagagagagtaaattccaaaggtttcaaagaacttggtcataaatatgataatgagaagacaaagtatttatattaaaacagtttagtagccttcagttttgtgaaaatagttttcagcacagaaactgacttctttagacaaagttttaaccaatgatggtgtttgcttctaggatatacactttaaaagaactcactgtcccagtggtggtcattgatggcctttagtaaattggagctgcttaatcatattgatatctaatttcttttaaccacaatgaattgtccttaattaccaacagtgaagcactacaggaggcaactgtggcattgcttccttaaccagctcatggtgtgtgaatgttataaaattgtcactcagatatattttttaaatgtaatgttatataagatgatcatgtgatgtgtacaaactatggtgaaaagtgccagtggtagtaactgtgtaaagtttctaattcacaacattaattcctttaaaatacacagccttctgcctctgtatttggagttgtcagtacaactcatcaaagaaaactgcctaatataaaaatcatatatatggtaataatttccctcttttgtagtctgcacaagatccataaaagattgtatttttattactatttaaacaagtgattaaatttagtctgcacagtgagcaagggttcacatgcattcttttatactgctggattttgttgtgcatcatttaaaacattttgtatgtttcttcttatctgtgtatacagtatgttcttgaatgatgttcatttgtcaggagaactgtgagaaataaactatgtggatactgtctgtttatattata

SEQ ID NO: 98011 - DNA, 2620 bp, Homo sapiens
caacagagtacaaccaagtgcctgaattgagtgattcctcctagtattaagattttatcattttaattatattttttttatctagcagtttcttaacgactttgattgttggaagatcaaaatgctcttttattttggtacttgttcaggttcaagaattaaaaacttaagatgggggaagaaggctttgctttctctaactcttattttctgtaggtacttcgtaactcaggaagacctcatttattcccagtaatatgttttactaaactctttcaggtatcataatgtagaatctcgacgctgtactcgaggctcagcgttctcaagcagtccaagaccttgaaaattaggcaggcaccagagagaagcactgaaaaatcccattggatttgtggaaaaactccagaagaaggctgatattgggcttccatatccacagagagttgttcaattgcctgagatcgtatgggaccaatatacccatagccttgggaattttgaaagagaatttaaaaatcgtaaaagacatactagaagagttaagctagtttttgataaagtaggtttacctgctagaccaaaaagtcctttagatcctaagaaggatggagagtccctttcatattctatgttgcctttgagtgatggtccagaaggctcaagcagtcgtcctcagatgataagaggacgcttgtgtgatgataccaaacctgaaacatttaaccagttgtggactgttgaagaacagaaaaagctggaacagctactcatcaaataccctcctgaagaagtagaatctcgacgctggcagaagatagcagatgaattgggcaacaggacagcaaaacaggttgccagccgagtacagaagtatttcataaagctaactaaagctggcattccagtaccaggcagaacaccaaacttatatatatactccaaaaagtcttcaacaagcagacgacagcaccctcttaataagcatctctttaagccttccactttcatgacttcacatgaaccgccagtgtatatggatgaagatgatgaccgatcttgttttcatagccacatgaacactgctgttgaagatgcatcagatgacgaaagtattcctatcatgtataggaatttacctgaatataaagaactattacagtttaaaaagttaaagaagcagaaacttcagcaaatgcaagctgaaagtggatttgtgcaacatgtgggctttaagtgtgataactgtggcatagaacccatccagggtgttcggtggcattgccaggattgtcctccagaaatgtctttggatttctgtgattcttgttcagactgtctacatgaaacagatattcacaaggaagatcaccaattagaacctatttataggtcagagacattcttagacagagactactgtgtgtctcagggcaccagttacaattaccttgacccaaactactttccagcaaacagatgacatggaagagaacatcatttactagtcctcttcaacacatagcaatggtatcattgttaattatgtgcacagtttggaaagattctctgctttcccagaaatgacactcacagcatgagagcttcctgagtgttctcgtcaagtacagctctgcaccgttgtggctctagatcactgttcagcagctgaacattcctggtgagcaaaggtttccctggtgaatttttcaccactgcgttttaggtggtgatcttaaatgggtgagatggaacgagagcacacattaaagagagagtaaattccaaaggtttcaaagaacttggtcataaatatgataatgagaagacaaagtatttatattaaaacagtttagtagccttcagttttgtgaaaatagttttcagcacagaaactgacttctttagacaaagttttaaccaatgatggtgtttgcttctaggatatacactttaaaagaactcactgtcccagtggtggtcattgatggcctttagtaaattggagctgcttaatcatattgatatctaatttcttttaaccacaatgaattgtccttaattaccaacagtgaagcactacaggaggcaactgtggcattgcttccttaaccagctcatggtgtgtgaatgttataaaattgtcactcagatatattttttaaatgtaatgttatataagatgatcatgtgatgtgtacaaactatggtgaaaagtgccagtggtagtaactgtgtaaagtttctaattcacaacattaattcctttaaaatacacagccttctgcctctgtatttggagttgtcagtacaactcatcaaagaaaactgcctaatataaaaatcatatatatggtaataatttccctcttttgtagtctgcacaagatccataaaagattgtatttttattactatttaaacaagtgattaaatttagtctgcacagtgagcaagggttcacatgcattcttttatactgctggattttgttgtgcatcatttaaaacattttgtatgtttcttcttatctgtgtatacagtatgttcttgaatgatgttcatttgtcaggagaactgtgagaaataaactatgtggatactgtctgtttatattata

SEQ ID NO: 98012 - DNA, 2265 bp, Homo sapiens
actctagaggactcttcgcggtatcataatgtagaatctcgacgctgtactcgaggctcagcgttctcaagcagtccaagaccttgaaaattaggcaggcaccagagagaagcactgaaaaatcccattggatttgtggaaaaactccagaagaaggctgatattgggcttccatatccacagagagttgttcaattgcctgagatcgtatgggaccaatatacccatagccttgggaattttgaaagagaatttaaaaatcgtaaaagacatactagaagagttaagctagtttttgataaagtaggtttacctgctagaccaaaaagtcctttagatcctaagaaggatggagagtccctttcatattctatgttgcctttgagtgatggtccagaaggctcaagcagtcgtcctcagatgataagaggacgcttgtgtgatgataccaaacctgaaacatttaaccagttgtggactgttgaagaacagaaaaagctggaacagctactcatcaaataccctcctgaagaagtagaatctcgacgctggcagaagatagcagatgaattgggcaacaggacagcaaaacagtcttcaacaagcagacgacagcaccctcttaataagcatctctttaagccttccactttcatgacttcacatgaaccgccagtgtatatggatgaagatgatgaccgatcttgttttcatagccacatgaacactgctgttgaagatgcatcagatgacgaaagtattcctatcatgtataggaatttacctgaatataaagaactattacagtttaaaaagttaaagaagcagaaacttcagcaaatgcaagctgaaagtggatttgtgcaacatgtgggctttaagtgtgataactgtggcatagaacccatccagggtgttcggtggcattgccaggattgtcctccagaaatgtctttggatttctgtgattcttgttcagactgtctacatgaaacagatattcacaaggaagatcaccaattagaacctatttataggtcagagacattcttagacagagactactgtgtgtctcagggcaccagttacaattaccttgacccaaactactttccagcaaacagatgacatggaagagaacatcatttactagtcctcttcaacacatagcaatggtatcattgttaattatgtgcacagtttggaaagattctctgctttcccagaaatgacactcacagcatgagagcttcctgagtgttctcgtcaagtacagctctgcaccgttgtggctctagatcactgttcagcagctgaacattcctggtgagcaaaggtttccctggtgaatttttcaccactgcgttttaggtggtgatcttaaatgggtgagatggaacgagagcacacattaaagagagagtaaattccaaaggtttcaaagaacttggtcataaatatgataatgagaagacaaagtatttatattaaaacagtttagtagccttcagttttgtgaaaatagttttcagcacagaaactgacttctttagacaaagttttaaccaatgatggtgtttgcttctaggatatacactttaaaagaactcactgtcccagtggtggtcattgatggcctttagtaaattggagctgcttaatcatattgatatctaatttcttttaaccacaatgaattgtccttaattaccaacagtgaagcactacaggaggcaactgtggcattgcttccttaaccagctcatggtgtgtgaatgttataaaattgtcactcagatatattttttaaatgtaatgttatataagatgatcatgtgatgtgtacaaactatggtgaaaagtgccagtggtagtaactgtgtaaagtttctaattcacaacattaattcctttaaaatacacagccttctgcctctgtatttggagttgtcagtacaactcatcaaagaaaactgcctaatataaaaatcatatatatggtaataatttccctcttttgtagtctgcacaagatccataaaagattgtatttttattactatttaaacaagtgattaaatttagtctgcacagtgagcaagggttcacatgcattcttttatactgctggattttgttgtgcatcatttaaaacattttgtatgtttcttcttatctgtgtatacagtatgttcttgaatgatgttcatttgtcaggagaactgtgagaaataaactatgtggatactgtctgtttatattata

SEQ ID NO: 98013 - DNA, 1863 bp, Homo sapiens
aaaaaaaattttttaaagctagttatgctttaaaaacgcagaaaacagaaaaagcaacaacataagagtatgctaaaggatagagtgaaattcttctgatagacttgttggaagtaacatttgtatttttatatttttgattcttgtaatgatttttcactgaaccaattaaaaatttgttttcttacttagtcttcaacaagcagacgacagcaccctcttaataagcatctctttaagccttccactttcatgacttcacatgaaccgccagtgtatatggatgaagatgatgaccgatcttgttttcatagccacatgaacactgctgttgaagatgcatcagatgacgaaagtattcctatcatgtataggaatttacctgaatataaagaactattacagtttaaaaagttaaagaagcagaaacttcagcaaatgcaagctgaaagtggatttgtgcaacatgtgggctttaagtgtgataactgtggcatagaacccatccagggtgttcggtggcattgccaggattgtcctccagaaatgtctttggatttctgtgattcttgttcagactgtctacatgaaacagatattcacaaggaagatcaccaattagaacctatttataggtcagagacattcttagacagagactactgtgtgtctcagggcaccagttacaattaccttgacccaaactactttccagcaaacagatgacatggaagagaacatcatttactagtcctcttcaacacatagcaatggtatcattgttaattatgtgcacagtttggaaagattctctgctttcccagaaatgacactcacagcatgagagcttcctgagtgttctcgtcaagtacagctctgcaccgttgtggctctagatcactgttcagcagctgaacattcctggtgagcaaaggtttccctggtgaatttttcaccactgcgttttaggtggtgatcttaaatgggtgagatggaacgagagcacacattaaagagagagtaaattccaaaggtttcaaagaacttggtcataaatatgataatgagaagacaaagtatttatattaaaacagtttagtagccttcagttttgtgaaaatagttttcagcacagaaactgacttctttagacaaagttttaaccaatgatggtgtttgcttctaggatatacactttaaaagaactcactgtcccagtggtggtcattgatggcctttagtaaattggagctgcttaatcatattgatatctaatttcttttaaccacaatgaattgtccttaattaccaacagtgaagcactacaggaggcaactgtggcattgcttccttaaccagctcatggtgtgtgaatgttataaaattgtcactcagatatattttttaaatgtaatgttatataagatgatcatgtgatgtgtacaaactatggtgaaaagtgccagtggtagtaactgtgtaaagtttctaattcacaacattaattcctttaaaatacacagccttctgcctctgtatttggagttgtcagtacaactcatcaaagaaaactgcctaatataaaaatcatatatatggtaataatttccctcttttgtagtctgcacaagatccataaaagattgtatttttattactatttaaacaagtgattaaatttagtctgcacagtgagcaagggttcacatgcattcttttatactgctggattttgttgtgcatcatttaaaacattttgtatgtttcttcttatctgtgtatacagtatgttcttgaatgatgttcatttgtcaggagaactgtgagaaataaactatgtggatactgtctgtttatattata

SEQ ID NO: 98014 - DNA, 2656 bp, Homo sapiens
actctagaggactcttcgcggtatcataatgtagaatctcgacgctgtactcgaggctcagcgttctcaagcagtccaagaccttgaaaattaggcaggcaccagagagaagcactgaaaaatcccattggatttgtggaaaaactccagaagaaggctgatattgggcttccatatccacagagagttgttcaattgcctgagatcgtatgggaccaatatacccatagccttgggaattttgaaagagaatttaaaaatcgtaaaagacatactagaagagttaagctagtttttgataaagtaggtttacctgctagaccaaaaagtcctttagatcctaagaaggatggagagtccctttcatattctatgttgcctttgagtgatggtccagaaggctcaagcagtcgtcctcagatgataagaggacgcttgtgtgatgataccaaacctgaaacatttaaccagttgtggactgttgaagaacagaaaaagctggaacagctactcatcaaataccctcctgaagaagtagaatctcgacgctggcagaagatagcagatgaattgggcaacaggacagcaaaacaggttgccagccgagtacagaagtatttcataaagctaactaaagctggcattccagtaccaggcagaacaccaaacttatatatatactccaaaaagtcttcaacaagcagacgacagcaccctcttaataagcatctctttaagccttccactttcatgacttcacatgaaccgccagtgtatatggatgaagatgatgaccgatcttgttttcatagccacatgaacactgctgttgaagatgcatcagatgacgaaagtattcctatcatgtataggaatttacctgaatataaagaactattacagtttaaaaagttaaagaagcagaaacttcagcaaatgcaagctgaaagtggatttgtgcaacatgtgggctttaagtgtgataactgtggcatagaacccatccagggtgttcggtggcattgccaggattgtcctccagaaatgtctttggatttctgtgattcttgttcagactgtctacatgaaacagatattcacaaggaagatcaccaattagaacctatttataggtcagagacattcttagacagagactactgtgtgtctcagggcaccagttacaattaccttgacccaaactactttccagcaaacagatgacatggaagagaacatcatttactagtcctcttcaacacatagcaatggtatcattgttaattatgtgcacagtttggaaagattctctgctttcccagaaatgacactcacagcatgagagcttcctgagtgttctcgtcaagtacagctctgcaccgttgtggctctagatcactgttcagcagctgaacattcctggtgagcaaaggtttccctggtgaatttttcaccactgcgttttaggtggtgatcttaaatgggtgagatggaacgagagcacacattaaagagagagtaaattccaaaggtttcaaagaacttggtcataaatatgataatgagaagacaaagtatttatattaaaacagtttagtagccttcagttttgtgaaaatagttttcagcacagaaactgacttctttagacaaagttttaaccaatgatggtgtttgcttctaggatatacactttaaaagaactcactgtcccagtggtggtcattgatggcctttagtaaattggagctgcttaatcatattgatatctaatttcttttaaccacaatgaattgtccttaattaccaacagtgaagcactacaggaggcaactgtggcattgcttccttaaccagctcatggtgtgtgaatgttataaaattgtcactcagatatattttttaaatgtaatgttatataagatgatcatgtgatgtgtacaaactatggtgaaaagtgccagtggtagtaactgtgtaaagtttctaattcacaacattaattcctttaaaatacacagccttctgcctctgtatttggagttgtcagtacaactcatcaaagaaaactgcctaatataaaaatcatatatatggtaataatttccctcttttgtagtctgcacaagatccataaaagattgtatttttattactatttaaacaagtgattaaatttagtctgcacagtgagcaagggttcacatgcattcttttatactgctggattttgttgtgcatcatttaaaacattttgtatgtttcttcttatctgtgtatacagtatgttcttgaatgatgttcatttgtcaggagaactgtgagaaataaactatgtggatactgtctgtttatattatagaatgcttgttgtgacttccttttggttagattttggatttttttttttaccagtgttaaaaccagaaattggtattttttaaaatggtttgcttcacatatttaagagttttctttctgtcatttatgaagaataaggaatgtattatggaaaagagggtgatcttaagcaaccctgtaaaaaatggtaaagatttttactcagtgtgtgctgaaacactaaattaaactagcttacaaaaaggaaacacggaccatggttaaagaaaaaggcaattattaatgctcaggtgtg

SEQ ID NO: 98015 - DNA, 294 bp, Homo sapiens
tgagagtataaaaccaaacaaaataaaataatgtgaaggcattttgtaaacagttaaaaaaaaaagcatatacattaaaaaacaaatttactcaaatattttgaaattaatttaaaaattccacaatttgcgtgttatttggctatatcaaaggataggtgttgttattttctctctgacaaaagccttgtcttatgtgcagatgataagaggacgcttgtgtgatgataccaaacctgaaacatttaaccagttgtggactgttgaagaacaggtaataaatatttcaaaatc

SEQ ID NO: 98016 - DNA, 3496 bp, Homo sapiens
cgcctaatgcttgctccacagtcgcgtgctagactccggacccgccagtggtatggctgagccgactagtgatttcgagactcctatcgggtggcatgcgtctcccgagctgactcccacgttagggcccctgagcgacactgccccgccgcgggacaggtggatgttctgggcaatgctgccgccaccgccaccaccacttacgtcctcgcttcccgcagccgggtcaaagccttcctctgagtcgcagccccccatggaggcccagtctctccccggggctccgccccccttcgacgcccagattcttcccggggcgcaaccccccttcgacgcccagtctccccttgattctcagcctcaacccagcggccagccttggaatttccatgcttccacatcgtggtattggagacagtcttctgataggtttcctcggcatcagaagtccttcaaccctgcagttaaaaattcttattatccacgaaagtatgatgcaaaattcacagacttcagcttacctcccagtagaaaacagaaaaaaaagaaaagaaaggaaccagtttttcactttttttgtgatacctgtgatcgtggttttaaaaatcaagaaaagtatgacaaacacatgtctgaacatacaaaatgccctgaattagattgctcttttactgcacacgagaagattgtccagttccattggagaaatatgcatgctcctggcatgaagaagatcaagttagacactccagaggaaattgcacggtggagggaagaaagaaggaaaaactatccaactctggccaatattgaaaggaagaagaagttaaaacttgaaaaggagaagagaggagcagtattgacaacaacacaatatggcaagatgaaggggatgtccagacattcacaaatggcaaagatcagaagtcctggcaagaatcacaaatggaaaaacgacaattctagacagagagcagtcactggatcaggcagtcacttgtgtgatttgaagctagaaggtccaccggaggcaaatgcagatcctcttggtgttttgataaacagtgattctgagtctgataaggaggagaaaccacaacattctgtgatacccaaggaagtgacaccagccctatgctcactaatgagtagctatggcagtctttcagggtcagagagtgagccagaagaaactcccatcaagactgaagcagacgttttggcagaaaaccaggttcttgatagcagtgctcctaagagtccaagtcaagatgttaaagcaactgttagaaatttttcagaagccaagagtgagaaccgaaagaaaagctttgaaaaaacaaaccctaagaggaaaaaagattatcacaactatcaaacgttattcgaaccaagaacacaccatccatatctcttggaaatgcttctagctccggacattcgacatgaaagaaatgtgattttgcagtgtgttcggtacatcatcaaaaaagacttttttggactggatactaattctgcgaaaagtaaagatgtataggcatctggtgtttcagcatacataactgaagcatgtgaaacagtatcatcctcgttagtagaggaaaaccaaaacccttttttccgtcaaaattggatttgtaattaaattgtaagcctcgtaggatgtatgttggaattttaagtctttcctttggttctatgcaaataaaaaaataactgattttttaagactgtgtctgtattgttgggattgaatctagtatttgctgggagaattttttctttgtatttattttaatgtattgttctcatgtaagaatgactgatgttgtgttagttaagaattgaagataggtttagcagtaaagaagaaagcttttaaaaggattgattcagctaagcaaagttgggcagagaaatacagccattttgtttttaatgcagaaaaggaagatgttctgtagcaagggggaatattttaaaaataaaccagatcaaattaatacaatcagaaggtttcgaaatgtaaatattccttatttaagacatgtttaaattcacctactagcacgacttacatagctcaaatattgaatgtttaaaatattaatacagatggggcctctttatgtttagataaaattgaagtacttaattgaagctttttaaaaattgtaaagtaaatgaaagctattgagatctttttgtctcctataataccagggaatttgagcttgtgttctagtcattgtactagctgtagctattggtctgtccttttgacatacagctaaaagggactaaatttgtaaaaaattagtttgttatagttgaagattaacttttcctaacattgtgattattgaagttcatgaatcttgctgtcaaggaagaaaggtaagaaagctgatagctcctccatgttggtaaaatcctctccagaatcttggaacacctggcatgtgaccctagtgacgtcacagacctgagatgaagattcatgtttagccagtgttttccagccttgtacccaccatacagatctgtttattctgtttcaccctactcctccagtgagccccatattttgggaaattatctgccttatacattaactaattcaattcatgtaacactgttgagtgcttactctttgtacctctattgtgcctatattaaaggtatacaaataaataaggccatgtctgacttcaaggaactcagtttaattttgatatattcaaagatgtgattcccaaccaactcaggatgaagtaactagtgttacaactgagttgatattctaaaatataacccagtttgtacttttattactagttagcatacacattttatggcttatgggttaataaatgaattcatggactcctggactactttcattgatgaccatatctccagggatgttgttgatccccacactgccttaaggtatattatagaaacagttttattttccatttttcttgtttcctgataataaatgtatttaggactgaaaatactcctgagtactcccttggctgtatgtctgacagtctttagctatggtgactattgtttatttttaatgggtatttcagattccaagtgtatttaaaatttctaaggagatataatatagcctgtatggtttctactttatggaattatatggtcaatatttgtaaatattctatgagttttgggtgggtagaggggtgctttgcctgttttgggtacaggtttttttggatttagcttgttaattgttcaaactttctgccttctacattcctatcttattgttcgtttaatcagtttctgaaatgtaagcattacatgactattggtgagttgtgccttttataactgaaatactttactttttctcatatcctctataattgacttctattttccttaatcaaaccagctctgggaaatttaatacatttatattaattgagattattaaaacatttggactatt

SEQ ID NO: 98017 - DNA, 706 bp, Homo sapiens
cgcctaatgcttgctccacagtcgcgtgctagactccggacccgccagtggtatggctgagccgactagtgatttcgagactcctatcgggtggcatgcgtctcccgagctgactcccacgttagggcccctgagcgacactgccccgccgcgggacaggtggatgttctgggcaatgctgccgccaccgccaccaccacttacgtcctcgcttcccgcagccgggtcaaagccttcctctgagtcgcagccccccatggaggcccagtctctccccggggctccgccccccttcgacgcccagattcttcccggggcgcaaccccccttcgacgcccagtctccccttgattctcagcctcaacccagcggccagccttggaatttccatgcttccacatcgtggtattggagacagtcttctgataggtttcctcggcatcagaagtccttcaaccctgcagttaaaaattcttattatccacgaaagtatgatgcaaaattcacagacttcagcttacctcccagtagaaaacagaaaaaaaagctaaaaccagagtgggtgcgtgcgcggagctgaaagctttccactggaggtccccgaggattatcgagaaaccccagggttatttggctaccatgtgggtccccccaattggtgcagtgggacactatacgctaggggctttgggcactgacgtttaca

SEQ ID NO: 98018 - DNA, 3682 bp, Homo sapiens
cgcctaatgcttgctccacagtcgcgtgctagactccggacccgccagtggtatggctgagccgactagtgatttcgagactcctatcgggtggcatgcgtctcccgagctgactcccacgttagggcccctgagcgacactgccccgccgcgggacaggtggatgttctgggcaatgctgccgccaccgccaccaccacttacgtcctcgcttcccgcagccgggtcaaagccttcctctgagtcgcagccccccatggaggcccagtctctccccggggctccgccccccttcgacgcccagattcttcccggggcgcaaccccccttcgacgcccagtctccccttgattctcagcctcaacccagcggccagccttggaatttccatgcttccacatcgtggtattggagacagtcttctgataggtttcctcggcatcagaagtccttcaaccctgcagttaaaaattcttattatccacgaaagtatgatgcaaaattcacagacttcagcttacctcccagtagaaaacagaaaaaaaagaaaagaaaggaaccagtttttcactttttttgtgatacctgtgatcgtggttttaaaaatcaagaaaagtatgacaaacacatgtctgaacatacaaaatgccctgaattagattgctcttttactgcacacgagaagattgtccagttccattggagaaatatgcatgctcctggcatgaagaagatcaagttagacactccagaggaaattgcacggtggagggaagaaagaaggaaaaactatccaactctggccaatattgaaaggaagaagaagttaaaacttgaaaaggagaagagaggagcagtattgacaacaacacaatatggcaagatgaaggggatgtccagacattcacaaatggcaaagatcagaagtcctggcaagaatcacaaatggaaaaacgacaattctagacagagagcagtcactggatcaggcagtcacttgtgtgatttgaagctagaaggtccaccggaggcaaatgcagatcctcttggtgttttgataaacagtgattctgagtctgataaggaggagaaaccacaacattctgtgatacccaaggaagtgacaccagccctatgctcactaatgagtagctatggcagtctttcagggtcagagagtgagccagaagaaactcccatcaagactgaagcagacgttttggcagaaaaccaggttcttgatagcagtgctcctaagagtccaagtcaagatgttaaagcaactgttagaaatttttcagaagccaagagtgagaaccgaaagaaaagctttgaaaaaacaaaccctaagaggaaaaaagattatcacaactatcaaacgttattcgaaccaagaacacaccatccatatctcttggaaatgcttctagctccggacattcgacatgaaagaaatgtgattttgcagtgtgttcggtacatcatcaaaaaagacttttttggactggatactaattctgcgaaaagtaaagatgtataggcatctggtgtttcagcatacataactgaagcatgtgaaacagtatcatcctcgttagtagaggaaaaccaaaacccttttttccgtcaaaattggatttgtaattaaattgtaagcctcgtaggatgtatgttggaattttaagtctttcctttggttctatgcaaataaaaaaataactgattttttaagactgtgtctgtattgttgggattgaatctagtatttgctgggagaattttttctttgtatttattttaatgtattgttctcatgtaagaatgactgatgttgtgttagttaagaattgaagataggtttagcagtaaagaagaaagcttttaaaaggattgattcagctaagcaaagttgggcagagaaatacagccattttgtttttaatgcagaaaaggaagatgttctgtagcaagggggaatattttaaaaataaaccagatcaaattaatacaatcagaaggtttcgaaatgtaaatattccttatttaagacatgtttaaattcacctactagcacgacttacatagctcaaatattgaatgtttaaaatattaatacagatggggcctctttatgtttagataaaattgaagtacttaattgaagctttttaaaaattgtaaagtaaatgaaagctattgagatctttttgtctcctataataccagggaatttgagcttgtgttctagtcattgtactagctgtagctattggtctgtccttttgacatacagctaaaagggactaaatttgtaaaaaattagtttgttatagttgaagattaacttttcctaacattgtgattattgaagttcatgaatcttgctgtcaaggaagaaaggtaagaaagctgatagctcctccatgttggtaaaatcctctccagaatcttggaacacctggcatgtgaccctagtgacgtcacagacctgagatgaagattcatgtttagccagtgttttccagccttgtacccaccatacagatctgtttattctgtttcaccctactcctccagtgagccccatattttgggaaattatctgccttatacattaactaattcaattcatgtaacactgttgagtgcttactctttgtacctctattgtgcctatattaaaggtatacaaataaataaggccatgtctgacttcaaggaactcagtttaattttgatatattcaaagatgtgattcccaaccaactcaggatgaagtaactagtgttacaactgagttgatattctaaaatataacccagtttgtacttttattactagttagcatacacattttatggcttatgggttaataaatgaattcatggactcctggactactttcattgatgaccatatctccagggatgttgttgatccccacactgccttaaggtatattatagaaacagttttattttccatttttcttgtttcctgataataaatgtatttaggactgaaaatactcctgagtactcccttggctgtatgtctgacagtctttagctatggtgactattgtttatttttaatgggtatttcagattccaagtgtatttaaaatttctaaggagatataatatagcctgtatggtttctactttatggaattatatggtcaatatttgtaaatattctatgagttttgggtgggtagaggggtgctttgcctgttttgggtacaggtttttttggatttagcttgttaattgttcaaactttctgccttctacattcctatcttattgttcgtttaatcagtttctgaaatgtaagcattacatgactattggtgagttgtgccttttataactgaaatactttactttttctcatatcctctataattgacttctattttccttaatcaaaccagctctgggaaatttaatacatttatattaattgagattattaaaacatttggactattcctggctgtcttactttgtattttctatatatcatgctctcttgtttttattttgtcatcttactggcttgttatttttttctccttgttattcctccagtggtttggaagtaattaaacctattgctatttctttagtgattaccttttttctttaagtttagagttaattagtagccacatctt

SEQ ID NO: 98019 - DNA, 3271 bp, Homo sapiens
aggaaggcagctgtacggctttcatgagttgtttcaacagagggagaagaagccaggagagccaatttctgacggcaagtgttgaagaaggttcatatgcttgctaccttccaaacagctcttcaggcagaagcaggtacacagacagtgctggcggaaaaacctgagaagcagctatcagtattagaccacatacgaaagcctcttcgggacatttgcaagcatccagagcagagatgttaaaaattcttattatccacgaaagtatgatgcaaaattcacagacttcagcttacctcccagtagaaaacagaaaaaaaagaaaagaaaggaaccagtttttcactttttttgtgatacctgtgatcgtggttttaaaaatcaagaaaagtatgacaaacacatgtctgaacatacaaaatgccctgaattagattgctcttttactgcacacgagaagattgtccagttccattggagaaatatgcatgctcctggcatgaagaagatcaagttagacactccagaggaaattgcacggtggagggaagaaagaaggaaaaactatccaactctggccaatattgaaaggaagaagaagttaaaacttgaaaaggagaagagaggagcagtattgacaacaacacaatatggcaagatgaaggggatgtccagacattcacaaatggcaaagatcagaagtcctggcaagaatcacaaatggaaaaacgacaattctagacagagagcagtcactggatcaggcagtcacttgtgtgatttgaagctagaaggtccaccggaggcaaatgcagatcctcttggtgttttgataaacagtgattctgagtctgataaggaggagaaaccacaacattctgtgatacccaaggaagtgacaccagccctatgctcactaatgagtagctatggcagtctttcagggtcagagagtgagccagaagaaactcccatcaagactgaagcagacgttttggcagaaaaccaggttcttgatagcagtgctcctaagagtccaagtcaagatgttaaagcaactgttagaaatttttcagaagccaagagtgagaaccgaaagaaaagctttgaaaaaacaaaccctaagaggaaaaaagattatcacaactatcaaacgttattcgaaccaagaacacaccatccatatctcttggaaatgcttctagctccggacattcgacatgaaagaaatgtgattttgcagtgtgttcggtacatcatcaaaaaagacttttttggactggatactaattctgcgaaaagtaaagatgtataggcatctggtgtttcagcatacataactgaagcatgtgaaacagtatcatcctcgttagtagaggaaaaccaaaacccttttttccgtcaaaattggatttgtaattaaattgtaagcctcgtaggatgtatgttggaattttaagtctttcctttggttctatgcaaataaaaaaataactgattttttaagactgtgtctgtattgttgggattgaatctagtatttgctgggagaattttttctttgtatttattttaatgtattgttctcatgtaagaatgactgatgttgtgttagttaagaattgaagataggtttagcagtaaagaagaaagcttttaaaaggattgattcagctaagcaaagttgggcagagaaatacagccattttgtttttaatgcagaaaaggaagatgttctgtagcaagggggaatattttaaaaataaaccagatcaaattaatacaatcagaaggtttcgaaatgtaaatattccttatttaagacatgtttaaattcacctactagcacgacttacatagctcaaatattgaatgtttaaaatattaatacagatggggcctctttatgtttagataaaattgaagtacttaattgaagctttttaaaaattgtaaagtaaatgaaagctattgagatctttttgtctcctataataccagggaatttgagcttgtgttctagtcattgtactagctgtagctattggtctgtccttttgacatacagctaaaagggactaaatttgtaaaaaattagtttgttatagttgaagattaacttttcctaacattgtgattattgaagttcatgaatcttgctgtcaaggaagaaaggtaagaaagctgatagctcctccatgttggtaaaatcctctccagaatcttggaacacctggcatgtgaccctagtgacgtcacagacctgagatgaagattcatgtttagccagtgttttccagccttgtacccaccatacagatctgtttattctgtttcaccctactcctccagtgagccccatattttgggaaattatctgccttatacattaactaattcaattcatgtaacactgttgagtgcttactctttgtacctctattgtgcctatattaaaggtatacaaataaataaggccatgtctgacttcaaggaactcagtttaattttgatatattcaaagatgtgattcccaaccaactcaggatgaagtaactagtgttacaactgagttgatattctaaaatataacccagtttgtacttttattactagttagcatacacattttatggcttatgggttaataaatgaattcatggactcctggactactttcattgatgaccatatctccagggatgttgttgatccccacactgccttaaggtatattatagaaacagttttattttccatttttcttgtttcctgataataaatgtatttaggactgaaaatactcctgagtactcccttggctgtatgtctgacagtctttagctatggtgactattgtttatttttaatgggtatttcagattccaagtgtatttaaaatttctaaggagatataatatagcctgtatggtttctactttatggaattatatggtcaatatttgtaaatattctatgagttttgggtgggtagaggggtgctttgcctgttttgggtacaggtttttttggatttagcttgttaattgttcaaactttctgccttctacattcctatcttattgttcgtttaatcagtttctgaaatgtaagcattacatgactattggtgagttgtgccttttataactgaaatactttactttttctcatatcctctataattgacttctattttccttaatcaaaccagctctgggaaatttaatacatttatattaattgagattattaaaacatttggactatt

SEQ ID NO: 98020 - DNA, 324 bp, Homo sapiens
ggcccatgaagatgtctaaaccaaggggaagtgtttctggccccctagaattagtcttttggaaagattaaggaaatgatcagaaattacttaattttcactaacaaatgagggaatgggggatggacagcttttttatggtggtagatgttttgaatctgacttcttttcccttcagagtctgataaggaggagaaaccacaacattctgtgatacccaaggaagtgacaccagccctatgctcactaatgagtagctatggcagtctttcagggtcagagagtgagccagaaggtaagtcatggtgtgtgttgttacagggt

SEQ ID NO: 98021 - DNA, 176 bp, Homo sapiens
agtgcatgcattctccttgcattttcaactgagaaataggtctgatactttggtatgaaattcacagagaatcccactgaaattttctctgtgcatatccttatcctttatgtatggatcacctagagcaagttcatttattcacatttaaacatagatttctgaaactcctcctc

SEQ ID NO: 98022 - DNA, 425 bp, Homo sapiens
attgcaggttgtgataggccaacttggattctgacaaagtaacttcttattaaggcctctctatgaataagtttctgttccttagtttgaaaacattaccatgataatagtaatggtaatagctgacatttattggattcgttctctttttcttaggcattatgcacattatttgaaattatgaattccataattctatagagacatcttaatgattgatttctttttgaaaacctattttaacaaactggataatattgttgactaggaggtttcttttgggtagaaccacagtaatgatggtaacgctgtttggagtttgataatgaatatgtatactttttatgaaacaccactctggtaaatgtgatgaaatgtacatgacagccctctgtttacattctttaattttgagggtggactct

SEQ ID NO: 98023 - DNA, 675 bp, Homo sapiens
agtattttatggtgaggagcaagcaagcaagaaaggttattagcaagcaggaagcacagaggaagtgccttctggatctcaaacctggttgctggctaccagaggaaggaagaggagcagtttcgccattgccaaccacagagcagccgaccggtgcatcaccgaggccggctccgtcagctcggtcagctcgggtgggcttatttctttgagtggaggcaccactcagttctcagttcagaggaaaaagaatgagtggacaatgttgctgttgttgtctgcacagaatgctaggggagtgaaaggtgtttaaatagaggaagggaaagttcagaacagctgccaggccagagcagatgctgggagggcgggaagcggtgagaaggctggggtacaggattgctcccgagacccgcccaggcactggatgcacctgcagcctgagagcagcagggggcggggtgccgggaggagagggatttcagatcccctgtgccctgtggacgtcagaaagcaggactttctcttctgaaacctgggctagttctcaggtgcaacaggccctgggtgtgatgctctgaccaggcgccccgggtgtaagtactcaggcttctcgtgcttcctcttcatactacaccttttggaacccaagaacctcgcggctgctccttctgg

SEQ ID NO: 98024 - DNA, 361 bp, Homo sapiens
actaccatgagaacagtatggagtaaaccacctccatgattcaaattatctcccaccgggtccctcccacaacatgtgggaattatgggagtacagttcaggatgagatttgggtggggaacgcggaggcaaaccatatcagtaggtgtatgtctaacttcataaaatattgcaaaatggcttcccaaagtaaatcccaattttattagcatttttctctcaagaggataaggaatttatttttactatagccttttaaaataggtttgtgtcattagctccaatgtacagatctgaaaaacaaagtggcttcctgattcactaatggtcaatgtgtctctagtttgagaccgttaatata

SEQ ID NO: 98025 - DNA, 651 bp, Homo sapiens
aggcagaagggcagccaggaccatcagctcggtgccagccatagcaatagtttcagacccgtggagtcagctgtgctgttgccaacctccatcacctgtccgcctttatcctgggctctgttcctgtggatttgaacaaatagatgagcggcatcggaagaaagctttagctgcatgtgtttgggtgaccacgagagggcagcacgtaagagaccagtgtcggccccgctgccttcttgaacacaccggaagcctcctaggaaaactgcagattttgtcagactgtgaagtagaagagtcaaagagccttcattgcttccttttaaatgaccagcctactaaggaatttagaatgcccaagtaaggactgctggtcagactggacttcaaaattcctggatccttaagacccaatgcatcagacaaatgtcctgctggatcctcccaccgtcagctaagggacagtgctagctctctggtgagggagatccgtgtggaggtctctggcattcctgggtcagtggatggctgggagaactgctcagctccaggttccagggcctctgatcaaagccaaccctgggggccagccagagatatcgcaaacctaaggactaacgtggaatctacacctgccttgggagtaaagaa

SEQ ID NO: 98026 - DNA, 522 bp, Homo sapiens
atgttccaaacaaatgatgacgccatattatcagagatcagttacaaaccaaggttgcatactacctatgaatttccagtggtttgctttgtgaagaggcttaaattcccctctgtgatgcattttggaatgagtgggtttgatgcccacaccttgaaagaaatccctcaaaaaacaaaaggacaagagtcaccaactcccacacaaagtaaaacatggacacttaattttaacagtgttaataaggagcaactatccaagaagtcactgtatcaataatgcctgtgttataacaccctctcctccctaaagcaagggaacaagtgatacatcttgtctgaaaaccagtttcatcaatactgttgatgtgtctgtacaaagatgagtagcaacatctgttaccagtttcactacattttggagttttgaataacatatctataccatgatatttatactttttaatgagttaattttaagtgaaattgccattctaactctgaaatcaagctcatacataat

SEQ ID NO: 98027 - DNA, 467 bp, Homo sapiens
ttcatggtgctttcatccacctcagatggatccagtcacagctcctctccaagggctcttctaaaccattttcacatgctcacaacccaaaaacgaacaattcaagaaggaaaaacttagtctctgaagcataaacaacttcaacctgtcaagcatctgagcaggggacacacaggacactggggaacaatttttgacctccacgcagagagaacaaatgagcctctacaggaacctgagccgcaccttccgcgtttccatgttgctgggacctcaggaagtctgagcacagcagtgttctcccagaaatgaggaccagcaccgcgctcgcctattttcatcccaaacatctacaaaacaattcctagacaaactcccctggggaaaggaagggcaacgaagcaagcaagaggaaaaacaacccagaaacttctcatagtaacctgaagtttttgtttctgtttctg

SEQ ID NO: 98028 - DNA, 487 bp, Homo sapiens
cactgaccaggcagcactaacaagcaatggggaaactgagtcatttttatggacgtgtctagtctccagtatgttatatgttcctggggcacttgataaaccccttcctcttttccttctctgctattttgttctgttcctcagagtagtgggagagcgctctgcctgaacacttgatcgtgtgttgtggaccattccctgctgagtaatgacgtgcatcttttcgtgaacttgctgatcacttctgtatcttcttttctggagtgtctgttcaaattttttgctgatttttctttacttgaagacagagagaaacagggagattaagagagaccaaattttcctcccagtgtatgatttccttaataatttgatgatagtgtatcttgacgagcagtaatttttaattttttgaggttcatttgatcactttttattattacacctgcttttgtgctgcttaagatatcattgcttattccaattg

SEQ ID NO: 98029 - DNA, 729 bp, Homo sapiens
agcagtggcaacccactcgggtccccttacgcactgtggaagctttgttctttcgctctttgcaataaatcttggtgctgctcactcttcgggtccacactgcctttatgagctgtaacactcaccccgaaggtctgaagcttcactcctgaagccagcgagaccgcgaacccactgggaggaatgaacaactccagatgtgccgccttaaaagctgtaacactcactgcgaaggtctgcagcttcactcgtgagccagcgagaccacgaacccaccagaagtaagaaactctgaacacatccgaacatcagaaggaacaaactctggacatgctgcctttaagaactgtaatacttaccgcaagggtccgcggcttcattcttgaagtcagtgagaccaagaacccaccaattccagacacaaaaagacaatacctgccaatgccaagacgacactggtgctggcactacctgacaaacattttaaagcagccacgacaaaatgcttcaaggagcaatgacaagcacccttaaaacaaatgaaccaagtctcagccaaaaacagtatttaaaaatggaaattttaggccaggcgtggtggctcacacctgtaatcctagcactttgggaggctgaggcaggcggatcacttgaggtcaggagttcaaaaccagcctggccaacatggtgaaaccccatctctactaaaaatacaaaaaaattagttgg

SEQ ID NO: 98030 - DNA, 457 bp, Homo sapiens
tctgtcattttcgttttacccccgccgactttgtgctgttgggcattccgctcgccgttcatgaaagcgttccctcttgcttcatcctgatttgctgcttttagtttcatggtcttggaaacccaagcaatacactagtcaggactgtgccctgcatgggagcgaggccctgctgggaatgcaaccaaagagttagagtgtggcagccaccgtgactttggtacacttctctacctggattctgggctgggttcggagtgtttgctggaaagtggtctctgaataagcagggtgttcctccgtttaccatcaacaaggtgcacagatgactcaaagctcagaggtccttacaactgaaaacccagcccactggactccagggagcaatgaaaaaccacttgctaccctttaggggaggcctttgaggacccttcccagtccccacacatcccttctc

SEQ ID NO: 98031 - DNA, 710 bp, Homo sapiens
agcactactttgttgttcttcacaattagttggagctttctttggtcaacagcagatgtgactaagaaaatcacgctgtttcacttagagcagtggtcaccaagtgtggtccttaggccacacaggtcagcatcacctaggaactaggaaatgcaagttcttaagcaatcccacccagacctactgaattggaagtgctgaggatggggtccagcaatctgtggttgaacaagctctgcaggcatccaggagcagagctgtggggcagcagaatctgtgatgacagagaatgatgatgtatttttgccagcagatgcttttgctcctgttttgataccccaatattcggatgcagaaaaggactctgagcattgctgacgggtgtgctctgcacacctatctcttcaggatctgaataatttggtggaaagacaatgccttttctggaaaagggtgtcaggtcagtcatattggaggatgcaaatttccttatgtgatgggagtgagggttggggtagggcacttcacggagcattcagcagtctgcaattaagcatcactccaaggctttctgcataggtgatggctgtttctgcatcatggggcaaaccaggtgctagaacttcaaatgccaattaccaaaggcgcttcctgcggaggaaacctctctacaactcacctgacccagaaggcacacatttttttctggg

SEQ ID NO: 98032 - DNA, 817 bp, Homo sapiens
tggcatgatctccactcactgcaacctctgcctcctgggctcaagcaattctcttgcttcagcctcccaagtagctggaattacaggcatgtgccaccatgcctggccaaagacacttttttatagctctgcctgctgctataacaagtgttcctaaatacccatgtacatcctatattattagatttcctcaactctggttagctatgactgaaacattcatgccattgcagccagtgccctggaaagctataagcaagtcttaagacctgtgataagggctgacttgcaagctagctgccgatccatcttaatatctgacgagcccagtcatgttggctgtgtttaattgatccatttcctacttgcttcctcaacccagaggccaagggcagcacaaaaggatagtgaatctaaatgtctccagttttttgaggtataggaatctcctatgaagtggcagacctttgagaaatagtattatgagctgttctgttttgctgtggctttggaaaacctttggattcctctactgaaaatttgtttgaaaaaaaaatctttttaatgaaacagtgtgagtcataaagcagccaccaccccttctcataatagcatttctcaccaggggaatttttggtagctgttgggggagggatttgagtaggttgtggatgataaatcccttgaggggaacataaccaaaggctgccatatcagaacgctggtgctttccatgctgacaccaagccctgaattcaaagtgcaggacagcagaatagaacagagaagcctgtgctcagtgaattgctgcagtagc

SEQ ID NO: 98033 - DNA, 452 bp, Homo sapiens
ctgaagtcaagtcgcctctccctgatgtccagctgcttctcttctctgctcgctgagtctggggtcttcatgggcacaggatgggaggtgctgtaggtagttttggaaaaggcaacattcgattggtaaaaagacactcagaaagaaccattcaggagagagcagacaaacagggatggaaattctcactttgggccacaggtttcaggctttttggctcgaaggtggggttttgctgggcacctgtccctgtctgcctagaatttctctgcctcctgtctctatcaaaactatcatagaaaatatgcttccctctcacctttttcctccaaccacccagttcctgaaaccagacacaactattgttacggaaggaaagagttgaagtattctctttgaagtaaatagcttagtaatcagcttcaaatattttatgtgtagaatttttggtg

SEQ ID NO: 98034 - DNA, 675 bp, Homo sapiens
tcccgggttcacgctcctgcctcagcctcccgagtagctggaactacaggcgcccgccaccacgcccagctaatttttgtattttcagtagagacaggatttcattgtgttagccgggatggtctcgatctcctgacctcgtgatccacccgcctcggcctcccaaagtgctgggattacaggcgtgagccaccacaccccgccacttcaaatactctttaactttacacttaagcaaagaaatattacatatttcagtcctgaaaatattatgataaatcaaatagaccctatgacataggatatattaaatatttaagttttggaaatgtcctttatatacaaaatatttccattgttaacaagtgcttttcaaaaaatatttttattataccttagaaagagccaatttagggtctacactatctttgttcatctcgttttcttttttgcacatattcctttactaatgtagattagcactacaagataaaaagtatccagcatcataacattgtaattaattcccccatatcaaattatatgaaaaatcccacctcagacactctgccaaagggtatggaacatttaatcaagatgaagtgcttcaattgaagcagtatatgctcacctctatcagtaattttgtctcactttatttcaaagtattattat

SEQ ID NO: 98035 - DNA, 462 bp, Homo sapiens
agatttccctctcaaatgtgtcccaccattgtctgtctgctctctttaaacaaatggcacctctatttacctaagcacttggacaaaaaccctggtgatttcagttccttttcctcttccttccacacctcacttaccagcatacctggtaggtcctatctctaaattacaccccaaacccatctcttcattctctactgtcatcactgaagacaagcccacaacagtctctagatgggattacaccctgtttccaactcttgtctccatatctataatctgttcttcagccagttgcaaaagtcaagtaaacacacacacacacacacacacacacgcacgcgtgtgcgcaaaacccctcattttatttctggctcccagccctcaacaatcctccacccaccaactaaatcccaaagtcaaaagcttcagccagtatatctcagagaaccagggagcctt

SEQ ID NO: 98036 - DNA, 274 bp, Homo sapiens
tccattatcctctcacccatccatccatcatccactcatccatcatccacacactcacacatccttcatcagcacacccatccatccctcattgtggtatggatcctcccacccatccatctatctatccatcattcacccaccatccatccatcatccacccacccctccgtccatcatgctcccactcatccctcatccacccaccacacactcatccctcatcccccaccacacactcatccctcatccacccaccacgcactcatccctc

SEQ ID NO: 98037 - DNA, 610 bp, Homo sapiens
tttggtaatcactaaagaacatatctaggtattaattctttagttgaaacattttgaatttatgacattaccatatcttaagcaattatttattgaatatatacagtgtcctgtttctttttgttcttctatttcttcttatccagttcaatattcaaccatgttccagttacaataacagaaggcttactgtaatgagaattgaaattcaaattctgagagtctgtattcgtaactaattatgtatgtgtcatagtttctcagaaaggtatgatattcatgaaaatggggattcagtttttcttcaaagataagttctatcatagtagaaaatagtgttattttcaaagcagcattactctaacttctgaagttattcatagttgaaggagaacattctttatttttaaacaaacatacatacacatccagtccatgcttattttggttgacttgataaattgtgggcaatatatgtgtatatatgggtcattaatgatgataggctaatataatatatttggggcacagacaaagtttcataatatattgttaaatggaaatcaaatagaccaaacatgcatgcagcataattgtatttttggtaaaa

SEQ ID NO: 98038 - DNA, 258 bp, Homo sapiens
cttttgcagactcctcgctctcctgggtaaaatgaacccatattagcttgatagaggataagaaaccatttgaagagttgaggcatgatatctgttggtcagccaagccctaggagaaggacctctaagccagcctgcatttaattaacctcaaatgcatgaagtagctaagcccaataaaaggacccagttgaacccagtttaaattcccatgataatacaaattattaccaaaataaatatattttgttttaagct

SEQ ID NO: 98039 - DNA, 264 bp, Homo sapiens
tcaaatgtgggcaaagttttatgcgaagaaggatgttctttgtagcataatttatatgaggaattagaaacaccctgaggtccatcagctagggaaagacagcagaggggacagggcagcaccaggagggcttggcagccacagcaggggctgggctggcatctggcaagatccaggtctttgtgggacaaagaatcttagagaagcaacggggacacaggctgtccagtgcagcaccagtgaattcaccaagatgaagagttg

SEQ ID NO: 98040 - DNA, 235 bp, Homo sapiens
agggctaggaggggcatgagagctggatcacagccagaatttgggcctctctagatcggggaggaacaaaggggaaagtacccagaaggttcaataagactctctcgctgcacgccatgccccagccccagggttgggctgggcgggtgcccttctctagccattaggttacacagcctcactcctcactggaccaagctcagcccactgggtgccttgactcacgaccttcccc

SEQ ID NO: 98041 - DNA, 413 bp, Homo sapiens
ccaacgtgcgatgctatgaggctcacaggtacaaaccggaagcaggcagactctgcagctgttggaggtgacttggaggctgagcagacggacctgggcccgccctgcagctggtcgggtgctgagcccaccccagagaggcagacacacaaggcacactaactataaagaaggcagtgggcaggtgctgagcaggagcagagagccatcatcaggggcttgcaaggcggcggggcggggtgggggaaggaagcctgtctttaactcatgagggcagacaggggtgacaccaggtctgtggtggggcacagcagggtctcaatgccagagcctctgctgggaggtcatgagatcacgttctgttccatatttcctcacttctggccacttccctgacccagtgaacatgcatt

SEQ ID NO: 98042 - DNA, 895 bp, Homo sapiens
ggccttgggtgggaacaaccgttttttcccccctctcccctccccgaccccatcaacatcgtgcgacagtccgggcagttgagaaggccaccccgcttcgtgcctgcagcccaggacatgtacttgtagacaggattcaaagcagttaagaatgtctctgccaagtcgacaaacagctattattgttaaccctcctccaccagaatatataaatactaagaaaaatgggcgattgacaaatcaacttcagtatctacaaaaagttgtcctaaaggatttatggaagcatagtttttcatggccctttcaacgtcctgtggatgctgtgaaactaaagttgcctgattattataccattataaaaaacccaatggatttaaatacaattaagaagcgcttggagaataaatattatgcgaaggcttcagaatgtatagaagacttcaatacaatgttctcaaattgttatttatataacaagcctggagatgacattgttcttatggcacaagctctagagaagctgtattcataatttcataagacggatccagaccaaaattaaagatcttctgcagcaaatggaagaagggctgaagacagctgatccccatgactgctctgcttatactggctggacaggcatagcccttttgtacctgcagttgtaccgggtcacatgtgaccaaacctacctgctccgatccctggattacgtaaaaagaacacttcggaatctgaatggccgcagggtcaccttcctctgtgggggatgctggccccctggctgttggagctgtgattttatcacaaactcagaagtgactgtgagtccaggaatgtgtcacaaaacttttgcagctccagagatcggatgtctgccaagaatcagacc

SEQ ID NO: 98043 - DNA, 712 bp, Homo sapiens
atggattgactgtagaatctttttcaaataaaatacaaaacaagtgctctggagaagagcagaaagaacatcagcagtcatcagaagctcaagataaatccaaactctggcttctcaaagaccgtgatttagcaaggcagaaagaacaagagaggaggaggagagaagcaatggtgggtaccattgatatgacccttcaaagtgacattatgacaatgtttgaaaacaactttgattaaaactcagtttttaaattaaccatcaacttaaaatgaatggtaaaagatcaaaatgcatatggtaaaatgattgctttcagataacaagataccaatcttatattgtattttgactgctctaaaatgattaaacagttttcacttacatttttaatagctatatgcttattttttaaacgacataattcaaaggaaatttaataattttggatccctaaaaattggacaaattcccagatattcgttcattctataaataatctgtctatatattataggccctgtactaatgcaatgaaaatccaagaagatagcgtcctgcttgtgtttaacaatgacagagtatgtttactaagttcaataagtgaaaaataatgaagaagtatatgacaggtgtataaaagacatagttcctgttgagtatttaaagttttagaagcagataatcgtcgtggctttagaaatatttagat

SEQ ID NO: 98044 - DNA, 3399 bp, Homo sapiens
  misc_feature (933)..(933): n is a, c, g, or t
aaccagaagagcattttaagaatcataatagttcagtgcagatgttcctgggaggtcaagttaagagtcaaaaataattcattagatttaacaatttagcatggacatgtacttgtagacaggattcaaagcagttaagaatgtctctgccaagtcgacaaacagctattattgttaaccctcctccaccagaatatataaatactaagaaaaatgggcgattgacaaatcaacttcagtatctacaaaaagttgtcctaaaggatttatggaagcatagtttttcatggccctttcaacgtcctgtggatgctgtgaaactaaagttgcctgattattataccattataaaaaacccaatggatttaaatacaattaagaagcgcttggagaataaatattatgcgaaggcttcagaatgtatagaagacttcaatacaatgttctcaaattgttatttatataacaagcctggagatgacattgttcttatggcacaagctctagagaagctgtttatgcagaaattatctcagatgccacaagaagagcaagttgtgggtgttaaggaaagaatcaagaaaggcactcaacagaatatagctgtttcttctgctaaagaaaaatcatcacccagcgcaacagaaaaagtatttaagcagcaagaaattccttctgtatttcctaagacatctatttctcccttgaacgtggtacagggagcttcagtcaactccagttcacaaactgcggcccaagttacaaaaggtgtgaagaggaaagcagatacaacaactcctgcaacttcagcagttaaagcaagtagtgaattttctccaacattcacagaaaaatcagtggcactgccacctataaaagaaaatatgccaaagaatgttttgccagattctcagcaacaatataatgttgtgnagactgttaaagtaactgaacaattaaggcactgtagtgagattcttaaagaaatgcttgcaaagaaacatttttcatatgcatggcccttttataatcctgttgacgttaatgctttgggactccataactactatgacgttgtcaaaaatccgatggatcttggaactattaaggagaaaatggataaccaagaatataaggatgcatacaaatttgcggcagatgttagattaatgttcatgaattgctacaagtacaatcctccagatcacgaagttgtgacaatggcaagaatgcttcaggatgttttcgaaacgcatttttcaaagatcccgattgaacctgttgagagtatgcctttatgttacatcaaaacagatatcacagaaaccactggtagagagaacactaatgaagcctcctctgaagggaactcttctgatgattctgaagatgagcgagttaagcgtcttgcaaagcttcaggagcagcttaaagctgtacatcaacagctccaggttttgtcccaagtacctttccgtaagctaaataaaaagaaagagaagtctaaaaaggaaaagaaaaaagaaaaggttaataacagcaatgaaaatccaagaaaaatgtgtgagcaaatgaggctaaaggaaaagtccaagagaaatcagccaaagaaaaggaaacaacagttcattggtctaaaatctgaagatgaagataatgctaaacctatgaactatgatgagaaaaggcagttaagtctgaatataaacaaactccctggagataaacttgggcgagtagttcacataatacaatcaagagagccttctctgagcaattccaatcctgatgagatagagatagactttgaaacactgaaagcatcaacactaagagaattagaaaaatatgtttcggcatgtctaagaaagagaccattaaaacctcctgctaagaaaataatgatgtccaaagaagaacttcactcacagaaaaaacaggaattggaaaagcggttactggatgttaataatcagttaaattctagaaaacgtcaaacaaaatctgataaaacgcaaccatccaaagctgttgaaaatgtttcccgactgagtgagagcagcagcagcagcagcagctcatcagagtctgaaagtagcagcagtgacttaagctcttcagacagcagtgattctgaatcagaaatgttccctaagtttacagaagtaaaaccaaatgattctccttctaaagagcatgtaaagaaaatgaagaatgaatgcatactgcctgaaggaagaacaggcgtcacacagataggatattgtgtgcaagacacaacctctgccaatactacccttgttcatcagaccacaccttcacatgtaatgccaccaaatcaccaccaattagcatttaattatcaagaattagaacatttacagactgtgaaaaacatttcacctttacaaattctgcctccctcaggtgattctgaacagctctcaaatggcataactgtgatgcatccatctggtgatagtgacacaacgatgttagaatctgaatgtcaagctcctgtacagaaggatataaagattaagaatgcagattcatggaaaagtttaggcaaaccagtgaaaccatcaggtgtaatgaaatcctcagatgagctcttcaaccaatttagaaaagcagccatagaaaaggaagtaaaagctcggacacaggaactcatacggaagcatttggaacaaaatacaaaggaactaaaagcatctcaagaaaatcagagggatcttgggaatggattgactgtagaatctttttcaaataaaatacaaaacaagtgctctggagaagagcagaaagaacatcagcagtcatcagaagctcaagataaatccaaactctggcttctcaaagaccgtgatttagcaaggcagaaagaacaagagaggaggaggagagaagcaatggtgggtaccattgatatgacccttcaaagtgacattatgacaatgtttgaaaacaactttgattaaaactcagtttttaaattaaccatcaacttaaaatgaatggtaaaagatcaaaatgcatatggtaaaatgattgctttcagataacaagataccaatcttatattgtattttgactgctctaaaatgattaaacagttttcacttacatttttaaaaaaaaaaaaaaaaaaaaaaaaaaaaaaaaaaaaaaaaaaaaaaaaaaaaaggggggggagcaacacaaaaaataacccagaaggggcaacaagaaaaagagacaccacgaaaatatgatagaaaaaagagaggccccccaaaagagagagaacaaaaaaaaacagagaagcacaagagagcacataaaaaaaaagaagacaacgggaaaaacagtagaaaagaagaaacaacagagaagagaaacaaaaacagaaggaga

SEQ ID NO: 98045 - DNA, 3410 bp, Homo sapiens
  misc_feature (944)..(944): n is a, c, g, or t
ggccttgggtgggaacaaccgttttttcccccctctcccctccccgaccccatcaacatcgtgcgacagtccgggcagttgagaaggccaccccgcttcgtgcctgcagcccaggacatgtacttgtagacaggattcaaagcagttaagaatgtctctgccaagtcgacaaacagctattattgttaaccctcctccaccagaatatataaatactaagaaaaatgggcgattgacaaatcaacttcagtatctacaaaaagttgtcctaaaggatttatggaagcatagtttttcatggccctttcaacgtcctgtggatgctgtgaaactaaagttgcctgattattataccattataaaaaacccaatggatttaaatacaattaagaagcgcttggagaataaatattatgcgaaggcttcagaatgtatagaagacttcaatacaatgttctcaaattgttatttatataacaagcctggagatgacattgttcttatggcacaagctctagagaagctgtttatgcagaaattatctcagatgccacaagaagagcaagttgtgggtgttaaggaaagaatcaagaaaggcactcaacagaatatagctgtttcttctgctaaagaaaaatcatcacccagcgcaacagaaaaagtatttaagcagcaagaaattccttctgtatttcctaagacatctatttctcccttgaacgtggtacagggagcttcagtcaactccagttcacaaactgcggcccaagttacaaaaggtgtgaagaggaaagcagatacaacaactcctgcaacttcagcagttaaagcaagtagtgaattttctccaacattcacagaaaaatcagtggcactgccacctataaaagaaaatatgccaaagaatgttttgccagattctcagcaacaatataatgttgtgnagactgttaaagtaactgaacaattaaggcactgtagtgagattcttaaagaaatgcttgcaaagaaacatttttcatatgcatggcccttttataatcctgttgacgttaatgctttgggactccataactactatgacgttgtcaaaaatccgatggatcttggaactattaaggagaaaatggataaccaagaatataaggatgcatacaaatttgcggcagatgttagattaatgttcatgaattgctacaagtacaatcctccagatcacgaagttgtgacaatggcaagaatgcttcaggatgttttcgaaacgcatttttcaaagatcccgattgaacctgttgagagtatgcctttatgttacatcaaaacagatatcacagaaaccactggtagagagaacactaatgaagcctcctctgaagggaactcttctgatgattctgaagatgagcgagttaagcgtcttgcaaagcttcaggagcagcttaaagctgtacatcaacagctccaggttttgtcccaagtacctttccgtaagctaaataaaaagaaagagaagtctaaaaaggaaaagaaaaaagaaaaggttaataacagcaatgaaaatccaagaaaaatgtgtgagcaaatgaggctaaaggaaaagtccaagagaaatcagccaaagaaaaggaaacaacagttcattggtctaaaatctgaagatgaagataatgctaaacctatgaactatgatgagaaaaggcagttaagtctgaatataaacaaactccctggagataaacttgggcgagtagttcacataatacaatcaagagagccttctctgagcaattccaatcctgatgagatagagatagactttgaaacactgaaagcatcaacactaagagaattagaaaaatatgtttcggcatgtctaagaaagagaccattaaaacctcctgctaagaaaataatgatgtccaaagaagaacttcactcacagaaaaaacaggaattggaaaagcggttactggatgttaataatcagttaaattctagaaaacgtcaaacaaaatctgataaaacgcaaccatccaaagctgttgaaaatgtttcccgactgagtgagagcagcagcagcagcagcagctcatcagagtctgaaagtagcagcagtgacttaagctcttcagacagcagtgattctgaatcagaaatgttccctaagtttacagaagtaaaaccaaatgattctccttctaaagagcatgtaaagaaaatgaagaatgaatgcatactgcctgaaggaagaacaggcgtcacacagataggatattgtgtgcaagacacaacctctgccaatactacccttgttcatcagaccacaccttcacatgtaatgccaccaaatcaccaccaattagcatttaattatcaagaattagaacatttacagactgtgaaaaacatttcacctttacaaattctgcctccctcaggtgattctgaacagctctcaaatggcataactgtgatgcatccatctggtgatagtgacacaacgatgttagaatctgaatgtcaagctcctgtacagaaggatataaagattaagaatgcagattcatggaaaagtttaggcaaaccagtgaaaccatcaggtgtaatgaaatcctcagatgagctcttcaaccaatttagaaaagcagccatagaaaaggaagtaaaagctcggacacaggaactcatacggaagcatttggaacaaaatacaaaggaactaaaagcatctcaagaaaatcagagggatcttgggaatggattgactgtagaatctttttcaaataaaatacaaaacaagtgctctggagaagagcagaaagaacatcagcagtcatcagaagctcaagataaatccaaactctggcttctcaaagaccgtgatttagcaaggcagaaagaacaagagaggaggaggagagaagcaatggtgggtaccattgatatgacccttcaaagtgacattatgacaatgtttgaaaacaactttgattaaaactcagtttttaaattaaccatcaacttaaaatgaatggtaaaagatcaaaatgcatatggtaaaatgattgctttcagataacaagataccaatcttatattgtattttgactgctctaaaatgattaaacagttttcacttacatttttaaaaaaaaaaaaaaaaaaaaaaaaaaaaaaaaaaaaaaaaaaaaaaaaaaaaaggggggggagcaacacaaaaaataacccagaaggggcaacaagaaaaagagacaccacgaaaatatgatagaaaaaagagaggccccccaaaagagagagaacaaaaaaaaacagagaagcacaagagagcacataaaaaaaaagaagacaacgggaaaaacagtagaaaagaagaaacaacagagaagagaaacaaaaacagaaggaga

SEQ ID NO: 98046 - DNA, 3460 bp, Homo sapiens
  misc_feature (994)..(994): n is a, c, g, or t
acaacaaaaactggcggcgaggaactgcggagaactgttgccctgcaccgcttcattttgtgcagcctgaaaggggcaatcacataaggtcggttttgtaatatacaggtaacatacagtccgggcagttgagaaggccaccccgcttcgtgcctgcagcccaggacatgtacttgtagacaggattcaaagcagttaagaatgtctctgccaagtcgacaaacagctattattgttaaccctcctccaccagaatatataaatactaagaaaaatgggcgattgacaaatcaacttcagtatctacaaaaagttgtcctaaaggatttatggaagcatagtttttcatggccctttcaacgtcctgtggatgctgtgaaactaaagttgcctgattattataccattataaaaaacccaatggatttaaatacaattaagaagcgcttggagaataaatattatgcgaaggcttcagaatgtatagaagacttcaatacaatgttctcaaattgttatttatataacaagcctggagatgacattgttcttatggcacaagctctagagaagctgtttatgcagaaattatctcagatgccacaagaagagcaagttgtgggtgttaaggaaagaatcaagaaaggcactcaacagaatatagctgtttcttctgctaaagaaaaatcatcacccagcgcaacagaaaaagtatttaagcagcaagaaattccttctgtatttcctaagacatctatttctcccttgaacgtggtacagggagcttcagtcaactccagttcacaaactgcggcccaagttacaaaaggtgtgaagaggaaagcagatacaacaactcctgcaacttcagcagttaaagcaagtagtgaattttctccaacattcacagaaaaatcagtggcactgccacctataaaagaaaatatgccaaagaatgttttgccagattctcagcaacaatataatgttgtgnagactgttaaagtaactgaacaattaaggcactgtagtgagattcttaaagaaatgcttgcaaagaaacatttttcatatgcatggcccttttataatcctgttgacgttaatgctttgggactccataactactatgacgttgtcaaaaatccgatggatcttggaactattaaggagaaaatggataaccaagaatataaggatgcatacaaatttgcggcagatgttagattaatgttcatgaattgctacaagtacaatcctccagatcacgaagttgtgacaatggcaagaatgcttcaggatgttttcgaaacgcatttttcaaagatcccgattgaacctgttgagagtatgcctttatgttacatcaaaacagatatcacagaaaccactggtagagagaacactaatgaagcctcctctgaagggaactcttctgatgattctgaagatgagcgagttaagcgtcttgcaaagcttcaggagcagcttaaagctgtacatcaacagctccaggttttgtcccaagtacctttccgtaagctaaataaaaagaaagagaagtctaaaaaggaaaagaaaaaagaaaaggttaataacagcaatgaaaatccaagaaaaatgtgtgagcaaatgaggctaaaggaaaagtccaagagaaatcagccaaagaaaaggaaacaacagttcattggtctaaaatctgaagatgaagataatgctaaacctatgaactatgatgagaaaaggcagttaagtctgaatataaacaaactccctggagataaacttgggcgagtagttcacataatacaatcaagagagccttctctgagcaattccaatcctgatgagatagagatagactttgaaacactgaaagcatcaacactaagagaattagaaaaatatgtttcggcatgtctaagaaagagaccattaaaacctcctgctaagaaaataatgatgtccaaagaagaacttcactcacagaaaaaacaggaattggaaaagcggttactggatgttaataatcagttaaattctagaaaacgtcaaacaaaatctgataaaacgcaaccatccaaagctgttgaaaatgtttcccgactgagtgagagcagcagcagcagcagcagctcatcagagtctgaaagtagcagcagtgacttaagctcttcagacagcagtgattctgaatcagaaatgttccctaagtttacagaagtaaaaccaaatgattctccttctaaagagcatgtaaagaaaatgaagaatgaatgcatactgcctgaaggaagaacaggcgtcacacagataggatattgtgtgcaagacacaacctctgccaatactacccttgttcatcagaccacaccttcacatgtaatgccaccaaatcaccaccaattagcatttaattatcaagaattagaacatttacagactgtgaaaaacatttcacctttacaaattctgcctccctcaggtgattctgaacagctctcaaatggcataactgtgatgcatccatctggtgatagtgacacaacgatgttagaatctgaatgtcaagctcctgtacagaaggatataaagattaagaatgcagattcatggaaaagtttaggcaaaccagtgaaaccatcaggtgtaatgaaatcctcagatgagctcttcaaccaatttagaaaagcagccatagaaaaggaagtaaaagctcggacacaggaactcatacggaagcatttggaacaaaatacaaaggaactaaaagcatctcaagaaaatcagagggatcttgggaatggattgactgtagaatctttttcaaataaaatacaaaacaagtgctctggagaagagcagaaagaacatcagcagtcatcagaagctcaagataaatccaaactctggcttctcaaagaccgtgatttagcaaggcagaaagaacaagagaggaggaggagagaagcaatggtgggtaccattgatatgacccttcaaagtgacattatgacaatgtttgaaaacaactttgattaaaactcagtttttaaattaaccatcaacttaaaatgaatggtaaaagatcaaaatgcatatggtaaaatgattgctttcagataacaagataccaatcttatattgtattttgactgctctaaaatgattaaacagttttcacttacatttttaaaaaaaaaaaaaaaaaaaaaaaaaaaaaaaaaaaaaaaaaaaaaaaaaaaaaggggggggagcaacacaaaaaataacccagaaggggcaacaagaaaaagagacaccacgaaaatatgatagaaaaaagagaggccccccaaaagagagagaacaaaaaaaaacagagaagcacaagagagcacataaaaaaaaagaagacaacgggaaaaacagtagaaaagaagaaacaacagagaagagaaacaaaaacagaaggaga

SEQ ID NO: 98047 - DNA, 1517 bp, Homo sapiens
  misc_feature (944)..(944): n is a, c, g, or t
ggccttgggtgggaacaaccgttttttcccccctctcccctccccgaccccatcaacatcgtgcgacagtccgggcagttgagaaggccaccccgcttcgtgcctgcagcccaggacatgtacttgtagacaggattcaaagcagttaagaatgtctctgccaagtcgacaaacagctattattgttaaccctcctccaccagaatatataaatactaagaaaaatgggcgattgacaaatcaacttcagtatctacaaaaagttgtcctaaaggatttatggaagcatagtttttcatggccctttcaacgtcctgtggatgctgtgaaactaaagttgcctgattattataccattataaaaaacccaatggatttaaatacaattaagaagcgcttggagaataaatattatgcgaaggcttcagaatgtatagaagacttcaatacaatgttctcaaattgttatttatataacaagcctggagatgacattgttcttatggcacaagctctagagaagctgtttatgcagaaattatctcagatgccacaagaagagcaagttgtgggtgttaaggaaagaatcaagaaaggcactcaacagaatatagctgtttcttctgctaaagaaaaatcatcacccagcgcaacagaaaaagtatttaagcagcaagaaattccttctgtatttcctaagacatctatttctcccttgaacgtggtacagggagcttcagtcaactccagttcacaaactgcggcccaagttacaaaaggtgtgaagaggaaagcagatacaacaactcctgcaacttcagcagttaaagcaagtagtgaattttctccaacattcacagaaaaatcagtggcactgccacctataaaagaaaatatgccaaagaatgttttgccagattctcagcaacaatataatgttgtgnagactgttaaagtaactgaacaattaaggcactgtagtgagattcttaaagaaatgcttgcaaagaaacatttttcatatgcatggcccttttataatcctgttgacgttaatgctttgggactccataactactatgacgttgtcaaaaatccgatggatcttggaactattaaggagaaaatggataaccaagaatataaggatgcatacaaatttgcggcagatgttagattaatgttcatgaattgctacaagtacaatcctccagatcacgaagttgtgacaatggcaagaatgcttcaggatgttttcgaaacgcatttttcaaagatcccgattgaacctgttgagagtatgcctttatgttacatcaaaacagatatcacagaaaccactggtagagagaacactaatgaagcctcctctgaagggaactcttctgatgattctgaagatgagcgagttaagcgtcttgcaaagcttcaggagcagcttaaagctgtacatcaacagctccaggttttgtcccaagtacctttccgtaagctaaataaaaagaaagagaagtcta

SEQ ID NO: 98048 - DNA, 4035 bp, Homo sapiens
  misc_feature (1569)..(1569): n is a, c, g, or t
acaacaaaaactggcggcgaggaactgcggagaactgttgccctgcaccgcttcattttgtgcagcctgaaaggggcaatcacataaggtcggttttgtaatatacaggtaacatacagtccgggcagttgagaaggccaccccgcttcgtgcctgcagcccaggtcttggactggtgtggatcgctgctgcctgtactgtaattttggaaatgcaggagaaagtacggagcgtttagctttagctggcattttgtgtttattctgcaagtggtcatttgggacggggaagttcgggttcttgcttcatttatttattcaattaactttattaagcccctggaacgtctgaaccctcttttgggtactgcaggattgtggtgggctttacttcaaggcgcgctggcctgtattaagaattaagatagaggaggccgggtgcagtggctcgcccctgtaatctcagcactttcggaggccgaggcaagtggatcacctgaggtcaggagttcaagaccagcctggccaacataatgaaatgcccatctctaccaaaaatacaaaaattagctgggtgtgatggcaggcgcctgtagtcccagctactcgggaggctgaggcaggagaatcgcttgaacccaggaggcggaagttgcagtgcgccgagatcacgccagtgcactccagcctgggcgacagagtgagactccgtctccccgctccccccaaaaaagaaagaggacatgtacttgtagacaggattcaaagcagttaagaatgtctctgccaagtcgacaaacagctattattgttaaccctcctccaccagaatatataaatactaagaaaaatgggcgattgacaaatcaacttcagtatctacaaaaagttgtcctaaaggatttatggaagcatagtttttcatggccctttcaacgtcctgtggatgctgtgaaactaaagttgcctgattattataccattataaaaaacccaatggatttaaatacaattaagaagcgcttggagaataaatattatgcgaaggcttcagaatgtatagaagacttcaatacaatgttctcaaattgttatttatataacaagcctggagatgacattgttcttatggcacaagctctagagaagctgtttatgcagaaattatctcagatgccacaagaagagcaagttgtgggtgttaaggaaagaatcaagaaaggcactcaacagaatatagctgtttcttctgctaaagaaaaatcatcacccagcgcaacagaaaaagtatttaagcagcaagaaattccttctgtatttcctaagacatctatttctcccttgaacgtggtacagggagcttcagtcaactccagttcacaaactgcggcccaagttacaaaaggtgtgaagaggaaagcagatacaacaactcctgcaacttcagcagttaaagcaagtagtgaattttctccaacattcacagaaaaatcagtggcactgccacctataaaagaaaatatgccaaagaatgttttgccagattctcagcaacaatataatgttgtgnagactgttaaagtaactgaacaattaaggcactgtagtgagattcttaaagaaatgcttgcaaagaaacatttttcatatgcatggcccttttataatcctgttgacgttaatgctttgggactccataactactatgacgttgtcaaaaatccgatggatcttggaactattaaggagaaaatggataaccaagaatataaggatgcatacaaatttgcggcagatgttagattaatgttcatgaattgctacaagtacaatcctccagatcacgaagttgtgacaatggcaagaatgcttcaggatgttttcgaaacgcatttttcaaagatcccgattgaacctgttgagagtatgcctttatgttacatcaaaacagatatcacagaaaccactggtagagagaacactaatgaagcctcctctgaagggaactcttctgatgattctgaagatgagcgagttaagcgtcttgcaaagcttcaggagcagcttaaagctgtacatcaacagctccaggttttgtcccaagtacctttccgtaagctaaataaaaagaaagagaagtctaaaaaggaaaagaaaaaagaaaaggttaataacagcaatgaaaatccaagaaaaatgtgtgagcaaatgaggctaaaggaaaagtccaagagaaatcagccaaagaaaaggaaacaacagttcattggtctaaaatctgaagatgaagataatgctaaacctatgaactatgatgagaaaaggcagttaagtctgaatataaacaaactccctggagataaacttgggcgagtagttcacataatacaatcaagagagccttctctgagcaattccaatcctgatgagatagagatagactttgaaacactgaaagcatcaacactaagagaattagaaaaatatgtttcggcatgtctaagaaagagaccattaaaacctcctgctaagaaaataatgatgtccaaagaagaacttcactcacagaaaaaacaggaattggaaaagcggttactggatgttaataatcagttaaattctagaaaacgtcaaacaaaatctgataaaacgcaaccatccaaagctgttgaaaatgtttcccgactgagtgagagcagcagcagcagcagcagctcatcagagtctgaaagtagcagcagtgacttaagctcttcagacagcagtgattctgaatcagaaatgttccctaagtttacagaagtaaaaccaaatgattctccttctaaagagcatgtaaagaaaatgaagaatgaatgcatactgcctgaaggaagaacaggcgtcacacagataggatattgtgtgcaagacacaacctctgccaatactacccttgttcatcagaccacaccttcacatgtaatgccaccaaatcaccaccaattagcatttaattatcaagaattagaacatttacagactgtgaaaaacatttcacctttacaaattctgcctccctcaggtgattctgaacagctctcaaatggcataactgtgatgcatccatctggtgatagtgacacaacgatgttagaatctgaatgtcaagctcctgtacagaaggatataaagattaagaatgcagattcatggaaaagtttaggcaaaccagtgaaaccatcaggtgtaatgaaatcctcagatgagctcttcaaccaatttagaaaagcagccatagaaaaggaagtaaaagctcggacacaggaactcatacggaagcatttggaacaaaatacaaaggaactaaaagcatctcaagaaaatcagagggatcttgggaatggattgactgtagaatctttttcaaataaaatacaaaacaagtgctctggagaagagcagaaagaacatcagcagtcatcagaagctcaagataaatccaaactctggcttctcaaagaccgtgatttagcaaggcagaaagaacaagagaggaggaggagagaagcaatggtgggtaccattgatatgacccttcaaagtgacattatgacaatgtttgaaaacaactttgattaaaactcagtttttaaattaaccatcaacttaaaatgaatggtaaaagatcaaaatgcatatggtaaaatgattgctttcagataacaagataccaatcttatattgtattttgactgctctaaaatgattaaacagttttcacttacatttttaaaaaaaaaaaaaaaaaaaaaaaaaaaaaaaaaaaaaaaaaaaaaaaaaaaaaggggggggagcaacacaaaaaataacccagaaggggcaacaagaaaaagagacaccacgaaaatatgatagaaaaaagagaggccccccaaaagagagagaacaaaaaaaaacagagaagcacaagagagcacataaaaaaaaagaagacaacgggaaaaacagtagaaaagaagaaacaacagagaagagaaacaaaaacagaaggaga

SEQ ID NO: 98049 - DNA, 3526 bp, Homo sapiens
  misc_feature (933)..(933): n is a, c, g, or t
aaccagaagagcattttaagaatcataatagttcagtgcagatgttcctgggaggtcaagttaagagtcaaaaataattcattagatttaacaatttagcatggacatgtacttgtagacaggattcaaagcagttaagaatgtctctgccaagtcgacaaacagctattattgttaaccctcctccaccagaatatataaatactaagaaaaatgggcgattgacaaatcaacttcagtatctacaaaaagttgtcctaaaggatttatggaagcatagtttttcatggccctttcaacgtcctgtggatgctgtgaaactaaagttgcctgattattataccattataaaaaacccaatggatttaaatacaattaagaagcgcttggagaataaatattatgcgaaggcttcagaatgtatagaagacttcaatacaatgttctcaaattgttatttatataacaagcctggagatgacattgttcttatggcacaagctctagagaagctgtttatgcagaaattatctcagatgccacaagaagagcaagttgtgggtgttaaggaaagaatcaagaaaggcactcaacagaatatagctgtttcttctgctaaagaaaaatcatcacccagcgcaacagaaaaagtatttaagcagcaagaaattccttctgtatttcctaagacatctatttctcccttgaacgtggtacagggagcttcagtcaactccagttcacaaactgcggcccaagttacaaaaggtgtgaagaggaaagcagatacaacaactcctgcaacttcagcagttaaagcaagtagtgaattttctccaacattcacagaaaaatcagtggcactgccacctataaaagaaaatatgccaaagaatgttttgccagattctcagcaacaatataatgttgtgnagactgttaaagtaactgaacaattaaggcactgtagtgagattcttaaagaaatgcttgcaaagaaacatttttcatatgcatggcccttttataatcctgttgacgttaatgctttgggactccataactactatgacgttgtcaaaaatccgatggatcttggaactattaaggtaaatgttgccttaaaaggaagaacttctttttcttgattataaaagtaattcatcattgcaaagaaatcttaaaatctagaaaaagatgaaggaaattaagatcatccaagtcacactatctggagagaaaatggataaccaagaatataaggatgcatacaaatttgcggcagatgttagattaatgttcatgaattgctacaagtacaatcctccagatcacgaagttgtgacaatggcaagaatgcttcaggatgttttcgaaacgcatttttcaaagatcccgattgaacctgttgagagtatgcctttatgttacatcaaaacagatatcacagaaaccactggtagagagaacactaatgaagcctcctctgaagggaactcttctgatgattctgaagatgagcgagttaagcgtcttgcaaagcttcaggagcagcttaaagctgtacatcaacagctccaggttttgtcccaagtacctttccgtaagctaaataaaaagaaagagaagtctaaaaaggaaaagaaaaaagaaaaggttaataacagcaatgaaaatccaagaaaaatgtgtgagcaaatgaggctaaaggaaaagtccaagagaaatcagccaaagaaaaggaaacaacagttcattggtctaaaatctgaagatgaagataatgctaaacctatgaactatgatgagaaaaggcagttaagtctgaatataaacaaactccctggagataaacttgggcgagtagttcacataatacaatcaagagagccttctctgagcaattccaatcctgatgagatagagatagactttgaaacactgaaagcatcaacactaagagaattagaaaaatatgtttcggcatgtctaagaaagagaccattaaaacctcctgctaagaaaataatgatgtccaaagaagaacttcactcacagaaaaaacaggaattggaaaagcggttactggatgttaataatcagttaaattctagaaaacgtcaaacaaaatctgataaaacgcaaccatccaaagctgttgaaaatgtttcccgactgagtgagagcagcagcagcagcagcagctcatcagagtctgaaagtagcagcagtgacttaagctcttcagacagcagtgattctgaatcagaaatgttccctaagtttacagaagtaaaaccaaatgattctccttctaaagagcatgtaaagaaaatgaagaatgaatgcatactgcctgaaggaagaacaggcgtcacacagataggatattgtgtgcaagacacaacctctgccaatactacccttgttcatcagaccacaccttcacatgtaatgccaccaaatcaccaccaattagcatttaattatcaagaattagaacatttacagactgtgaaaaacatttcacctttacaaattctgcctccctcaggtgattctgaacagctctcaaatggcataactgtgatgcatccatctggtgatagtgacacaacgatgttagaatctgaatgtcaagctcctgtacagaaggatataaagattaagaatgcagattcatggaaaagtttaggcaaaccagtgaaaccatcaggtgtaatgaaatcctcagatgagctcttcaaccaatttagaaaagcagccatagaaaaggaagtaaaagctcggacacaggaactcatacggaagcatttggaacaaaatacaaaggaactaaaagcatctcaagaaaatcagagggatcttgggaatggattgactgtagaatctttttcaaataaaatacaaaacaagtgctctggagaagagcagaaagaacatcagcagtcatcagaagctcaagataaatccaaactctggcttctcaaagaccgtgatttagcaaggcagaaagaacaagagaggaggaggagagaagcaatggtgggtaccattgatatgacccttcaaagtgacattatgacaatgtttgaaaacaactttgattaaaactcagtttttaaattaaccatcaacttaaaatgaatggtaaaagatcaaaatgcatatggtaaaatgattgctttcagataacaagataccaatcttatattgtattttgactgctctaaaatgattaaacagttttcacttacatttttaaaaaaaaaaaaaaaaaaaaaaaaaaaaaaaaaaaaaaaaaaaaaaaaaaaaaggggggggagcaacacaaaaaataacccagaaggggcaacaagaaaaagagacaccacgaaaatatgatagaaaaaagagaggccccccaaaagagagagaacaaaaaaaaacagagaagcacaagagagcacataaaaaaaaagaagacaacgggaaaaacagtagaaaagaagaaacaacagagaagagaaacaaaaacagaaggaga

SEQ ID NO: 98050 - DNA, 854 bp, Homo sapiens
atggattgactgtagaatctttttcaaataaaatacaaaacaagtgctctggagaagagcagaaagaacatcagcagtcatcagaagctcaagataaatccaaactctggcttctcaaagaccgtgatttagcaaggcagaaagaacaagagaggaggaggagagaagcagtggagtttcgctcttgtcgcccagcctggaatgcaatggtgcaatctcagctcactgcaacctccacctccctggttcaagtgattctcctgcctcagcctcccaagtagctgggattccaggcacccaccaccacgcctgatggtgggtaccattgatatgacccttcaaagtgacattatgacaatgtttgaaaacaactttgattaaaactcagtttttaaattaaccatcaacttaaaatgaatggtaaaagatcaaaatgcatatggtaaaatgattgctttcagataacaagataccaatcttatattgtattttgactgctctaaaatgattaaacagttttcacttacatttttaatagctatatgcttattttttaaacgacataattcaaaggaaatttaataattttggatccctaaaaattggacaaattcccagatattcgttcattctataaataatctgtctatatattataggccctgtactaatgcaatgaaaatccaagaagatagcgtcctgcttgtgtttaacaatgacagagtatgtttactaagttcaataagtgaaaaataatgaagaagtatatgacaggtgtataaaagacatagttcctgttgagtatttaaagttttagaagcagataatcgtcgtggctttagaaatatttagat

SEQ ID NO: 98051 - DNA, 666 bp, Homo sapiens
  misc_feature (14)..(14): n is a, c, g, or t
ggctgttctagagnatcccagtcgcttgaaaatgcccacccagtcagaagaagagaagttatctcctagcccaactacagaggtacagtagtctttttagtgttgaaaaatggcatgtttttaaatgggttgattattccttggaaacagaagtacagtataggataattaaaaaatgaagaaagctacctttatagctaaacgtagcactacaatattcagggtaggtgtggagagaagcagagagaaattaaattttatcaggtattcagaataatggtctcagacaaaaaaacaatgagtgtgggagatgttagcataagtagagagcttacaaattaaatgtttaattgcttttgaaaacagtttgtaacctttacattctgttgaaggcgtgtcttactacataaagtcataaatgcaaattaagcattttttctccccatggctgttttggagggacaagaagtatggacttaatcttgaggtgaacaacagtttaaatgtgattttggtaaaatcctcataggctgaagatgccaagcgcctgtgtttaccagtgggcgactaccctttttcagtgctgacgggctatcaggactccttaatttaaaaaaaagtgtagttaacccccttggcattttcataccacttactgtgaatgtg

SEQ ID NO: 98052 - DNA, 901 bp, Homo sapiens
cggacgcgtgggtcgacccacgcgtccggcccagtttccatctctcagggcccacccaggaaaatggatttcaagtgggggttttcatccagagatttgtttaacacaaaacaagaaaagctgagaggcaaaacaggggagtgaggggcaacccagaggtggggaacaacaacagcaagccgcccccatcctgagactggctgggcaccaggggaggacgcgtcaccagagcctggggccaaggccactgggggacctgccacactgtggacctgtctggtgggggctggagcctcgagaagccatgattcttgtcagaaacatttccccaggcagagagagggggccccagcctctcccctcctcttggcctccagagtcctgcaggtgcctcacagtagtgaaacccagttggaagcagctgccctgggagcctgggacaggcgacccaccgggtcagtcccctgccactcagagcagagcagggggctgagggcaagcaggtggggctgtgcgtggcctcagtgcactcggtgtcatgtctgagcctggtgtttatgccccactgctgtcctaagtccctggcgaggggaggtggaggagctgccccgtgggtgtttggagattctgttttactctgcctagagaggaaacggctttggggagggagggggaagcctttattctttactgttgtccctgttttcctttgggggaatttactcagttagcagcccctcctcaccattccccccaggaaggccatgtcccagttttctgtccacccctcctgttcctctgcactatgtctctgatttcgcgtccgggagttacccaagaggcccgtgtctcgagtttcccgagaaatcgttgcggtgtcccacccggggatgcgcgagag

SEQ ID NO: 98053 - DNA, 713 bp, Homo sapiens
tagcgcgcctggaccctctcgagatgctgcccttagagtgggatgaaagtctggggaggaacgccttgtcaccggcaaaaacagcctttctcttggtcttcgtctgcatcctccttttcaaaatatcttgatttcccccgcgcacccctgacccggctgcagcaccggccctccgagcgggaagagccccgtgaaggctccgcagagcgatctaccccgcgctcttgtccgtgcccagaaagcgggttccacttggcagggattattttaaactgctaccagcaattcattcacctgacacccgacaccggcagcccagcccgccggaggcgagacaggtgagttgtaaggcgaaccgtgttagatgcaaaacaaatactagaagaaaaaaataagggtggggtagggtgagatgcggtcatctgaccacagggtaacctggctggttaaagggaagagtttttcattgccctctacttttcgtaattttgtaggattgtccggtgcccgctagaggtcgccaaacggagtccttttgcgctggttcttaagtggattcctagtgaaaaggcagacaactgaaaatgtgagtgctgtcttttaagtaaaatcactctcggtggcttcttaaagaatgaaaatctctgtgagttgtttatccccagacttggataatttatcttaagagcactaaatgtgattaaaagctcaaa

SEQ ID NO: 98054 - DNA, 212 bp, Homo sapiens
cgggccagttgtggtgctggtgcagctggagcgagaggaggaagtcacaggcctctgaagctagcttatttgaagaggcactggaaaaatatggcaaagacttcaatgacatacggcaagattttgtaagtagaaaattatgagtaaaataaaatgttgagatgggaatattctgttttagaaatctggtaaaccttacagtattcatttag

SEQ ID NO: 98055 - DNA, 5874 bp, Homo sapiens
tttgtatctgtgagagtaggaaggccgtgaaaacagaggttgtttagagaattggcctgggacaataaccatttagaagctttaggcacgtaaccagttaagtgtccatcgacatgaaactgattgaatacaatctcctctgtttgggggtggtggtgattgtgaactgtagggccctgttcccccatggacaaaggaagcccctcactcctaaaggtcccttttcccagcagaacaggccctgcatatacagtgcccgtctagagccagggcctccatctgggtgttggacagttggttctgctcagcccagttttggggtaaacgatgacgcagttagggtggcctaggaagggagtttttctacctctgtccccagctgggtctctggcgaggcgggaagcacccggaatcttcctggccctagagcctgcaggctccaggccggccccttgaatctcaccgcgaggaaggcaccctgctgcctgcacttatttgcatccaagagtttgcattgagactggcgcttgcctactagggcagccacaggggggttccccagggacagagattatgtctactttgagaattcctccagcaacccatacctaataagaaggatagaagaactcaacaagactgcaagtggcaacgtggaagcaaaagtagtatgcttttatagacgacgtgatatttccaacacacttataatgctcgcagataagcatgctaaagaaattgaggaagaatctgaaacaacagttgaggctgacttgaccgataagcagaaacatcagttgaaacatagggaactctttttgtcacgccagtatgaatctctgcccgcaacacatatcaggggaaagtgcagtgttgcccttctgaatgagacagaatcagtattgtcatatcttgataaggaggataccttcttctactcattggtctatgacccctcattgaaaacactattagctgacaaaggtgaaatcagagtgggacctagatatcaagcagacattccagaaatgctgttagaaggagaatcagatgagagggaacaatcaaaattggaagttaaagtttgggatccaaatagcccacttacggatcgacagattgaccagtttttagttgtagcacgtgctgttgggacattcgccagagccctggattgcagcagttctgtgaggcagcctagtttgcatatgagtgctgctgcagcttcccgagacatcaccttgtttcacgctatggatacattgtatagacacagctatgatttgagcagtgccattagtgtcttagtaccactcggaggacctgttttatgcagagatgaaatggaggaatggtcagcctctgaagctagcttatttgaagaggcactggaaaaatatggcaaagacttcaatgacatacggcaagattttcttccttggaaatcattgactagcatcattgaatattattacatgtggaaaactactgacagatatgtgcaacagaaacgtctaaaagcagcagaagctgagagtaaactgaaacaagtatatatcccaacctacagcaaaccaaatcccaaccaaatatccactagtaatgggaagcctggtgctgtgaatggagctgtggggaccacgttccagcctcagaatcctctcttagggagagcctgtgagagctgctatgctacacagtctcaccagtggtattcttggggcccacctaatatgcagtgtagattatgtgcaatttgttggctttattggaaaaaatatggaggcttgaaaatgcccacccagtcagaagaagagaagttatctcctagcccaactacagaggaccctcgtgttagaagtcacgtgtcccgccaggccatgcagggaatgccagtccgaaacactgggagtccaaagtctgcagtgaagacccgccaagctttcttccttcatactacatatttcacaaaatttgctcgtcaggtctgcaaaaataccctccggctgcggcaggcagcaagacggccgtttgttgctattaattatgctgccattagggcagaatatgcagacagacatgctgaactatctggaagtccactgaaaagcaaaagcactaggaagcctttggcatgtatcattgggtatttagagatccatcctgcaaagaaacctaatgtaattcgatctacaccaagcctgcaaaccccaactaccaagcggatgctaacaactccaaatcacacatctctgagcattctggggaaaagaaactacagtcatcacaatggtctggatgaactcacgtgctgtgtgtcagactgagctttccctgattcattctacaatccaagacttgctgcactgtcctgctgatgttcacagccgtgcctgggaagaaggcagccccactcccagtacatttcagtgggagacctctgcgtgcatccatggagacgcaatggggcggggaaggaactgtgggagtgcacgttccaaatcctgtgtctccacgtgtggatcagcagcacctcgctttcttgtcagagacctcgctgttacggagcgagacctgctgagaattgaggggctgagggaacccctccacctcctcccttctgcagcgccctgcgccccacccagcaacagcggccacttggcagtggggctgctgcaagctcagagccgctgccaccctgcatgtgtccgctcagctcggtcttatgctgtatagttactaaatatgtacaggagggccatggcatctttctgaatggatttttcttaagaaatgcgccagtgtttatgaggttcaaggtatttccctgtccttgctgttaccgtcactcagctttttctcgataggcttcatccttgtttttttgaaatgggggaatttgctgtttaccctctgcattcctatatgtgaccctccctcctactcctccaaggaacagaattaccgaggttctgacaaaagataagcctgtaaactcatcatctgtgttttgtggttggagagaaactggtgttctgcccggctctgcttggtcacagacagctccagcaagagcagttgttaaaagtgccaagcgtgtgtatcactgtgacaagccgtttgcttactgccctgttcccttgcagccaaaccagctgatgaagaactgctgccaggtgggtcctacagcaggtcacaaatgacctagtttcattttaagcagacagactctgtttggcctagaggtgtggagtgagagaactgtgtttgtgggtatgagtctgtgtggccaaccccatgacccccacccctccagcccaacatcttgtgagcacatgtgacctaggccccgggggacctgcctgctcctttggcttgggctcttcgtgtttcccacctgccctcggcacgagcccttggtggcatcacagttggccactcagctgtgctgagtagctgtgctacttgtgctggcagctgcaaggataggaatagctcagcgcccgatgagctccctgagcagatgtgaggctggcaactcccctgccctctgtttgcaggcacagggtcacagtcccaagaaagacaactggagtctgatctcccagccatctctggggttactaggaggcagctggatggcagatacgagaggcccaaatagccaagctgttgcaagacagagtggctacaattgaattgacaccctgggaagcacgaggtaacttggtaaggataatgatgctgtagatgtctgtgtcctcggaggctgagctccgcttggcagagagagcgtgctgtgtgaggtggagggcggttttgcagacatctcagcttcttttctgaggaggagttggttctcatcttaggcttctgcaagggcgagcatgggatgtctccaccaccacccactcttggagctgtgctgggtcttggcttggggcgctgagggtggggcctgtgtcagaagcatttggtgagaggggtggaggtggcaggcaggggttctcctcagggttcccactgaggggtcccttcagcaaagacctgggaggaggtgccgcatcacgtggatgtttcttccctaaagaaaaagacacaggaaagctgtctgtctgtaccctgctctggatttattgtcgtacttggacccagaaggggaaatgattccctcaccctttcactttctctctgaacccctactaagtggtgactgcagattctggaaacaattagctgcccgtgactcagctgccagcttcattttctctgccttttgggagaggccctctcacccaggcccaagagatttggagacaggagtcaggccaggtctgaagcaggagaagggaggcccctcctatctacccagttgacatttggctttgggaaaagcgcagcttgttcgagccacgtgtgccaagcaggcttttccttcctcttgtaagtaaagctcgtggttctgtagtccagtcatcctaggagggtgatgttgactgagacttcacgctctccctttgtctctggaaactgccccctcgttctgacagaatcccccaggcaatggaggaagggtgccgaggcgcctctagtctgtgcctttgccgttggaagcatttggtgctgagagggtttcccagccacccgctccctttctggggccatggtgtccctgctgtgtgtcagtggcatgtcactgtggttcagtgagcacatgggtggacgtgcagagactgtctgcgcagcccccagcagacatgcccctggggtgaggacacaggctctgcaggccatctccccctctggctcagtcatcgcctgcccacccttcacttcttaaaggtgcgcaagagaggagggccgactggagggtgtcgccggaaggtttcagcctgcccttcacaattccccttgtgcacagcccagtttccatctctcagggcccacccaggaaaatggatttcaagtgggggttttcatccagagatttgtttaacacaaaacaagaaaagctgagaggcaaaacaggggagtgaggggcaacccagaggtggggaacaacaacagcaagccgcccccatcctgagactggctgggcaccaggggaggacgcgtcaccagagcctggggccaaggccactgggggacctgccacactgtggacctgtctggtgggggctggagcctcgagaagccatgattcttgtcagaaacatttccccaggcagagagagggggccccagcctctcccctcctcttggcctccagagtcctgcaggtgcctcacagtagtgaaacccagttggaagcagctgccctgggagcctgggacaggcgacccaccgggtcagtcccctgccactcagagcagagcagggggctgagggcaagcaggtggggctgtgcgtggcctcagtgcactcggtgtcatgtctgagcctggtgtttatgccccactgctgtcctaagtccctggcgaggggaggtggaggagctgccccgtgggtgtttggagattctgttttactctgcctagagaggaaacggctttggggagggagggggaagcctttattctttactgttgtccctgttttcctttgggggaatttactcagttagcagcccctcctcaccattccccccaggaaggccatgtcccagttttctgtccacccctcctgttcctctgcactatgtctctgattttccctgccagggaagctaacccagagcacgcacctgtgctcatgagtgtttccgcaggataattcgttctgagcatgataccacagtgtggattgtctgtctgtaaggagatgccatctactaaccaatttgtattgtgtttccaataaattcctggaaatttt

SEQ ID NO: 98056 - DNA, 5375 bp, Homo sapiens
tgactctatagtgaccccaaccgtcagtcacctcctgtggatatggcggtcaacatgtaccgggtcggtatattatgtctactttgagaattcctccagcaacccatacctaataagaaggatagaagaactcaacaagactgcaagtggcaacgtggaagcaaaagtagtatgcttttatagacgacgtgatatttccaacacacttataatgctcgcagataagcatgctaaagaaattgaggaagaatctgaaacaacagttgaggctgacttgaccgataagcagaaacatcagttgaaacatagggaactctttttgtcacgccagtatgaatctctgcccgcaacacatatcaggggaaagtgcagtgttgcccttctgaatgagacagaatcagtattgtcatatcttgataaggaggataccttcttctactcattggtctatgacccctcattgaaaacactattagctgacaaaggtgaaatcagagtgggacctagatatcaagcagacattccagaaatgctgttagaaggagaatcagatgagagggaacaatcaaaattggaagttaaagtttgggatccaaatagcccacttacggatcgacagattgaccagtttttagttgtagcacgtgctgttgggacattcgccagagccctggattgcagcagttctgtgaggcagcctagtttgcatatgagtgctgctgcagcttcccgagacatcaccttgtttcacgctatggatacattgtatagacacagctatgatttgagcagtgccattagtgtcttagtaccactcggaggacctgttttatgcagagatgaaatggaggaatggtcagcctctgaagctagcttatttgaagaggcactggaaaaatatggcaaagacttcaatgacatacggcaagattttcttccttggaaatcattgactagcatcattgaatattattacatgtggaaaactactgacagatatgtgcaacagaaacgtctaaaagcagcagaagctgagagtaaactgaaacaagtatatatcccaacctacagcaaaccaaatcccaaccaaatatccactagtaatgggaagcctggtgctgtgaatggagctgtggggaccacgttccagcctcagaatcctctcttagggagagcctgtgagagctgctatgctacacagtctcaccagtggtattcttggggcccacctaatatgcagtgtagattatgtgcaatttgttggctttattggaaaaaatatggaggcttgaaaatgcccacccagtcagaagaagagaagttatctcctagcccaactacagaggaccctcgtgttagaagtcacgtgtcccgccaggccatgcagggaatgccagtccgaaacactgggagtccaaagtctgcagtgaagacccgccaagctttcttccttcatactacatatttcacaaaatttgctcgtcaggtctgcaaaaataccctccggctgcggcaggcagcaagacggccgtttgttgctattaattatgctgccattagggcagaatatgcagacagacatgctgaactatctggaagtccactgaaaagcaaaagcactaggaagcctttggcatgtatcattgggtatttagagatccatcctgcaaagaaacctaatgtaattcgatctacaccaagcctgcaaaccccaactaccaagcggatgctaacaactccaaatcacacatctctgagcattctggggaaaagaaactacagtcatcacaatggtctggatgaactcacgtgctgtgtgtcagactgagctttccctgattcattctacaatccaagacttgctgcactgtcctgctgatgttcacagccgtgcctgggaagaaggcagccccactcccagtacatttcagtgggagacctctgcgtgcatccatggagacgcaatggggcggggaaggaactgtgggagtgcacgttccaaatcctgtgtctccacgtgtggatcagcagcacctcgctttcttgtcagagacctcgctgttacggagcgagacctgctgagaattgaggggctgagggaacccctccacctcctcccttctgcagcgccctgcgccccacccagcaacagcggccacttggcagtggggctgctgcaagctcagagccgctgccaccctgcatgtgtccgctcagctcggtcttatgctgtatagttactaaatatgtacaggagggccatggcatctttctgaatggatttttcttaagaaatgcgccagtgtttatgaggttcaaggtatttccctgtccttgctgttaccgtcactcagctttttctcgataggcttcatccttgtttttttgaaatgggggaatttgctgtttaccctctgcattcctatatgtgaccctccctcctactcctccaaggaacagaattaccgaggttctgacaaaagataagcctgtaaactcatcatctgtgttttgtggttggagagaaactggtgttctgcccggctctgcttggtcacagacagctccagcaagagcagttgttaaaagtgccaagcgtgtgtatcactgtgacaagccgtttgcttactgccctgttcccttgcagccaaaccagctgatgaagaactgctgccaggtgggtcctacagcaggtcacaaatgacctagtttcattttaagcagacagactctgtttggcctagaggtgtggagtgagagaactgtgtttgtgggtatgagtctgtgtggccaaccccatgacccccacccctccagcccaacatcttgtgagcacatgtgacctaggccccgggggacctgcctgctcctttggcttgggctcttcgtgtttcccacctgccctcggcacgagcccttggtggcatcacagttggccactcagctgtgctgagtagctgtgctacttgtgctggcagctgcaaggataggaatagctcagcgcccgatgagctccctgagcagatgtgaggctggcaactcccctgccctctgtttgcaggcacagggtcacagtcccaagaaagacaactggagtctgatctcccagccatctctggggttactaggaggcagctggatggcagatacgagaggcccaaatagccaagctgttgcaagacagagtggctacaattgaattgacaccctgggaagcacgaggtaacttggtaaggataatgatgctgtagatgtctgtgtcctcggaggctgagctccgcttggcagagagagcgtgctgtgtgaggtggagggcggttttgcagacatctcagcttcttttctgaggaggagttggttctcatcttaggcttctgcaagggcgagcatgggatgtctccaccaccacccactcttggagctgtgctgggtcttggcttggggcgctgagggtggggcctgtgtcagaagcatttggtgagaggggtggaggtggcaggcaggggttctcctcagggttcccactgaggggtcccttcagcaaagacctgggaggaggtgccgcatcacgtggatgtttcttccctaaagaaaaagacacaggaaagctgtctgtctgtaccctgctctggatttattgtcgtacttggacccagaaggggaaatgattccctcaccctttcactttctctctgaacccctactaagtggtgactgcagattctggaaacaattagctgcccgtgactcagctgccagcttcattttctctgccttttgggagaggccctctcacccaggcccaagagatttggagacaggagtcaggccaggtctgaagcaggagaagggaggcccctcctatctacccagttgacatttggctttgggaaaagcgcagcttgttcgagccacgtgtgccaagcaggcttttccttcctcttgtaagtaaagctcgtggttctgtagtccagtcatcctaggagggtgatgttgactgagacttcacgctctccctttgtctctggaaactgccccctcgttctgacagaatcccccaggcaatggaggaagggtgccgaggcgcctctagtctgtgcctttgccgttggaagcatttggtgctgagagggtttcccagccacccgctccctttctggggccatggtgtccctgctgtgtgtcagtggcatgtcactgtggttcagtgagcacatgggtggacgtgcagagactgtctgcgcagcccccagcagacatgcccctggggtgaggacacaggctctgcaggccatctccccctctggctcagtcatcgcctgcccacccttcacttcttaaaggtgcgcaagagaggagggccgactggagggtgtcgccggaaggtttcagcctgcccttcacaattccccttgtgcacagcccagtttccatctctcagggcccacccaggaaaatggatttcaagtgggggttttcatccagagatttgtttaacacaaaacaagaaaagctgagaggcaaaacaggggagtgaggggcaacccagaggtggggaacaacaacagcaagccgcccccatcctgagactggctgggcaccaggggaggacgcgtcaccagagcctggggccaaggccactgggggacctgccacactgtggacctgtctggtgggggctggagcctcgagaagccatgattcttgtcagaaacatttccccaggcagagagagggggccccagcctctcccctcctcttggcctccagagtcctgcaggtgcctcacagtagtgaaacccagttggaagcagctgccctgggagcctgggacaggcgacccaccgggtcagtcccctgccactcagagcagagcagggggctgagggcaagcaggtggggctgtgcgtggcctcagtgcactcggtgtcatgtctgagcctggtgtttatgccccactgctgtcctaagtccctggcgaggggaggtggaggagctgccccgtgggtgtttggagattctgttttactctgcctagagaggaaacggctttggggagggagggggaagcctttattctttactgttgtccctgttttcctttgggggaatttactcagttagcagcccctcctcaccattccccccaggaaggccatgtcccagttttctgtccacccctcctgttcctctgcactatgtctctgattttccctgccagggaagctaacccagagcacgcacctgtgctcatgagtgtttccgcaggataattcgttctgagcatgataccacagtgtggattgtctgtctgtaaggagatgccatctactaaccaatttgtattgtgtttccaataaattcctggaaatttt

SEQ ID NO: 98057 - DNA, 5890 bp, Homo sapiens
tagcgcgcctggaccctctcgagatgctgcccttagagtgggatgaaagtctggggaggaacgccttgtcaccggcaaaaacagcctttctcttggtcttcgtctgcatcctccttttcaaaatatcttgatttcccccgcgcacccctgacccggctgcagcaccggccctccgagcgggaagagccccgtgaaggctccgcagagcgatctaccccgcgctcttgtccgtgcccagaaagcgggttccacttggcagggattattttaaactgctaccagcaattcattcacctgacacccgacaccggcagcccagcccgccggaggcgagacaggtgagttgtaaggcgaaccgtgttagatgcaaaacaaatactagaagaaaaaaataagggtggggtagggtgagatgcggtcatctgaccacagggtaacctggctggttaaagggaagagtttttcattgccctctacttttcgtaattttgtaggattgtccggtgcccgctagaggtcgccaaacggagtccttttgcgctggttcttaagtggattcctagtgaaaaggcagacaactgaaaatattatgtctactttgagaattcctccagcaacccatacctaataagaaggatagaagaactcaacaagactgcaagtggcaacgtggaagcaaaagtagtatgcttttatagacgacgtgatatttccaacacacttataatgctcgcagataagcatgctaaagaaattgaggaagaatctgaaacaacagttgaggctgacttgaccgataagcagaaacatcagttgaaacatagggaactctttttgtcacgccagtatgaatctctgcccgcaacacatatcaggggaaagtgcagtgttgcccttctgaatgagacagaatcagtattgtcatatcttgataaggaggataccttcttctactcattggtctatgacccctcattgaaaacactattagctgacaaaggtgaaatcagagtgggacctagatatcaagcagacattccagaaatgctgttagaaggagaatcagatgagagggaacaatcaaaattggaagttaaagtttgggatccaaatagcccacttacggatcgacagattgaccagtttttagttgtagcacgtgctgttgggacattcgccagagccctggattgcagcagttctgtgaggcagcctagtttgcatatgagtgctgctgcagcttcccgagacatcaccttgtttcacgctatggatacattgtatagacacagctatgatttgagcagtgccattagtgtcttagtaccactcggaggacctgttttatgcagagatgaaatggaggaatggtcagcctctgaagctagcttatttgaagaggcactggaaaaatatggcaaagacttcaatgacatacggcaagattttcttccttggaaatcattgactagcatcattgaatattattacatgtggaaaactactgacagatatgtgcaacagaaacgtctaaaagcagcagaagctgagagtaaactgaaacaagtatatatcccaacctacagcaaaccaaatcccaaccaaatatccactagtaatgggaagcctggtgctgtgaatggagctgtggggaccacgttccagcctcagaatcctctcttagggagagcctgtgagagctgctatgctacacagtctcaccagtggtattcttggggcccacctaatatgcagtgtagattatgtgcaatttgttggctttattggaaaaaatatggaggcttgaaaatgcccacccagtcagaagaagagaagttatctcctagcccaactacagaggaccctcgtgttagaagtcacgtgtcccgccaggccatgcagggaatgccagtccgaaacactgggagtccaaagtctgcagtgaagacccgccaagctttcttccttcatactacatatttcacaaaatttgctcgtcaggtctgcaaaaataccctccggctgcggcaggcagcaagacggccgtttgttgctattaattatgctgccattagggcagaatatgcagacagacatgctgaactatctggaagtccactgaaaagcaaaagcactaggaagcctttggcatgtatcattgggtatttagagatccatcctgcaaagaaacctaatgtaattcgatctacaccaagcctgcaaaccccaactaccaagcggatgctaacaactccaaatcacacatctctgagcattctggggaaaagaaactacagtcatcacaatggtctggatgaactcacgtgctgtgtgtcagactgagctttccctgattcattctacaatccaagacttgctgcactgtcctgctgatgttcacagccgtgcctgggaagaaggcagccccactcccagtacatttcagtgggagacctctgcgtgcatccatggagacgcaatggggcggggaaggaactgtgggagtgcacgttccaaatcctgtgtctccacgtgtggatcagcagcacctcgctttcttgtcagagacctcgctgttacggagcgagacctgctgagaattgaggggctgagggaacccctccacctcctcccttctgcagcgccctgcgccccacccagcaacagcggccacttggcagtggggctgctgcaagctcagagccgctgccaccctgcatgtgtccgctcagctcggtcttatgctgtatagttactaaatatgtacaggagggccatggcatctttctgaatggatttttcttaagaaatgcgccagtgtttatgaggttcaaggtatttccctgtccttgctgttaccgtcactcagctttttctcgataggcttcatccttgtttttttgaaatgggggaatttgctgtttaccctctgcattcctatatgtgaccctccctcctactcctccaaggaacagaattaccgaggttctgacaaaagataagcctgtaaactcatcatctgtgttttgtggttggagagaaactggtgttctgcccggctctgcttggtcacagacagctccagcaagagcagttgttaaaagtgccaagcgtgtgtatcactgtgacaagccgtttgcttactgccctgttcccttgcagccaaaccagctgatgaagaactgctgccaggtgggtcctacagcaggtcacaaatgacctagtttcattttaagcagacagactctgtttggcctagaggtgtggagtgagagaactgtgtttgtgggtatgagtctgtgtggccaaccccatgacccccacccctccagcccaacatcttgtgagcacatgtgacctaggccccgggggacctgcctgctcctttggcttgggctcttcgtgtttcccacctgccctcggcacgagcccttggtggcatcacagttggccactcagctgtgctgagtagctgtgctacttgtgctggcagctgcaaggataggaatagctcagcgcccgatgagctccctgagcagatgtgaggctggcaactcccctgccctctgtttgcaggcacagggtcacagtcccaagaaagacaactggagtctgatctcccagccatctctggggttactaggaggcagctggatggcagatacgagaggcccaaatagccaagctgttgcaagacagagtggctacaattgaattgacaccctgggaagcacgaggtaacttggtaaggataatgatgctgtagatgtctgtgtcctcggaggctgagctccgcttggcagagagagcgtgctgtgtgaggtggagggcggttttgcagacatctcagcttcttttctgaggaggagttggttctcatcttaggcttctgcaagggcgagcatgggatgtctccaccaccacccactcttggagctgtgctgggtcttggcttggggcgctgagggtggggcctgtgtcagaagcatttggtgagaggggtggaggtggcaggcaggggttctcctcagggttcccactgaggggtcccttcagcaaagacctgggaggaggtgccgcatcacgtggatgtttcttccctaaagaaaaagacacaggaaagctgtctgtctgtaccctgctctggatttattgtcgtacttggacccagaaggggaaatgattccctcaccctttcactttctctctgaacccctactaagtggtgactgcagattctggaaacaattagctgcccgtgactcagctgccagcttcattttctctgccttttgggagaggccctctcacccaggcccaagagatttggagacaggagtcaggccaggtctgaagcaggagaagggaggcccctcctatctacccagttgacatttggctttgggaaaagcgcagcttgttcgagccacgtgtgccaagcaggcttttccttcctcttgtaagtaaagctcgtggttctgtagtccagtcatcctaggagggtgatgttgactgagacttcacgctctccctttgtctctggaaactgccccctcgttctgacagaatcccccaggcaatggaggaagggtgccgaggcgcctctagtctgtgcctttgccgttggaagcatttggtgctgagagggtttcccagccacccgctccctttctggggccatggtgtccctgctgtgtgtcagtggcatgtcactgtggttcagtgagcacatgggtggacgtgcagagactgtctgcgcagcccccagcagacatgcccctggggtgaggacacaggctctgcaggccatctccccctctggctcagtcatcgcctgcccacccttcacttcttaaaggtgcgcaagagaggagggccgactggagggtgtcgccggaaggtttcagcctgcccttcacaattccccttgtgcacagcccagtttccatctctcagggcccacccaggaaaatggatttcaagtgggggttttcatccagagatttgtttaacacaaaacaagaaaagctgagaggcaaaacaggggagtgaggggcaacccagaggtggggaacaacaacagcaagccgcccccatcctgagactggctgggcaccaggggaggacgcgtcaccagagcctggggccaaggccactgggggacctgccacactgtggacctgtctggtgggggctggagcctcgagaagccatgattcttgtcagaaacatttccccaggcagagagagggggccccagcctctcccctcctcttggcctccagagtcctgcaggtgcctcacagtagtgaaacccagttggaagcagctgccctgggagcctgggacaggcgacccaccgggtcagtcccctgccactcagagcagagcagggggctgagggcaagcaggtggggctgtgcgtggcctcagtgcactcggtgtcatgtctgagcctggtgtttatgccccactgctgtcctaagtccctggcgaggggaggtggaggagctgccccgtgggtgtttggagattctgttttactctgcctagagaggaaacggctttggggagggagggggaagcctttattctttactgttgtccctgttttcctttgggggaatttactcagttagcagcccctcctcaccattccccccaggaaggccatgtcccagttttctgtccacccctcctgttcctctgcactatgtctctgattttccctgccagggaagctaacccagagcacgcacctgtgctcatgagtgtttccgcaggataattcgttctgagcatgataccacagtgtggattgtctgtctgtaaggagatgccatctactaaccaatttgtattgtgtttccaataaattcctggaaatttt

SEQ ID NO: 98058 - DNA, 5640 bp, Homo sapiens
tagcgcgcctggaccctctcgagatgctgcccttagagtgggatgaaagtctggggaggaacgccttgtcaccggcaaaaacagcctttctcttggtcttcgtctgcatcctccttttcaaaatatcttgatttcccccgcgcacccctgacccggctgcagcaccggccctccgagcgggaagagccccgtgaaggctccgcagagcgatctaccccgcgctcttgtccgtgcccagaaagcgggttccacttggcagggattattttaaactgctaccagcaattcattcacctgacacccgacaccggcagcccagcccgccggaggcgagacaggattgtccggtgcccgctagaggtcgccaaacggagtccttttgcgctggttcttaagtggattcctagtgaaaaggcagacaactgaaaatattatgtctactttgagaattcctccagcaacccatacctaataagaaggatagaagaactcaacaagaagaaattgaggaagaatctgaaacaacagttgaggctgacttgaccgataagcagaaacatcagttgaaacatagggaactctttttgtcacgccagtatgaatctctgcccgcaacacatatcaggggaaagtgcagtgttgcccttctgaatgagacagaatcagtattgtcatatcttgataaggaggataccttcttctactcattggtctatgacccctcattgaaaacactattagctgacaaaggtgaaatcagagtgggacctagatatcaagcagacattccagaaatgctgttagaaggagaatcagatgagagggaacaatcaaaattggaagttaaagtttgggatccaaatagcccacttacggatcgacagattgaccagtttttagttgtagcacgtgctgttgggacattcgccagagccctggattgcagcagttctgtgaggcagcctagtttgcatatgagtgctgctgcagcttcccgagacatcaccttgtttcacgctatggatacattgtatagacacagctatgatttgagcagtgccattagtgtcttagtaccactcggaggacctgttttatgcagagatgaaatggaggaatggtcagcctctgaagctagcttatttgaagaggcactggaaaaatatggcaaagacttcaatgacatacggcaagattttcttccttggaaatcattgactagcatcattgaatattattacatgtggaaaactactgacagatatgtgcaacagaaacgtctaaaagcagcagaagctgagagtaaactgaaacaagtatatatcccaacctacagcaaaccaaatcccaaccaaatatccactagtaatgggaagcctggtgctgtgaatggagctgtggggaccacgttccagcctcagaatcctctcttagggagagcctgtgagagctgctatgctacacagtctcaccagtggtattcttggggcccacctaatatgcagtgtagattatgtgcaatttgttggctttattggaaaaaatatggaggcttgaaaatgcccacccagtcagaagaagagaagttatctcctagcccaactacagaggaccctcgtgttagaagtcacgtgtcccgccaggccatgcagggaatgccagtccgaaacactgggagtccaaagtctgcagtgaagacccgccaagctttcttccttcatactacatatttcacaaaatttgctcgtcaggtctgcaaaaataccctccggctgcggcaggcagcaagacggccgtttgttgctattaattatgctgccattagggcagaatatgcagacagacatgctgaactatctggaagtccactgaaaagcaaaagcactaggaagcctttggcatgtatcattgggtatttagagatccatcctgcaaagaaacctaatgtaattcgatctacaccaagcctgcaaaccccaactaccaagcggatgctaacaactccaaatcacacatctctgagcattctggggaaaagaaactacagtcatcacaatggtctggatgaactcacgtgctgtgtgtcagactgagctttccctgattcattctacaatccaagacttgctgcactgtcctgctgatgttcacagccgtgcctgggaagaaggcagccccactcccagtacatttcagtgggagacctctgcgtgcatccatggagacgcaatggggcggggaaggaactgtgggagtgcacgttccaaatcctgtgtctccacgtgtggatcagcagcacctcgctttcttgtcagagacctcgctgttacggagcgagacctgctgagaattgaggggctgagggaacccctccacctcctcccttctgcagcgccctgcgccccacccagcaacagcggccacttggcagtggggctgctgcaagctcagagccgctgccaccctgcatgtgtccgctcagctcggtcttatgctgtatagttactaaatatgtacaggagggccatggcatctttctgaatggatttttcttaagaaatgcgccagtgtttatgaggttcaaggtatttccctgtccttgctgttaccgtcactcagctttttctcgataggcttcatccttgtttttttgaaatgggggaatttgctgtttaccctctgcattcctatatgtgaccctccctcctactcctccaaggaacagaattaccgaggttctgacaaaagataagcctgtaaactcatcatctgtgttttgtggttggagagaaactggtgttctgcccggctctgcttggtcacagacagctccagcaagagcagttgttaaaagtgccaagcgtgtgtatcactgtgacaagccgtttgcttactgccctgttcccttgcagccaaaccagctgatgaagaactgctgccaggtgggtcctacagcaggtcacaaatgacctagtttcattttaagcagacagactctgtttggcctagaggtgtggagtgagagaactgtgtttgtgggtatgagtctgtgtggccaaccccatgacccccacccctccagcccaacatcttgtgagcacatgtgacctaggccccgggggacctgcctgctcctttggcttgggctcttcgtgtttcccacctgccctcggcacgagcccttggtggcatcacagttggccactcagctgtgctgagtagctgtgctacttgtgctggcagctgcaaggataggaatagctcagcgcccgatgagctccctgagcagatgtgaggctggcaactcccctgccctctgtttgcaggcacagggtcacagtcccaagaaagacaactggagtctgatctcccagccatctctggggttactaggaggcagctggatggcagatacgagaggcccaaatagccaagctgttgcaagacagagtggctacaattgaattgacaccctgggaagcacgaggtaacttggtaaggataatgatgctgtagatgtctgtgtcctcggaggctgagctccgcttggcagagagagcgtgctgtgtgaggtggagggcggttttgcagacatctcagcttcttttctgaggaggagttggttctcatcttaggcttctgcaagggcgagcatgggatgtctccaccaccacccactcttggagctgtgctgggtcttggcttggggcgctgagggtggggcctgtgtcagaagcatttggtgagaggggtggaggtggcaggcaggggttctcctcagggttcccactgaggggtcccttcagcaaagacctgggaggaggtgccgcatcacgtggatgtttcttccctaaagaaaaagacacaggaaagctgtctgtctgtaccctgctctggatttattgtcgtacttggacccagaaggggaaatgattccctcaccctttcactttctctctgaacccctactaagtggtgactgcagattctggaaacaattagctgcccgtgactcagctgccagcttcattttctctgccttttgggagaggccctctcacccaggcccaagagatttggagacaggagtcaggccaggtctgaagcaggagaagggaggcccctcctatctacccagttgacatttggctttgggaaaagcgcagcttgttcgagccacgtgtgccaagcaggcttttccttcctcttgtaagtaaagctcgtggttctgtagtccagtcatcctaggagggtgatgttgactgagacttcacgctctccctttgtctctggaaactgccccctcgttctgacagaatcccccaggcaatggaggaagggtgccgaggcgcctctagtctgtgcctttgccgttggaagcatttggtgctgagagggtttcccagccacccgctccctttctggggccatggtgtccctgctgtgtgtcagtggcatgtcactgtggttcagtgagcacatgggtggacgtgcagagactgtctgcgcagcccccagcagacatgcccctggggtgaggacacaggctctgcaggccatctccccctctggctcagtcatcgcctgcccacccttcacttcttaaaggtgcgcaagagaggagggccgactggagggtgtcgccggaaggtttcagcctgcccttcacaattccccttgtgcacagcccagtttccatctctcagggcccacccaggaaaatggatttcaagtgggggttttcatccagagatttgtttaacacaaaacaagaaaagctgagaggcaaaacaggggagtgaggggcaacccagaggtggggaacaacaacagcaagccgcccccatcctgagactggctgggcaccaggggaggacgcgtcaccagagcctggggccaaggccactgggggacctgccacactgtggacctgtctggtgggggctggagcctcgagaagccatgattcttgtcagaaacatttccccaggcagagagagggggccccagcctctcccctcctcttggcctccagagtcctgcaggtgcctcacagtagtgaaacccagttggaagcagctgccctgggagcctgggacaggcgacccaccgggtcagtcccctgccactcagagcagagcagggggctgagggcaagcaggtggggctgtgcgtggcctcagtgcactcggtgtcatgtctgagcctggtgtttatgccccactgctgtcctaagtccctggcgaggggaggtggaggagctgccccgtgggtgtttggagattctgttttactctgcctagagaggaaacggctttggggagggagggggaagcctttattctttactgttgtccctgttttcctttgggggaatttactcagttagcagcccctcctcaccattccccccaggaaggccatgtcccagttttctgtccacccctcctgttcctctgcactatgtctctgattttccctgccagggaagctaacccagagcacgcacctgtgctcatgagtgtttccgcaggataattcgttctgagcatgataccacagtgtggattgtctgtctgtaaggagatgccatctactaaccaatttgtattgtgtttccaataaattcctggaaatttt

SEQ ID NO: 98059 - DNA, 2018 bp, Homo sapiens
tgactctatagtgaccccaaccgtcagtcacctcctgtggatatggcggtcaacatgtaccgggtcggtatattatgtctactttgagaattcctccagcaacccatacctaataagaaggatagaagaactcaacaagactgcaagtggcaacgtggaagcaaaagtagtatgcttttatagacgacgtgatatttccaacacacttataatgctcgcagataagcatgctaaagaaattgaggaagaatctgaaacaacagttgaggctgacttgaccgataagcagaaacatcagttgaaacatagggaactctttttgtcacgccagtatgaatctctgcccgcaacacatatcaggggaaagtgcagtgttgcccttctgaatgagacagaatcagtattgtcatatcttgataaggaggataccttcttctactcattggtctatgacccctcattgaaaacactattagctgacaaaggtgaaatcagagtgggacctagatatcaagcagacattccagaaatgctgttagaaggagaatcagatgagagggaacaatcaaaattggaagttaaagtttgggatccaaatagcccacttacggatcgacagattgaccagtttttagttgtagcacgtgctgttgggacattcgccagagccctggattgcagcagttctgtgaggcagcctagtttgcatatgagtgctgctgcagcttcccgagacatcaccttgtttcacgctatggatacattgtatagacacagctatgatttgagcagtgccattagtgtcttagtaccactcggaggacctgttttatgcagagatgaaatggaggaatggtcagcctctgaagctagcttatttgaagaggcactggaaaaatatggcaaagacttcaatgacatacggcaagattttcttccttggaaatcattgactagcatcattgaatattattacatgtggaaaactactgacagatatgtgcaacagaaacgtctaaaagcagcagaagctgagagtaaactgaaacaagtatatatcccaacctacagcaaaccaaatcccaaccaaatatccactagtaatgggaagcctggtgctgtgaatggagctgtggggaccacgttccagcctcagaatcctctcttagggagagcctgtgagagctgctatgctacacagtctcaccagtggtattcttggggcccacctaatatgcagtgtagattatgtgcaatttgttggctttattggaaaaaatatggaggcttgaaaatgcccacccagtcagaagaagagaagttatctcctagcccaactacagaggaccctcgtgttagaagtcacgtgtcccgccaggccatgcagggaatgccagtccgaaacactgggagtccaaagtctgcagtgaagacccgccaagctttcttccttcatactacatatttcacaaaatttgctcgtcaggtctgcaaaaataccctccggctgcggcaggcagcaagacggccgtttgttgctattaattatgctgccattagggcagaatgtaagatgcttttaaattcttaaccttatatgttgtgcttctgaccattttctcttttcctctctttccttttttttttgtttgtttgtttgcaataaacataagttcttgtgtacagccttttatttggtttattttttaacattgtttttgtgtgctgccatttgtatcatgccaacctggaaaaaaaaaaatcaaaacattgaaacttctgtactctttaccagagagtagtgcttagcaaaagattggtgggaggtgatcctattccatggggttttgtgatggaattgcctgcagagcccttattgcagcacttttaccttttaggtagtgccacaatgtaacccctaaggatgctgttataatgagactccataatcgagacagtacagtccagtcttacatggattcattaggtttaaataaaatttgccaatttacactaaa

SEQ ID NO: 98060 - DNA, 5148 bp, Homo sapiens
gccaggtagcgaggctgggtggtgccgggtcggattatgtctactttgagaattcctccagcaacccatacctaataagaaggatagaagaactcaacaagactgcaagtggcaacgtggaagcaaaagtagtatgcttttatagacgacgtgatatttccaacacacttataatgctcgcagataagcatgctaaagaaattgaggaagaatctgaaacaacagttgaggctgacttgaccgataagcagaaacatcagttgaaacatagggaactctttttgtcacgccagtatgaatctctgcccgcaacacatatcaggggaaagtgcagtgttgcccttctgaatgagacagaatcagtattgtcatatcttgataaggaggataccttcttctactcattggtctatgacccctcattgaaaacactattagctgacaaaggtgaaatcagagtgggacctagatatcaagcagacattccagaaatgctgttagaaggagaatcagatgagagggaacaatcaaaattggaagttaaagtttgggatccaaatagcccacttacggatcgacagattgaccagtttttagttgtagcacgtgctgttgggacattcgccagagccctggattgcagcagttctgtgaggcagcctagtttgcatatgagtgctgctgcagcttcccgagacatcaccttgcttccttggaaatcattgactagcatcattgaatattattacatgtggaaaactactgacagatatgtgcaacagaaacgtctaaaagcagcagaagctgagagtaaactgaaacaagtatatatcccaacctacagcaaaccaaatcccaaccaaatatccactagtaatgggaagcctggtgctgtgaatggagctgtggggaccacgttccagcctcagaatcctctcttagggagagcctgtgagagctgctatgctacacagtctcaccagtggtattcttggggcccacctaatatgcagtgtagattatgtgcaatttgttggctttattggaaaaaatatggaggcttgaaaatgcccacccagtcagaagaagagaagttatctcctagcccaactacagaggaccctcgtgttagaagtcacgtgtcccgccaggccatgcagggaatgccagtccgaaacactgggagtccaaagtctgcagtgaagacccgccaagctttcttccttcatactacatatttcacaaaatttgctcgtcaggtctgcaaaaataccctccggctgcggcaggcagcaagacggccgtttgttgctattaattatgctgccattagggcagaatatgcagacagacatgctgaactatctggaagtccactgaaaagcaaaagcactaggaagcctttggcatgtatcattgggtatttagagatccatcctgcaaagaaacctaatgtaattcgatctacaccaagcctgcaaaccccaactaccaagcggatgctaacaactccaaatcacacatctctgagcattctggggaaaagaaactacagtcatcacaatggtctggatgaactcacgtgctgtgtgtcagactgagctttccctgattcattctacaatccaagacttgctgcactgtcctgctgatgttcacagccgtgcctgggaagaaggcagccccactcccagtacatttcagtgggagacctctgcgtgcatccatggagacgcaatggggcggggaaggaactgtgggagtgcacgttccaaatcctgtgtctccacgtgtggatcagcagcacctcgctttcttgtcagagacctcgctgttacggagcgagacctgctgagaattgaggggctgagggaacccctccacctcctcccttctgcagcgccctgcgccccacccagcaacagcggccacttggcagtggggctgctgcaagctcagagccgctgccaccctgcatgtgtccgctcagctcggtcttatgctgtatagttactaaatatgtacaggagggccatggcatctttctgaatggatttttcttaagaaatgcgccagtgtttatgaggttcaaggtatttccctgtccttgctgttaccgtcactcagctttttctcgataggcttcatccttgtttttttgaaatgggggaatttgctgtttaccctctgcattcctatatgtgaccctccctcctactcctccaaggaacagaattaccgaggttctgacaaaagataagcctgtaaactcatcatctgtgttttgtggttggagagaaactggtgttctgcccggctctgcttggtcacagacagctccagcaagagcagttgttaaaagtgccaagcgtgtgtatcactgtgacaagccgtttgcttactgccctgttcccttgcagccaaaccagctgatgaagaactgctgccaggtgggtcctacagcaggtcacaaatgacctagtttcattttaagcagacagactctgtttggcctagaggtgtggagtgagagaactgtgtttgtgggtatgagtctgtgtggccaaccccatgacccccacccctccagcccaacatcttgtgagcacatgtgacctaggccccgggggacctgcctgctcctttggcttgggctcttcgtgtttcccacctgccctcggcacgagcccttggtggcatcacagttggccactcagctgtgctgagtagctgtgctacttgtgctggcagctgcaaggataggaatagctcagcgcccgatgagctccctgagcagatgtgaggctggcaactcccctgccctctgtttgcaggcacagggtcacagtcccaagaaagacaactggagtctgatctcccagccatctctggggttactaggaggcagctggatggcagatacgagaggcccaaatagccaagctgttgcaagacagagtggctacaattgaattgacaccctgggaagcacgaggtaacttggtaaggataatgatgctgtagatgtctgtgtcctcggaggctgagctccgcttggcagagagagcgtgctgtgtgaggtggagggcggttttgcagacatctcagcttcttttctgaggaggagttggttctcatcttaggcttctgcaagggcgagcatgggatgtctccaccaccacccactcttggagctgtgctgggtcttggcttggggcgctgagggtggggcctgtgtcagaagcatttggtgagaggggtggaggtggcaggcaggggttctcctcagggttcccactgaggggtcccttcagcaaagacctgggaggaggtgccgcatcacgtggatgtttcttccctaaagaaaaagacacaggaaagctgtctgtctgtaccctgctctggatttattgtcgtacttggacccagaaggggaaatgattccctcaccctttcactttctctctgaacccctactaagtggtgactgcagattctggaaacaattagctgcccgtgactcagctgccagcttcattttctctgccttttgggagaggccctctcacccaggcccaagagatttggagacaggagtcaggccaggtctgaagcaggagaagggaggcccctcctatctacccagttgacatttggctttgggaaaagcgcagcttgttcgagccacgtgtgccaagcaggcttttccttcctcttgtaagtaaagctcgtggttctgtagtccagtcatcctaggagggtgatgttgactgagacttcacgctctccctttgtctctggaaactgccccctcgttctgacagaatcccccaggcaatggaggaagggtgccgaggcgcctctagtctgtgcctttgccgttggaagcatttggtgctgagagggtttcccagccacccgctccctttctggggccatggtgtccctgctgtgtgtcagtggcatgtcactgtggttcagtgagcacatgggtggacgtgcagagactgtctgcgcagcccccagcagacatgcccctggggtgaggacacaggctctgcaggccatctccccctctggctcagtcatcgcctgcccacccttcacttcttaaaggtgcgcaagagaggagggccgactggagggtgtcgccggaaggtttcagcctgcccttcacaattccccttgtgcacagcccagtttccatctctcagggcccacccaggaaaatggatttcaagtgggggttttcatccagagatttgtttaacacaaaacaagaaaagctgagaggcaaaacaggggagtgaggggcaacccagaggtggggaacaacaacagcaagccgcccccatcctgagactggctgggcaccaggggaggacgcgtcaccagagcctggggccaaggccactgggggacctgccacactgtggacctgtctggtgggggctggagcctcgagaagccatgattcttgtcagaaacatttccccaggcagagagagggggccccagcctctcccctcctcttggcctccagagtcctgcaggtgcctcacagtagtgaaacccagttggaagcagctgccctgggagcctgggacaggcgacccaccgggtcagtcccctgccactcagagcagagcagggggctgagggcaagcaggtggggctgtgcgtggcctcagtgcactcggtgtcatgtctgagcctggtgtttatgccccactgctgtcctaagtccctggcgaggggaggtggaggagctgccccgtgggtgtttggagattctgttttactctgcctagagaggaaacggctttggggagggagggggaagcctttattctttactgttgtccctgttttcctttgggggaatttactcagttagcagcccctcctcaccattccccccaggaaggccatgtcccagttttctgtccacccctcctgttcctctgcactatgtctctgattttccctgccagggaagctaacccagagcacgcacctgtgctcatgagtgtttccgcaggataattcgttctgagcatgataccacagtgtggattgtctgtctgtaaggagatgccatctactaaccaatttgtattgtgtttccaataaattcctggaaatttt

SEQ ID NO: 98061 - DNA, 5455 bp, Homo sapiens
tgactctatagtgaccccaaccgtcagtcacctcctgtggatatggcggtcaacatgtaccgggtcggtatattatgtctactttgagaattcctccagcaacccatacctaataagaaggatagaagaactcaacaagactgcaagtggcaacgtggaagcaaaagtagtatgcttttatagacgacgtgatatttccaacacacttataatgctcgcagataagcatgctaaagaaattgaggaagaatctgaaacaacagttgaggctgacttgaccgataagcagaaacatcagttgaaacatagggaactctttttgtcacgccagtatgaatctctgcccgcaacacatatcaggggaaagtgcagtgttgcccttctgaatgagacagaatcagtattgtcatatcttgataaggaggataccttcttctactcattggtctatgacccctcattgaaaacactattagctgacaaaggtgaaatcagagtgggacctagatatcaagcagacattccagaaatgctgttagaaggagaatcagatgagagggaacaatcaaaattggaagttaaagtttgggatccaaatagcccacttacggatcgacagattgaccagtttttagttgtagcacgtgctgttgggacattcgccagagccctggattgcagcagttctgtgaggcagcctagtttgcatatgagtgctgctgcagcttcccgagacatcaccttgtttcacgctatggatacattgtatagacacagctatgatttgagcagtgccattagtgtcttagtaccactcggaggacctgttttatgcagagatgaaatggaggaatggtcagcctctgaagctagcttatttgaagaggcactggaaaaatatggcaaagacttcaatgacatacggcaagattttcttccttggaaatcattgactagcatcattgaatattattacatgtggaaaactactgacagatatgtgcaacagaaacgtctaaaagcagcagaagctgagagtaaactgaaacaagtatatatcccaacctagctgagcatggtagttcacgcctataatcccagcactttggggaacctcgtttctgcaaaaaatttaaaagaaatataagcagcaaaccaaatcccaaccaaatatccactagtaatgggaagcctggtgctgtgaatggagctgtggggaccacgttccagcctcagaatcctctcttagggagagcctgtgagagctgctatgctacacagtctcaccagtggtattcttggggcccacctaatatgcagtgtagattatgtgcaatttgttggctttattggaaaaaatatggaggcttgaaaatgcccacccagtcagaagaagagaagttatctcctagcccaactacagaggaccctcgtgttagaagtcacgtgtcccgccaggccatgcagggaatgccagtccgaaacactgggagtccaaagtctgcagtgaagacccgccaagctttcttccttcatactacatatttcacaaaatttgctcgtcaggtctgcaaaaataccctccggctgcggcaggcagcaagacggccgtttgttgctattaattatgctgccattagggcagaatatgcagacagacatgctgaactatctggaagtccactgaaaagcaaaagcactaggaagcctttggcatgtatcattgggtatttagagatccatcctgcaaagaaacctaatgtaattcgatctacaccaagcctgcaaaccccaactaccaagcggatgctaacaactccaaatcacacatctctgagcattctggggaaaagaaactacagtcatcacaatggtctggatgaactcacgtgctgtgtgtcagactgagctttccctgattcattctacaatccaagacttgctgcactgtcctgctgatgttcacagccgtgcctgggaagaaggcagccccactcccagtacatttcagtgggagacctctgcgtgcatccatggagacgcaatggggcggggaaggaactgtgggagtgcacgttccaaatcctgtgtctccacgtgtggatcagcagcacctcgctttcttgtcagagacctcgctgttacggagcgagacctgctgagaattgaggggctgagggaacccctccacctcctcccttctgcagcgccctgcgccccacccagcaacagcggccacttggcagtggggctgctgcaagctcagagccgctgccaccctgcatgtgtccgctcagctcggtcttatgctgtatagttactaaatatgtacaggagggccatggcatctttctgaatggatttttcttaagaaatgcgccagtgtttatgaggttcaaggtatttccctgtccttgctgttaccgtcactcagctttttctcgataggcttcatccttgtttttttgaaatgggggaatttgctgtttaccctctgcattcctatatgtgaccctccctcctactcctccaaggaacagaattaccgaggttctgacaaaagataagcctgtaaactcatcatctgtgttttgtggttggagagaaactggtgttctgcccggctctgcttggtcacagacagctccagcaagagcagttgttaaaagtgccaagcgtgtgtatcactgtgacaagccgtttgcttactgccctgttcccttgcagccaaaccagctgatgaagaactgctgccaggtgggtcctacagcaggtcacaaatgacctagtttcattttaagcagacagactctgtttggcctagaggtgtggagtgagagaactgtgtttgtgggtatgagtctgtgtggccaaccccatgacccccacccctccagcccaacatcttgtgagcacatgtgacctaggccccgggggacctgcctgctcctttggcttgggctcttcgtgtttcccacctgccctcggcacgagcccttggtggcatcacagttggccactcagctgtgctgagtagctgtgctacttgtgctggcagctgcaaggataggaatagctcagcgcccgatgagctccctgagcagatgtgaggctggcaactcccctgccctctgtttgcaggcacagggtcacagtcccaagaaagacaactggagtctgatctcccagccatctctggggttactaggaggcagctggatggcagatacgagaggcccaaatagccaagctgttgcaagacagagtggctacaattgaattgacaccctgggaagcacgaggtaacttggtaaggataatgatgctgtagatgtctgtgtcctcggaggctgagctccgcttggcagagagagcgtgctgtgtgaggtggagggcggttttgcagacatctcagcttcttttctgaggaggagttggttctcatcttaggcttctgcaagggcgagcatgggatgtctccaccaccacccactcttggagctgtgctgggtcttggcttggggcgctgagggtggggcctgtgtcagaagcatttggtgagaggggtggaggtggcaggcaggggttctcctcagggttcccactgaggggtcccttcagcaaagacctgggaggaggtgccgcatcacgtggatgtttcttccctaaagaaaaagacacaggaaagctgtctgtctgtaccctgctctggatttattgtcgtacttggacccagaaggggaaatgattccctcaccctttcactttctctctgaacccctactaagtggtgactgcagattctggaaacaattagctgcccgtgactcagctgccagcttcattttctctgccttttgggagaggccctctcacccaggcccaagagatttggagacaggagtcaggccaggtctgaagcaggagaagggaggcccctcctatctacccagttgacatttggctttgggaaaagcgcagcttgttcgagccacgtgtgccaagcaggcttttccttcctcttgtaagtaaagctcgtggttctgtagtccagtcatcctaggagggtgatgttgactgagacttcacgctctccctttgtctctggaaactgccccctcgttctgacagaatcccccaggcaatggaggaagggtgccgaggcgcctctagtctgtgcctttgccgttggaagcatttggtgctgagagggtttcccagccacccgctccctttctggggccatggtgtccctgctgtgtgtcagtggcatgtcactgtggttcagtgagcacatgggtggacgtgcagagactgtctgcgcagcccccagcagacatgcccctggggtgaggacacaggctctgcaggccatctccccctctggctcagtcatcgcctgcccacccttcacttcttaaaggtgcgcaagagaggagggccgactggagggtgtcgccggaaggtttcagcctgcccttcacaattccccttgtgcacagcccagtttccatctctcagggcccacccaggaaaatggatttcaagtgggggttttcatccagagatttgtttaacacaaaacaagaaaagctgagaggcaaaacaggggagtgaggggcaacccagaggtggggaacaacaacagcaagccgcccccatcctgagactggctgggcaccaggggaggacgcgtcaccagagcctggggccaaggccactgggggacctgccacactgtggacctgtctggtgggggctggagcctcgagaagccatgattcttgtcagaaacatttccccaggcagagagagggggccccagcctctcccctcctcttggcctccagagtcctgcaggtgcctcacagtagtgaaacccagttggaagcagctgccctgggagcctgggacaggcgacccaccgggtcagtcccctgccactcagagcagagcagggggctgagggcaagcaggtggggctgtgcgtggcctcagtgcactcggtgtcatgtctgagcctggtgtttatgccccactgctgtcctaagtccctggcgaggggaggtggaggagctgccccgtgggtgtttggagattctgttttactctgcctagagaggaaacggctttggggagggagggggaagcctttattctttactgttgtccctgttttcctttgggggaatttactcagttagcagcccctcctcaccattccccccaggaaggccatgtcccagttttctgtccacccctcctgttcctctgcactatgtctctgattttccctgccagggaagctaacccagagcacgcacctgtgctcatgagtgtttccgcaggataattcgttctgagcatgataccacagtgtggattgtctgtctgtaaggagatgccatctactaaccaatttgtattgtgtttccaataaattcctggaaatttt

SEQ ID NO: 98062 - DNA, 5228 bp, Homo sapiens
gccaggtagcgaggctgggtggtgccgggtcggattatgtctactttgagaattcctccagcaacccatacctaataagaaggatagaagaactcaacaagactgcaagtggcaacgtggaagcaaaagtagtatgcttttatagacgacgtgatatttccaacacacttataatgctcgcagataagcatgctaaagaaattgaggaagaatctgaaacaacagttgaggctgacttgaccgataagcagaaacatcagttgaaacatagggaactctttttgtcacgccagtatgaatctctgcccgcaacacatatcaggggaaagtgcagtgttgcccttctgaatgagacagaatcagtattgtcatatcttgataaggaggataccttcttctactcattggtctatgacccctcattgaaaacactattagctgacaaaggtgaaatcagagtgggacctagatatcaagcagacattccagaaatgctgttagaaggagaatcagatgagagggaacaatcaaaattggaagttaaagtttgggatccaaatagcccacttacggatcgacagattgaccagtttttagttgtagcacgtgctgttgggacattcgccagagccctggattgcagcagttctgtgaggcagcctagtttgcatatgagtgctgctgcagcttcccgagacatcaccttgcttccttggaaatcattgactagcatcattgaatattattacatgtggaaaactactgacagatatgtgcaacagaaacgtctaaaagcagcagaagctgagagtaaactgaaacaagtatatatcccaacctagctgagcatggtagttcacgcctataatcccagcactttggggaacctcgtttctgcaaaaaatttaaaagaaatataagcagcaaaccaaatcccaaccaaatatccactagtaatgggaagcctggtgctgtgaatggagctgtggggaccacgttccagcctcagaatcctctcttagggagagcctgtgagagctgctatgctacacagtctcaccagtggtattcttggggcccacctaatatgcagtgtagattatgtgcaatttgttggctttattggaaaaaatatggaggcttgaaaatgcccacccagtcagaagaagagaagttatctcctagcccaactacagaggaccctcgtgttagaagtcacgtgtcccgccaggccatgcagggaatgccagtccgaaacactgggagtccaaagtctgcagtgaagacccgccaagctttcttccttcatactacatatttcacaaaatttgctcgtcaggtctgcaaaaataccctccggctgcggcaggcagcaagacggccgtttgttgctattaattatgctgccattagggcagaatatgcagacagacatgctgaactatctggaagtccactgaaaagcaaaagcactaggaagcctttggcatgtatcattgggtatttagagatccatcctgcaaagaaacctaatgtaattcgatctacaccaagcctgcaaaccccaactaccaagcggatgctaacaactccaaatcacacatctctgagcattctggggaaaagaaactacagtcatcacaatggtctggatgaactcacgtgctgtgtgtcagactgagctttccctgattcattctacaatccaagacttgctgcactgtcctgctgatgttcacagccgtgcctgggaagaaggcagccccactcccagtacatttcagtgggagacctctgcgtgcatccatggagacgcaatggggcggggaaggaactgtgggagtgcacgttccaaatcctgtgtctccacgtgtggatcagcagcacctcgctttcttgtcagagacctcgctgttacggagcgagacctgctgagaattgaggggctgagggaacccctccacctcctcccttctgcagcgccctgcgccccacccagcaacagcggccacttggcagtggggctgctgcaagctcagagccgctgccaccctgcatgtgtccgctcagctcggtcttatgctgtatagttactaaatatgtacaggagggccatggcatctttctgaatggatttttcttaagaaatgcgccagtgtttatgaggttcaaggtatttccctgtccttgctgttaccgtcactcagctttttctcgataggcttcatccttgtttttttgaaatgggggaatttgctgtttaccctctgcattcctatatgtgaccctccctcctactcctccaaggaacagaattaccgaggttctgacaaaagataagcctgtaaactcatcatctgtgttttgtggttggagagaaactggtgttctgcccggctctgcttggtcacagacagctccagcaagagcagttgttaaaagtgccaagcgtgtgtatcactgtgacaagccgtttgcttactgccctgttcccttgcagccaaaccagctgatgaagaactgctgccaggtgggtcctacagcaggtcacaaatgacctagtttcattttaagcagacagactctgtttggcctagaggtgtggagtgagagaactgtgtttgtgggtatgagtctgtgtggccaaccccatgacccccacccctccagcccaacatcttgtgagcacatgtgacctaggccccgggggacctgcctgctcctttggcttgggctcttcgtgtttcccacctgccctcggcacgagcccttggtggcatcacagttggccactcagctgtgctgagtagctgtgctacttgtgctggcagctgcaaggataggaatagctcagcgcccgatgagctccctgagcagatgtgaggctggcaactcccctgccctctgtttgcaggcacagggtcacagtcccaagaaagacaactggagtctgatctcccagccatctctggggttactaggaggcagctggatggcagatacgagaggcccaaatagccaagctgttgcaagacagagtggctacaattgaattgacaccctgggaagcacgaggtaacttggtaaggataatgatgctgtagatgtctgtgtcctcggaggctgagctccgcttggcagagagagcgtgctgtgtgaggtggagggcggttttgcagacatctcagcttcttttctgaggaggagttggttctcatcttaggcttctgcaagggcgagcatgggatgtctccaccaccacccactcttggagctgtgctgggtcttggcttggggcgctgagggtggggcctgtgtcagaagcatttggtgagaggggtggaggtggcaggcaggggttctcctcagggttcccactgaggggtcccttcagcaaagacctgggaggaggtgccgcatcacgtggatgtttcttccctaaagaaaaagacacaggaaagctgtctgtctgtaccctgctctggatttattgtcgtacttggacccagaaggggaaatgattccctcaccctttcactttctctctgaacccctactaagtggtgactgcagattctggaaacaattagctgcccgtgactcagctgccagcttcattttctctgccttttgggagaggccctctcacccaggcccaagagatttggagacaggagtcaggccaggtctgaagcaggagaagggaggcccctcctatctacccagttgacatttggctttgggaaaagcgcagcttgttcgagccacgtgtgccaagcaggcttttccttcctcttgtaagtaaagctcgtggttctgtagtccagtcatcctaggagggtgatgttgactgagacttcacgctctccctttgtctctggaaactgccccctcgttctgacagaatcccccaggcaatggaggaagggtgccgaggcgcctctagtctgtgcctttgccgttggaagcatttggtgctgagagggtttcccagccacccgctccctttctggggccatggtgtccctgctgtgtgtcagtggcatgtcactgtggttcagtgagcacatgggtggacgtgcagagactgtctgcgcagcccccagcagacatgcccctggggtgaggacacaggctctgcaggccatctccccctctggctcagtcatcgcctgcccacccttcacttcttaaaggtgcgcaagagaggagggccgactggagggtgtcgccggaaggtttcagcctgcccttcacaattccccttgtgcacagcccagtttccatctctcagggcccacccaggaaaatggatttcaagtgggggttttcatccagagatttgtttaacacaaaacaagaaaagctgagaggcaaaacaggggagtgaggggcaacccagaggtggggaacaacaacagcaagccgcccccatcctgagactggctgggcaccaggggaggacgcgtcaccagagcctggggccaaggccactgggggacctgccacactgtggacctgtctggtgggggctggagcctcgagaagccatgattcttgtcagaaacatttccccaggcagagagagggggccccagcctctcccctcctcttggcctccagagtcctgcaggtgcctcacagtagtgaaacccagttggaagcagctgccctgggagcctgggacaggcgacccaccgggtcagtcccctgccactcagagcagagcagggggctgagggcaagcaggtggggctgtgcgtggcctcagtgcactcggtgtcatgtctgagcctggtgtttatgccccactgctgtcctaagtccctggcgaggggaggtggaggagctgccccgtgggtgtttggagattctgttttactctgcctagagaggaaacggctttggggagggagggggaagcctttattctttactgttgtccctgttttcctttgggggaatttactcagttagcagcccctcctcaccattccccccaggaaggccatgtcccagttttctgtccacccctcctgttcctctgcactatgtctctgattttccctgccagggaagctaacccagagcacgcacctgtgctcatgagtgtttccgcaggataattcgttctgagcatgataccacagtgtggattgtctgtctgtaaggagatgccatctactaaccaatttgtattgtgtttccaataaattcctggaaatttt

SEQ ID NO: 98063 - DNA, 1709 bp, Homo sapiens
tgactctatagtgaccccaaccgtcagtcacctcctgtggatatggcggtcaacatgtaccgggtcggtatattatgtctactttgagaattcctccagcaacccatacctaataagaaggatagaagaactcaacaagactgcaagtggcaacgtggaagcaaaagtagtatgcttttatagacgacgtgatatttccaacacacttataatgctcgcagataagcatgctaaagaaattgaggaagaatctgaaacaacagttgaggctgacttgaccgataagcagaaacatcagttgaaacatagggaactctttttgtcacgccagtatgaatctctgcccgcaacacatatcaggggaaagtgcagtgttgcccttctgaatgagacagaatcagtattgtcatatcttgataaggaggataccttcttctactcattggtctatgacccctcattgaaaacactattagctgacaaaggtgaaatcagagtgggacctagatatcaagcagacattccagaaatgctgttagaaggagaatcagatgagagggaacaatcaaaattggaagttaaagtttgggatccaaatagcccacttacggatcgacagattgaccagtttttagttgtagcacgtgctgttgggacattcgccagagccctggattgcagcagttctgtgaggcagcctagtttgcatatgagtgctgctgcagcttcccgagacatcaccttgtttcacgctatggatacattgtatagacacagctatgatttgagcagtgccattagtgtcttagtaccactcggaggacctgttttatgcagagatgaaatggaggaatggtcagcctctgaagctagcttatttgaagaggcactggaaaaatatggcaaagacttcaatgacatacggcaagattttcttccttggaaatcattgactagcatcattgaatattattacatgtggaaaactactgacagatatgtgcaacagaaacgtctaaaagcagcagaagctgagagtaaactgaaacaagtatatatcccaacctacagcaaaccaaatcccaaccaaatatccactagtaatgggaagcctggtgctgtgaatggagctgtggggaccacgttccagcctcagaatcctctcttagggagagcctgtgagagctgctatgctacacagtctcaccagtggtattcttggggcccacctaatatgcagtgtagattatgtgcaatttgttggctttattggaaaaaatatggaggcttgaaaatgcccacccagtcagaagaagagaagttatctcctagcccaactacagaggaccctcgtgttagaagtcacgtgtcccgccaggccatgcagggaatgccagtccgaaacactgggagtccaaagtctgcagtgaagacccgccaagctttcttccttcatactacatatttcacaaaatttgctcgtcaggtctgcaaaaataccctccggctgcggcaggcagcaagacggccgtttgttgctattaattatgctgccattagggcagaatgtaagatgcttttaaattcttaaccttatatgttgtgcttctgaccattttctcttttcctctctttccttttttttttgtttgtttgtttgcaataaacataagttcttgtgtaaaaaaaaacatattaatttcataaaa

SEQ ID NO: 98064 - DNA, 5760 bp, Homo sapiens
  misc_feature (5690)..(5690): n is a, c, g, or t
tgactctatagtgaccccaaccgtcagtcacctcctgtggatatggcggtcaacatgtaccgggtcggtatattatgtctactttgagaattcctccagcaacccatacctaataagaaggatagaagaactcaacaagactgcaagtggcaacgtggaagcaaaagtagtatgcttttatagacgacgtgatatttccaacacacttataatgctcgcagataagcatgctaaagaaattgaggaagaatctgaaacaacagttgaggctgacttgaccgataagcagaaacatcagttgaaacatagggaactctttttgtcacgccagtatgaatctctgcccgcaacacatatcaggggaaagtgcagtgttgcccttctgaatgagacagaatcagtattgtcatatcttgataaggaggataccttcttctactcattggtctatgacccctcattgaaaacactattagctgacaaaggtgaaatcagagtgggacctagatatcaagcagacattccagaaatgctgttagaaggagaatcagatgagagggaacaatcaaaattggaagttaaagtttgggatccaaatagcccacttacggatcgacagattgaccagtttttagttgtagcacgtgctgttgggacattcgccagagccctggattgcagcagttctgtgaggcagcctagtttgcatatgagtgctgctgcagcttcccgagacatcaccttgtttcacgctatggatacattgtatagacacagctatgatttgagcagtgccattagtgtcttagtaccactcggaggacctgttttatgcagagatgaaatggaggaatggtcagcctctgaagctagcttatttgaagaggcactggaaaaatatggcaaagacttcaatgacatacggcaagattttcttccttggaaatcattgactagcatcattgaatattattacatgtggaaaactactgacagatatgtgcaacagaaacgtctaaaagcagcagaagctgagagtaaactgaaacaagtatatatcccaacctacagcaaaccaaatcccaaccaaatatccactagtaatgggaagcctggtgctgtgaatggagctgtggggaccacgttccagcctcagaatcctctcttagggagagcctgtgagagctgctatgctacacagtctcaccagtggtattcttggggcccacctaatatgcagtgtagattatgtgcaatttgttggctttattggaaaaaatatggaggcttgaaaatgcccacccagtcagaagaagagaagttatctcctagcccaactacagaggaccctcgtgttagaagtcacgtgtcccgccaggccatgcagggaatgccagtccgaaacactgggagtccaaagtctgcagtgaagacccgccaagctttcttccttcatactacatatttcacaaaatttgctcgtcaggtctgcaaaaataccctccggctgcggcaggcagcaagacggccgtttgttgctattaattatgctgccattagggcagaatatgcagacagacatgctgaactatctggaagtccactgaaaagcaaaagcactaggaagcctttggcatgtatcattgggtatttagagatccatcctgcaaagaaacctaatgtaattcgatctacaccaagcctgcaaaccccaactaccaagcggatgctaacaactccaaatcacacatctctgagcattctggggaaaagaaactacagtcatcacaatggtctggatgaactcacgtgctgtgtgtcagactgagctttccctgattcattctacaatccaagacttgctgcactgtcctgctgatgttcacagccgtgcctgggaagaaggcagccccactcccagtacatttcagtgggagacctctgcgtgcatccatggagacgcaatggggcggggaaggaactgtgggagtgcacgttccaaatcctgtgtctccacgtgtggatcagcagcacctcgctttcttgtcagagacctcgctgttacggagcgagacctgctgagaattgaggggctgagggaacccctccacctcctcccttctgcagcgccctgcgccccacccagcaacagcggccacttggcagtggggctgctgcaagctcagagccgctgccaccctgcatgtgtccgctcagctcggtcttatgctgtatagttactaaatatgtacaggagggccatggcatctttctgaatggatttttcttaagaaatgcgccagtgtttatgaggttcaaggtatttccctgtccttgctgttaccgtcactcagctttttctcgataggcttcatccttgtttttttgaaatgggggaatttgctgtttaccctctgcattcctatatgtgaccctccctcctactcctccaaggaacagaattaccgaggttctgacaaaagataagcctgtaaactcatcatctgtgttttgtggttggagagaaactggtgttctgcccggctctgcttggtcacagacagctccagcaagagcagttgttaaaagtgccaagcgtgtgtatcactgtgacaagccgtttgcttactgccctgttcccttgcagccaaaccagctgatgaagaactgctgccaggtgggtcctacagcaggtcacaaatgacctagtttcattttaagcagacagactctgtttggcctagaggtgtggagtgagagaactgtgtttgtgggtatgagtctgtgtggccaaccccatgacccccacccctccagcccaacatcttgtgagcacatgtgacctaggccccgggggacctgcctgctcctttggcttgggctcttcgtgtttcccacctgccctcggcacgagcccttggtggcatcacagttggccactcagctgtgctgagtagctgtgctacttgtgctggcagctgcaaggataggaatagctcagcgcccgatgagctccctgagcagatgtgaggctggcaactcccctgccctctgtttgcaggcacagggtcacagtcccaagaaagacaactggagtctgatctcccagccatctctggggttactaggaggcagctggatggcagatacgagaggcccaaatagccaagctgttgcaagacagagtggctacaattgaattgacaccctgggaagcacgaggtaacttggtaaggataatgatgctgtagatgtctgtgtcctcggaggctgagctccgcttggcagagagagcgtgctgtgtgaggtggagggcggttttgcagacatctcagcttcttttctgaggaggagttggttctcatcttaggcttctgcaagggcgagcatgggatgtctccaccaccacccactcttggagctgtgctgggtcttggcttggggcgctgagggtggggcctgtgtcagaagcatttggtgagaggggtggaggtggcaggcaggggttctcctcagggttcccactgaggggtcccttcagcaaagacctgggaggaggtgccgcatcacgtggatgtttcttccctaaagaaaaagacacaggaaagctgtctgtctgtaccctgctctggatttattgtcgtacttggacccagaaggggaaatgattccctcaccctttcactttctctctgaacccctactaagtggtgactgcagattctggaaacaattagctgcccgtgactcagctgccagcttcattttctctgccttttgggagaggccctctcacccaggcccaagagatttggagacaggagtcaggccaggtctgaagcaggagaagggaggcccctcctatctacccagttgacatttggctttgggaaaagcgcagcttgttcgagccacgtgtgccaagcaggcttttccttcctcttgtaagtaaagctcgtggttctgtagtccagtcatcctaggagggtgatgttgactgagacttcacgctctccctttgtctctggaaactgccccctcgttctgacagaatcccccaggcaatggaggaagggtgccgaggcgcctctagtctgtgcctttgccgttggaagcatttggtgctgagagggtttcccagccacccgctccctttctggggccatggtgtccctgctgtgtgtcagtggcatgtcactgtggttcagtgagcacatgggtggacgtgcagagactgtctgcgcagcccccagcagacatgcccctggggtgaggacacaggctctgcaggccatctccccctctggctcagtcatcgcctgcccacccttcacttcttaaaggtgcgcaagagaggagggccgactggagggtgtcgccggaaggtttcagcctgcccttcacaattccccttgtgcacagcccagtttccatctctcagggcccacccaggaaaatggatttcaagtgggggttttcatccagagatttgtttaacacaaaacaagaaaagctgagaggcaaaacaggggagtgaggggcaacccagaggtggggaacaacaacagcaagccgcccccatcctgagactggctgggcaccaggggaggacgcgtcaccagagcctggggccaaggccactgggggacctgccacactgtggacctgtctggtgggggctggagcctcgagaagccatgattcttgtcagaaacatttccccaggcagagagagggggccccagcctctcccctcctcttggcctccagagtcctgcaggtgcctcacagtagtgaaacccagttggaagcagctgccctgggagcctgggacaggcgacccaccgggtcagtcccctgccactcagagcagagcagggggctgagggcaagcaggtggggctgtgcgtggcctcagtgcactcggtgtcatgtctgagcctggtgtttatgccccactgctgtcctaagtccctggcgaggggaggtggaggagctgccccgtgggtgtttggagattctgttttactctgcctagagaggaaacggctttggggagggagggggaagcctttattctttactgttgtccctgttttcctttgggggaatttactcagttagcagcccctcctcaccattccccccaggaaggccatgtcccagttttctgtccacccctcctgttcctctgcactatgtctctgattttccctgccagggaagctaacccagagcacgcacctgtgctcatgagtgtttccgcaggataattcgttctgagcatgataccacagtgtggattgtctgtctgtaaggagatgccatctactaaccaatttgtattgtgtttccaataaattcctggaaattttaaaaaaaaaaaaaaaaaactcgagtttttttttttttttttttgaaatttaaagaaaaaatttattgaagatctgaaaaacaattcctaaaagattgacttttccagaaaactagctacacaatgcattgcgtctatcatgttaaaacgtgcattagacacaaatacaaaaaccatgaaacaagccaccattcttcaacaatttgagccaagataaaatgcctaagtaacaacatggatgacttgcaaaggatgggctctttactttaagcaccataaaaaaaaacaaaagcacaaatggatgagtgtgttcagntatatacacttgattgaaccttggcactaggaatcagagcattttgtcatatagcattaacatgtattat

SEQ ID NO: 98065 - DNA, 4592 bp, Homo sapiens
tgactctatagtgaccccaaccgtcagtcacctcctgtggatatggcggtcaacatgtaccgggtcggtatattatgtctactttgagaattcctccagcaacccatacctaataagaaggatagaagaactcaacaagactgcaagtggcaacgtggaagcaaaagtagtatgcttttatagacgacgtgatatttccaacacacttataatgctcgcagataagcatgctaaagaaattgaggaagaatctgaaacaacagttgaggctgacttgaccgataagcagaaacatcagttgaaacatagggaactctttttgtcacgccagtatgaatctctgcccgcaacacatatcaggggaaagtgcagtgttgcccttctgaatgagacagaatcagtattgtcatatcttgataaggaggataccttcttctactcattggtctatgacccctcattgaaaacactattagctgacaaaggtgaaatcagagtgggacctagatatcaagcagacattccagaaatgctgttagaaggagaatcagatgagagggaacaatcaaaattggaagttaaagtttgggatccaaatagcccacttacggatcgacagattgaccagtttttagttgtagcacgtgctgttgggacattcgccagagccctggattgcagcagttctgtgaggcagcctagtttgcatatgagtgctgctgcagcttcccgagacatcaccttgtttcacgctatggatacattgtatagacacagctatgatttgagcagtgccattagtgtcttagtaccactcggaggacctgttttatgcagagatgaaatggaggaatggtcagcctctgaagctagcttatttgaagaggcactggaaaaatatggcaaagacttcaatgacatacggcaagattttcttccttggaaatcattgactagcatcattgaatattattacatgtggaaaactactgacagatatgtgcaacagaaacgtctaaaagcagcagaagctgagagtaaactgaaacaagtatatatcccaacctacagcaaaccaaatcccaaccaaatatccactagtaatgggaagcctggtgctgtgaatggagctgtggggaccacgttccagcctcagaatcctctcttagggagagcctgtgagagctgctatgctacacagtctcaccagtggtattcttggggcccacctaatatgcagtgtagattatgtgcaatttgttggctttattggaaaaaatatggaggcttgaaaatgcccacccagtcagaagaagagaagttatctcctagcccaactacagaggaccctcgtgttagaagtcacgtgtcccgccaggccatgcagggaatgccagtccgaaacactgggagtccaaagtctgcagtgaagacccgccaagctttcttccttcatactacatatttcacaaaatttgctcgtcaggtctgcaaaaataccctccggctgcggcaggcagcaagacggccgtttgttgctattaattatgctgccattagggcagaatatgcagacagacatgctgaactatctggaagtccactgaaaagcaaaagcactaggaagcctttggcatgtatcattgggtatttagagatccatcctgcaaagaaacctaatgtaattcgatctacaccaagcctgcaaaccccaactaccaagcggatgctaacaactccaaatcacacatctctgagcattctggggaaaagaaactacagtcatcacaatggtctggatgaactcacgtgctgtgtgtcagactgagctttccctgattcattctacaatccaagacttgctgcactgtcctgctgatgttcacagccgtgcctgggaagaaggcagccccactcccagtacatttcagtgggagacctctgcgtgcatccatggagacgcaatggggcggggaaggaactgtgggagtgcacgttccaaatcctgtgtctccacgtgtggatcagcagcacctcgctttcttgtcagagacctcgctgttacggagcgagacctgctgagaattgaggggctgagggaacccctccacctcctcccttctgcagcgccctgcgccccacccagcaacagcggccacttggcagtggggctgctgcaagctcagagccgctgccaccctgcatgtgtccgctcagctcggtcttatgctgtatagttactaaatatgtacaggagggccatggcatctttctgaatggatttttcttaagaaatgcgccagtgtttatgaggttcaaggtatttccctgtccttgctgttaccgtcactcagctttttctcgataggcttcatccttgtttttttgaaatgggggaatttgctgtttaccctctgcattcctatatgtgaccctccctcctactcctccaaggaacagaattaccgaggttctgacaaaagataagcctgtaaactcatcatctgtgttttgtggttggagagaaactggtgttctgcccggctctgcttggtcacagacagctccagcaagagcagttgttaaaagtgccaagcgtgtgtatcactgtgacaagccgtttgcttactgccctgttcccttgcagccaaaccagctgatgaagaactgctgccaggtgggtcctacagcaggtcacaaatgacctagtttcattttaagcagacagactctgtttggcctagaggtgtggagtgagagaactgtgtttgtgggtatgagtctgtgtggccaaccccatgacccccacccctccagcccaacatcttgtgagcacatgtgacctaggccccgggggacctgcctgctcctttggcttgggctcttcgtgtttcccacctgccctcggcacgagcccttggtggcatcacagttggccactcagctgtgctgagtagctgtgctacttgtgctggcagctgcaaggataggaatagctcagcgcccgatgagctccctgagcagatgtgaggctggcaactcccctgccctctgtttgcaggcacagggtcacagtcccaagaaagacaactggagtctgatctcccagccatctctggggttactaggaggcagctggatggcagatacgagaggcccaaatagccaagctgttgcaagacagagtggctacaattgaattgacaccctgggaagcacgaggtaacttggtaaggataatgatgctgtagatgtctgtgtcctcggaggctgagctccgcttggcagagagagcgtgctgtgtgaggtggagggcggttttgcagacatctcagcttcttttctgaggaggagttggttctcatcttaggcttctgcaagggcgagcatgggatgtctccaccaccacccactcttggagctgtgctgggtcttggcttggggcgctgagggtggggcctgtgtcagaagcatttggtgagaggggtggaggtggcaggcaggggttctcctcagggttcccactgaggggtcccttcagcaaagacctgggaggaggtgccgcatcacgtggatgtttcttccctaaagaaaaagacacaggaaagctgtctgtctgtaccctgctctggatttattgtcgtacttggacccagaaggggaaatgattccctcaccctttcactttctctctgaacccctactaagtggtgactgcagattctggaaacaattagctgcccgtgactcagctgccagcttcattttctctgccttttgggagaggccctctcacccaggcccaagagatttggagacaggagtcaggccaggtctgaagcaggagaagggaggcccctcctatctacccagttgacatttggctttgggaaaagcgcagcttgttcgagccacgtgtgccaagcaggcttttccttcctcttgtaagtaaagctcgtggttctgtagtccagtcatcctaggagggtgatgttgactgagacttcacgctctccctttgtctctggaaactgccccctcgttctgacagaatcccccaggcaatggaggaagggtgccgaggcgcctctagtctgtgcctttgccgttggaagcatttggtgctgagagggtttcccagccacccgctccctttctggggccatggtgtccctgctgtgtgtcagtggcatgtcactgtggttcagtgagcacatgggtggacgtgcagagactgtctgcgcagcccccagcagacatgcccctggggtgaggacacaggctctgcaggccatctccccctctggctcagtcatcgcctgcccacccttcacttcttaaaggtgcgcaagagaggagggccgactggagggtgtcgccggaaggtttcagcctgcccttcacaattccccttgtgcacagcccagtttccatctctcagggcccacccagagcacgcacctgtgctcatgagtgtttccgcaggataattcgttctgagcatgataccacagtgtggattgtctgtctgtaaggagatgccatctactaaccaatttgtattgtgtttccaataaattcctggaaatttt

SEQ ID NO: 98066 - DNA, 3789 bp, Homo sapiens
tgactctatagtgaccccaaccgtcagtcacctcctgtggatatggcggtcaacatgtaccgggtcggtatattatgtctactttgagaattcctccagcaacccatacctaataagaaggatagaagaactcaacaagactgcaagtggcaacgtggaagcaaaagtagtatgcttttatagacgacgtgatatttccaacacacttataatgctcgcagataagcatgctaaagaaattgaggaagaatctgaaacaacagttgaggctgacttgaccgataagcagaaacatcagttgaaacatagggaactctttttgtcacgccagtatgaatctctgcccgcaacacatatcaggggaaagtgcagtgttgcccttctgaatgagacagaatcagtattgtcatatcttgataaggaggataccttcttctactcattggtctatgacccctcattgaaaacactattagctgacaaaggtgaaatcagagtgggacctagatatcaagcagacattccagaaatgctgttagaaggagaatcagatgagagggaacaatcaaaattggaagttaaagtttgggatccaaatagcccacttacggatcgacagattgaccagtttttagttgtagcacgtgctgttgggacattcgccagagccctggattgcagcagttctgtgaggcagcctagtttgcatatgagtgctgctgcagcttcccgagacatcaccttgtttcacgctatggatacattgtatagacacagctatgatttgagcagtgccattagtgtcttagtaccactcggaggacctgttttatgcagagatgaaatggaggaatggtcagcctctgaagctagcttatttgaagaggcactggaaaaatatggcaaagacttcaatgacatacggcaagattttcttccttggaaatcattgactagcatcattgaatattattacatgtggaaaactactgacagatatgtgcaacagaaacgtctaaaagcagcagaagctgagagtaaactgaaacaagtatatatcccaacctacagcaaaccaaatcccaaccaaatatccactagtaatgggaagcctggtgctgtgaatggagctgtggggaccacgttccagcctcagaatcctctcttagggagagcctgtgagagctgctatgctacacagtctcaccagtggtattcttggggcccacctaatatgcagtgtagattatgtgcaatttgttggctttattggaaaaaatatggaggcttgaaaatgcccacccagtcagaagaagagaagttatctcctagcccaactacagaggaccctcgtgttagaagtcacgtgtcccgccaggccatgcagggaatgccagtccgaaacactgggagtccaaagtctgcagtgaagacccgccaagctttcttccttcatactacatatttcacaaaatttgctcgtcaggtctgcaaaaataccctccggctgcggcaggcagcaagacggccgtttgttgctattaattatgctgccattagggcagaatatgcagacagacatgctgaactatctggaagtccactgaaaagcaaaagcactaggaagcctttggcatgtatcattgggtatttagagatccatcctgcaaagaaacctaatgtaattcgatctacaccaagcctgcaaaccccaactaccaagcggatgctaacaactccaaatcacacatctctgagcattctggggaaaagaaactacagtcatcacaatggtctggatgaactcacgtgctgtgtgtcagactgagctttccctgattcattctacaatccaagacttgctgcactgtcctgctgatgttcacagccgtgcctgggaagaaggcagccccactcccagtacatttcagtgggagacctctgcgtgcatccatggagacgcaatggggcggggaaggaactgtgggagtgcacgttccaaatcctgtgtctccacgtgtggatcagcagcacctcgctttcttgtcagagacctcgctgttacggagcgagacctgctgagaattgaggggctgagggaacccctccacctcctcccttctgcagcgccctgcgccccacccagcaacagcggccacttggcagtggggctgctgcaagctcagagccgctgccaccctgcatgtgtccgctcagctcggtcttatgctgtatagttactaaatatgtacaggagggccatggcatctttctgaatggatttttcttaagaaatgcgccagtgtttatgaggttcaaggtatttccctgtccttgctgttaccgtcactcagctttttctcgataggcttcatccttgtttttttgaaatgggggaatttgctgtttaccctctgcattcctatatgtgaccctccctcctactcctccaaggaacagaattaccgaggttctgacaaaagataagcctgtaaactcatcatctgtgttttgtggttggagagaaactggtgttctgcccggctctgcttggtcacagacagctccagcaagagcagttgttaaaagtgccaagcgtgtgtatcactgtgacaagccgtttgcttactgccctgttcccttgcagccaaaccagctgatgaagaactgctgccaggtgggtcctacagcaggtcacaaatgacctagtttcattttaagcagacagactctgtttggcctagaggtgtggagtgagagaactgtgtttgtgggtatgagtctgtgtggccaaccccatgacccccacccctccagcccaacatcttgtgagcacatgtgacctaggccccgggggacctgcctgctcctttggcttgggctcttcgtgtttcccacctgccctcggcacgagcccttggtggcatcacagttggccactcagctgtgctgagtagctgtgctacttgtgctggcagctgcaaggataggaatagctcagcgcccgatgagctccctgagcagatgtgaggctggcaactcccctgccctctgtttgcaggcacagggtcacagtcccaagaaagacaactggagtctgatctcccagccatctctggggttactaggaggcagctggatggcagatacgagaggcccaaatagccaagctgttgcaagacagagtggctacaattgaattgacaccctgggaagcacgaggtaacttggtaaggataatgatgctgtagatgtctgtgtcctcggaggctgagctccgcttggcagagagagcgtgctgtgtgaggtggagggcggttttgcagacatctcagcttcttttctgaggaggagttggttctcatcttaggcttctgcaagggcgagcatgggatgtctccaccaccacccactcttggagctgtgctgggtcttggcttggggcgctgagggtggggcctgtgtcagaagcatttggtgagaggggtggaggtggcaggcaggggttctcctcagggttcccactgaggggtcccttcagcaaagacctgggaggaggtgccgcatcacgtggatgtttcttccctaaagaaaaagacacaggaaagctgtctgtctgtaccctgctctggatttattgtcgtacttggacccagaaggggaaatgattccctcaccctttcactttctctctgaacccctactaagtggtgactgcagattctggaaacaattagctgcccgtcttccgcagcctaggggatcctctacatcgtgcctggagcgttc

SEQ ID NO: 98067 - DNA, 5293 bp, Homo sapiens
tgactctatagtgaccccaaccgtcagtcacctcctgtggatatggcggtcaacatgtaccgggtcggtatattatgtctactttgagaattcctccagcaacccatacctaataagaaggatagaagaactcaacaagactgcaagtggcaacgtggaagcaaaagtagtatgcttttatagacgacgtgatatttccaacacacttataatgctcgcagataagcatgctaaagaaattgaggaagaatctgaaacaacagttgaggctgacttgaccgataagcagaaacatcagttgaaacatagggaactctttttgtcacgccagtatgaatctctgcccgcaacacatatcaggggaaagtgcagtgttgcccttctgaatgagacagaatcagtattgtcatatcttgataaggaggataccttcttctactcattggtctatgacccctcattgaaaacactattagctgacaaaggtgaaatcagagtgggacctagatatcaagcagacattccagaaatgctgttagaaggagaatcagatgagagggaacaatcaaaattggaagttaaagtttgggatccaaatagcccacttacggatcgacagattgaccagtttttagttgtagcacgtgctgttgggacattcgccagagccctggattgcagcagttctgtgaggcagcctagtttgcatatgagtgctgctgcagcttcccgagacatcaccttgtttcacgctatggatacattgtatagacacagctatgatttgagcagtgccattagtgtcttagtaccactcggaggacctgttttatgcagagatgaaatggaggaatggtcagcctctgaagctagcttatttgaagaggcactggaaaaatatggcaaagacttcaatgacatacggcaagattttcttccttggaaatcattgactagcatcattgaatattattacatgtggaaaactactgacagatatgtgcaacagaaacgtctaaaagcagcagaagctgagagtaaactgaaacaagtatatatcccaacctacagcaaaccaaatcccaaccaaatatccactagtaatgggaagcctggtgctgtgaatggagctgtggggaccacgttccagcctcagaatcctctcttagggagagcctgtgagagctgctatgctacacagtctcaccagtggtattcttggggcccacctaatatgcagtgtagattatgtgcaatttgttggctttattggaaaaaatatggaggcttgaaaatgcccacccagtcagaagaagagaagttatctcctagcccaactacagaggaccctcgtgttagaagtcacgtgtcccgccaggccatgcagggaatgccagtccgaaacactgggagtccaaagtctgcagtgaagacccgccaagctttcttccttcatactacatatttcacaaaatttgctcgtcagatgcagacagacatgctgaactatctggaagtccactgaaaagcaaaagcactaggaagcctttggcatgtatcattgggtatttagagatccatcctgcaaagaaacctaatgtaattcgatctacaccaagcctgcaaaccccaactaccaagcggatgctaacaactccaaatcacacatctctgagcattctggggaaaagaaactacagtcatcacaatggtctggatgaactcacgtgctgtgtgtcagactgagctttccctgattcattctacaatccaagacttgctgcactgtcctgctgatgttcacagccgtgcctgggaagaaggcagccccactcccagtacatttcagtgggagacctctgcgtgcatccatggagacgcaatggggcggggaaggaactgtgggagtgcacgttccaaatcctgtgtctccacgtgtggatcagcagcacctcgctttcttgtcagagacctcgctgttacggagcgagacctgctgagaattgaggggctgagggaacccctccacctcctcccttctgcagcgccctgcgccccacccagcaacagcggccacttggcagtggggctgctgcaagctcagagccgctgccaccctgcatgtgtccgctcagctcggtcttatgctgtatagttactaaatatgtacaggagggccatggcatctttctgaatggatttttcttaagaaatgcgccagtgtttatgaggttcaaggtatttccctgtccttgctgttaccgtcactcagctttttctcgataggcttcatccttgtttttttgaaatgggggaatttgctgtttaccctctgcattcctatatgtgaccctccctcctactcctccaaggaacagaattaccgaggttctgacaaaagataagcctgtaaactcatcatctgtgttttgtggttggagagaaactggtgttctgcccggctctgcttggtcacagacagctccagcaagagcagttgttaaaagtgccaagcgtgtgtatcactgtgacaagccgtttgcttactgccctgttcccttgcagccaaaccagctgatgaagaactgctgccaggtgggtcctacagcaggtcacaaatgacctagtttcattttaagcagacagactctgtttggcctagaggtgtggagtgagagaactgtgtttgtgggtatgagtctgtgtggccaaccccatgacccccacccctccagcccaacatcttgtgagcacatgtgacctaggccccgggggacctgcctgctcctttggcttgggctcttcgtgtttcccacctgccctcggcacgagcccttggtggcatcacagttggccactcagctgtgctgagtagctgtgctacttgtgctggcagctgcaaggataggaatagctcagcgcccgatgagctccctgagcagatgtgaggctggcaactcccctgccctctgtttgcaggcacagggtcacagtcccaagaaagacaactggagtctgatctcccagccatctctggggttactaggaggcagctggatggcagatacgagaggcccaaatagccaagctgttgcaagacagagtggctacaattgaattgacaccctgggaagcacgaggtaacttggtaaggataatgatgctgtagatgtctgtgtcctcggaggctgagctccgcttggcagagagagcgtgctgtgtgaggtggagggcggttttgcagacatctcagcttcttttctgaggaggagttggttctcatcttaggcttctgcaagggcgagcatgggatgtctccaccaccacccactcttggagctgtgctgggtcttggcttggggcgctgagggtggggcctgtgtcagaagcatttggtgagaggggtggaggtggcaggcaggggttctcctcagggttcccactgaggggtcccttcagcaaagacctgggaggaggtgccgcatcacgtggatgtttcttccctaaagaaaaagacacaggaaagctgtctgtctgtaccctgctctggatttattgtcgtacttggacccagaaggggaaatgattccctcaccctttcactttctctctgaacccctactaagtggtgactgcagattctggaaacaattagctgcccgtgactcagctgccagcttcattttctctgccttttgggagaggccctctcacccaggcccaagagatttggagacaggagtcaggccaggtctgaagcaggagaagggaggcccctcctatctacccagttgacatttggctttgggaaaagcgcagcttgttcgagccacgtgtgccaagcaggcttttccttcctcttgtaagtaaagctcgtggttctgtagtccagtcatcctaggagggtgatgttgactgagacttcacgctctccctttgtctctggaaactgccccctcgttctgacagaatcccccaggcaatggaggaagggtgccgaggcgcctctagtctgtgcctttgccgttggaagcatttggtgctgagagggtttcccagccacccgctccctttctggggccatggtgtccctgctgtgtgtcagtggcatgtcactgtggttcagtgagcacatgggtggacgtgcagagactgtctgcgcagcccccagcagacatgcccctggggtgaggacacaggctctgcaggccatctccccctctggctcagtcatcgcctgcccacccttcacttcttaaaggtgcgcaagagaggagggccgactggagggtgtcgccggaaggtttcagcctgcccttcacaattccccttgtgcacagcccagtttccatctctcagggcccacccaggaaaatggatttcaagtgggggttttcatccagagatttgtttaacacaaaacaagaaaagctgagaggcaaaacaggggagtgaggggcaacccagaggtggggaacaacaacagcaagccgcccccatcctgagactggctgggcaccaggggaggacgcgtcaccagagcctggggccaaggccactgggggacctgccacactgtggacctgtctggtgggggctggagcctcgagaagccatgattcttgtcagaaacatttccccaggcagagagagggggccccagcctctcccctcctcttggcctccagagtcctgcaggtgcctcacagtagtgaaacccagttggaagcagctgccctgggagcctgggacaggcgacccaccgggtcagtcccctgccactcagagcagagcagggggctgagggcaagcaggtggggctgtgcgtggcctcagtgcactcggtgtcatgtctgagcctggtgtttatgccccactgctgtcctaagtccctggcgaggggaggtggaggagctgccccgtgggtgtttggagattctgttttactctgcctagagaggaaacggctttggggagggagggggaagcctttattctttactgttgtccctgttttcctttgggggaatttactcagttagcagcccctcctcaccattccccccaggaaggccatgtcccagttttctgtccacccctcctgttcctctgcactatgtctctgattttccctgccagggaagctaacccagagcacgcacctgtgctcatgagtgtttccgcaggataattcgttctgagcatgataccacagtgtggattgtctgtctgtaaggagatgccatctactaaccaatttgtattgtgtttccaataaattcctggaaatttt

SEQ ID NO: 98068 - DNA, 1929 bp, Homo sapiens
tgactctatagtgaccccaaccgtcagtcacctcctgtggatatggcggtcaacatgtaccgggtcggtatattatgtctactttgagaattcctccagcaacccatacctaataagaaggatagaagaactcaacaagactgcaagtggcaacgtggaagcaaaagtagtatgcttttatagacgacgtgatatttccaacacacttataatgctcgcagataagcatgctaaagaaattgaggaagaatctgaaacaacagttgaggctgacttgaccgataagcagaaacatcagttgaaacatagggaactctttttgtcacgccagtatgaatctctgcccgcaacacatatcaggggaaagtgcagtgttgcccttctgaatgagacagaatcagtattgtcatatcttgataaggaggataccttcttctactcattggtctatgacccctcattgaaaacactattagctgacaaaggtgaaatcagagtgggacctagatatcaagcagacattccagaaatgctgttagaaggagaatcagatgagagggaacaatcaaaattggaagttaaagtttgggatccaaatagcccacttacggatcgacagattgaccagtttttagttgtagcacgtgctgttgggacattcgccagagccctggattgcagcagttctgtgaggcagcctagtttgcatatgagtgctgctgcagcttcccgagacatcaccttgtttcacgctatggatacattgtatagacacagctatgatttgagcagtgccattagtgtcttagtaccactcggaggacctgttttatgcagagatgaaatggaggaatggtcagcctctgaagctagcttatttgaagaggcactggaaaaatatggcaaagacttcaatgacatacggcaagattttcttccttggaaatcattgactagcatcattgaatattattacatgtggaaaactactgacagatatgtgcaacagaaacgtctaaaagcagcagaagctgagagtaaactgaaacaagtatatatcccaacctacagcaaaccaaatcccaaccaaatatccactagtaatgggaagcctggtgctgtgaatggagctgtggggaccacgttccagcctcagaatcctctcttagggagagcctgtgagagctgctatgctacacagtctcaccagtggtattcttggggcccacctaatatgcagtgtagattatgtgcaatttgttggctttattggaaaaaatatggaggcttgaaaatgcccacccagtcagaagaagagaagttatctcctagcccaactacagaggtacagtagtctttttagtgttgaaaaatggcatgtttttaaatgggttgattattccttggaaacagaagtacagtataggataattaaaaaatgaagaaagctacctttatagctaaacgtagcactacaatattcagggtaggtgtggagagaagcagagagaaattaaattttatcaggtattcagaataatggtctcagacaaaaaaacaatgagtgtgggagatgttagcataagtagagagcttacaaattaaatgtttaattgcttttgaaaacagtttgtaacctttacattctgttgaaggcgtgtcttactacataaagtcataaatgcaaattaagcattttttctccccatggctgttttggagggacaagaagtatggacttaatcttgaggtgaacaacagtttaaatgtgattttggtaaaatcctcataggctgaagatgccaagcgcctgtgtttaccagtgggcgactaccctttttcagtgctgacgggctatcaggactccttaatttaaaaaaaagtgtagttaacccccttggcattttcataccacttactgtgaatgtg

SEQ ID NO: 98069 - DNA, 1584 bp, Homo sapiens
tgactctatagtgaccccaaccgtcagtcacctcctgtggatatggcggtcaacatgtaccgggtcggtatattatgtctactttgagaattcctccagcaacccatacctaataagaaggatagaagaactcaacaagactgcaagtggcaacgtggaagcaaaagtagtatgcttttatagacgacgtgatatttccaacacacttataatgctcgcagataagcatgctaaagaaattgaggaagaatctgaaacaacagttgaggctgacttgaccgataagcagaaacatcagttgaaacatagggaactctttttgtcacgccagtatgaatctctgcccgcaacacatatcaggggaaagtgcagtgttgcccttctgaatgagacagaatcagtattgtcatatcttgataaggaggataccttcttctactcattggtctatgacccctcattgaaaacactattagctgacaaaggtgaaatcagagtgggacctagatatcaagcagacattccagaaatgctgttagaaggagaatcagatgagagggaacaatcaaaattggaagttaaagtttgggatccaaatagcccacttacggatcgacagattgaccagtttttagttgtagcacgtgctgttgggacattcgccagagccctggattgcagcagttctgtgaggcagcctagtttgcatatgagtgctgctgcagcttcccgagacatcaccttgtttcacgctatggatacattgtatagacacagctatgatttgagcagtgccattagtgtcttagtaccactcggaggacctgttttatgcagagatgaaatggaggaatggtcagcctctgaagctagcttatttgaagaggcactggaaaaatatggcaaagacttcaatgacatacggcaagattttcttccttggaaatcattgactagcatcattgaatattattacatgtggaaaactactgacagatatgtgcaacagaaacgtctaaaagcagcagaagctgagagtaaactgaaacaagtatatatcccaacctactacacagtctcaccagtggtattcttggggcccacctaatatgcagtgtagattatgtgcaatttgttggctttattggaaaaaatatggaggcttgaaaatgcccacccagtcagaagaagagaagttatctcctagcccaactacagaggaccctcgtgttagaagtcacgtgtcccgccaggccatgcagggaatgccagtccgaaacactgggagtccaaagtctgcagtgaagacccgccaagctttcttccttcatactacatatttcacaaaatttgctcgtcaggtctgcaaaaataccctccggctgcggcaggcagcaagacggccgtttgttgctattaattatgctgccattagggcagaatgtaagatgcttttaaattcttaaccttatatgttgtgcttctgaccattttctcttttcctctctttccttttttttttgtttgtttgtttgcaataaacataagttcttgtgtaaaaaaaaacatattaatttcataaaa

SEQ ID NO: 98070 - DNA, 3134 bp, Homo sapiens
gcggccgcctactactactaaattcgcggccgcgtcgacatttttcttaagaaatgcgccagtgtttatgaggttcaaggtatttccctgtccttgctgttaccgtcactcagctttttctcgataggcttcatccttgtttttttgaaatgggggaatttgctgtttaccctctgcattcctatatgtgaccctccctcctactcctccaaggaacagaattaccgaggttctgacaaaagataagcctgtaaactcatcatctgtgttttgtggttggagagaaactggtgttctgcccggctctgcttggtcacagacagctccagcaagagcagttgttaaaagtgccaagcgtgtgtatcactgtgacaagccgtttgcttactgccctgttcccttgcagccaaaccagctgatgaagaactgctgccaggtgggtcctacagcaggtcacaaatgacctagtttcattttaagcagacagactctgtttggcctagaggtgtggagtgagagaactgtgtttgtgggtatgagtctgtgtggccaaccccatgacccccacccctccagcccaacatcttgtgagcacatgtgacctaggccccgggggacctgcctgctcctttggcttgggctcttcgtgtttcccacctgccctcggcacgagcccttggtggcatcacagttggccactcagctgtgctgagtagctgtgctacttgtgctggcagctgcaaggataggaatagctcagcgcccgatgagctccctgagcagatgtgaggctggcaactcccctgccctctgtttgcaggcacagggtcacagtcccaagaaagacaactggagtctgatctcccagccatctctggggttactaggaggcagctggatggcagatacgagaggcccaaatagccaagctgttgcaagacagagtggctacaattgaattgacaccctgggaagcacgaggtaacttggtaaggataatgatgctgtagatgtctgtgtcctcggaggctgagctccgcttggcagagagagcgtgctgtgtgaggtggagggcggttttgcagacatctcagcttcttttctgaggaggagttggttctcatcttaggcttctgcaagggcgagcatgggatgtctccaccaccacccactcttggagctgtgctgggtcttggcttggggcgctgagggtggggcctgtgtcagaagcatttggtgagaggggtggaggtggcaggcaggggttctcctcagggttcccactgaggggtcccttcagcaaagacctgggaggaggtgccgcatcacgtggatgtttcttccctaaagaaaaagacacaggaaagctgtctgtctgtaccctgctctggatttattgtcgtacttggacccagaaggggaaatgattccctcaccctttcactttctctctgaacccctactaagtggtgactgcagattctggaaacaattagctgcccgtgactcagctgccagcttcattttctctgccttttgggagaggccctctcacccaggcccaagagatttggagacaggagtcaggccaggtctgaagcaggagaagggaggcccctcctatctacccagttgacatttggctttgggaaaagcgcagcttgttcgagccacgtgtgccaagcaggcttttccttcctcttgtaagtaaagctcgtggttctgtagtccagtcatcctaggagggtgatgttgactgagacttcacgctctccctttgtctctggaaactgccccctcgttctgacagaatcccccaggcaatggaggaagggtgccgaggcgcctctagtctgtgcctttgccgttggaagcatttggtgctgagagggtttcccagccacccgctccctttctggggccatggtgtccctgctgtgtgtcagtggcatgtcactgtggttcagtgagcacatgggtggacgtgcagagactgtctgcgcagcccccagcagacatgcccctggggtgaggacacaggctctgcaggccatctccccctctggctcagtcatcgcctgcccacccttcacttcttaaaggtgcgcaagagaggagggccgactggagggtgtcgccggaaggtttcagcctgcccttcacaattccccttgtgcacagcccagtttccatctctcagggcccacccaggaaaatggatttcaagtgggggttttcatccagagatttgtttaacacaaaacaagaaaagctgagaggcaaaacaggggagtgaggggcaacccagaggtggggaacaacaacagcaagccgcccccatcctgagactggctgggcaccaggggaggacgcgtcaccagagcctggggccaaggccactgggggacctgccacactgtggacctgtctggtgggggctggagcctcgagaagccatgattcttgtcagaaacatttccccaggcagagagagggggccccagcctctcccctcctcttggcctccagagtcctgcaggtgcctcacagtagtgaaacccagttggaagcagctgccctgggagcctgggacaggcgacccaccgggtcagtcccctgccactcagagcagagcagggggctgagggcaagcaggtggggctgtgcgtggcctcagtgcactcggtgtcatgtctgagcctggtgtttatgccccactgctgtcctaagtccctggcgaggggaggtggaggagctgccccgtgggtgtttggagattctgttttactctgcctagagaggaaacggctttggggagggagggggaagcctttattctttactgttgtccctgttttcctttgggggaatttactcagttagcagcccctcctcaccattccccccaggaaggccatgtcccagttttctgtccacccctcctgttcctctgcactatgtctctgattttccctgccagggaagctaacccagagcacgcacctgtgctcatgagtgtttccgcaggataattcgttctgagcatgataccacagtgtggattgtctgtctgtaaggagatgccatctactaaccaatttgtattgtgtttccaataaattcctggaaatttt

SEQ ID NO: 98071 - DNA, 1717 bp, Homo sapiens
tgactctatagtgaccccaaccgtcagtcacctcctgtggatatggcggtcaacatgtaccgggtcggtatattatgtctactttgagaattcctccagcaacccatacctaataagaaggatagaagaactcaacaagactgcaagtggcaacgtggaagcaaaagtagtatgcttttatagacgacgtgatatttccaacacacttataatgctcgcagataagcatgctaaagaaattgaggaagaatctgaaacaacagttgaggctgacttgaccgataagcagaaacatcagttgaaacatagggaactctttttgtcacgccagtatgaatctctgcccgcaacacatatcaggggaaagtgcagtgttgcccttctgaatgagacagaatcagtattgtcatatcttgataaggaggataccttcttctactcattggtctatgacccctcattgaaaacactattagctgacaaaggtgaaatcagagtgggacctagatatcaagcagacattccagaaatgctgttagaaggagaatcagatgagagggaacaatcaaaattggaagttaaagtttgggatccaaatagcccacttacggatcgacagattgaccagtttttagttgtagcacgtgctgttgggacattcgccagagccctggattgcagcagttctgtgaggcagcctagtttgcatatgagtgctgctgcagcttcccgagacatcaccttgtttcacgctatggatacattgtatagacacagctatgatttgagcagtgccattagtgtcttagtaccactcggaggacctgttttatgcagagatgaaatggaggaatggtcagcctctgaagctagcttatttgaagaggcactggaaaaatatggcaaagacttcaatgacatacggcaagattttcttccttggaaatcattgactagcatcattgaatattattacatgtggaaaactactgacagatatgtgcaacagaaacgtctaaaagcagcagaagctgagagtaaactgaaacaagtatatatcccaacctacatgagacttactattataccactacaataaaaaggagccagtgagagaaacctcaaatagactaacctgaagactagaggaagaaatgtactatgtactatacttttattaaatcaaagctgcagggaaagcgtcagaaaacctatgaaatgctgtattatttgaagcaaatgtgtttcagaaagctagcagcttttcaaactatagattttgtttgggtaatgcatactgctctttggaggtttgttgtttatttggttgaggattttacattgttttcttggttccaatggcaattagaaccatatttggtaaatgtgtgataaataatggagaggttttgattattttgtttgtctagtgttctatcattattatcctttgaattcagaaatcattgtcatctcaaaatgaatgccaattttttttttttttccatttgctttgttttaaatgaggctgagcatggtagttcacgcctataatcccagcactttggggaacctcgtttctgcaaaaaatttaaaagaaatataaggtactatatccttttgttgagattttcagagtttgcttattcatttgttcaggaagaattggtttattaagcaccacgtgtatattgttctatcctagtttcttttagga

SEQ ID NO: 98072 - DNA, 661 bp, Homo sapiens
gatgcaacctaaattatacccagaatcttagatgcaagggagtctgggaaatgtggatcttaaccctgcagactgccccttaggtcatggttgttgaagggccagtcttgaagggccagtccatattagatttgttgtattttggagactggaattggctacttgtgtcaaacccttaaaataaacaggatagaatgtcagagtgttaactgctcaaagggttttgtgttttttgtggtagttgttgtttttaaattatcatcccctctttccctccatacttataaaagtaatgtataaacctagtagaaaataaaatgcaaataatgttatttcctataatgccatcacaggtacatgatgttgttggggcaatgtatttcttatgacatgaagttttaagaagtgtccttttagaaactgtcaggtagtgtatgcaacaaaaagtctcctgggcctcctctgcttaaatactagacctttacctgagcactgagcaactgtgtcataatggtgagttttttaaagtggtttcatcccactacccaaaagtgatcattgattattttctgcttccagtgtcttagttttcccaagtgaatgcatatattattgtgtgtttgtacatttaagaacaaattgtgtagaaggcacatatttg

SEQ ID NO: 98073 - DNA, 5281 bp, Homo sapiens
tagcgttctagagtatcccagtaaatcggaaactgggagtcattatgtctactttgagaattcctccagcaacccatacctaataagaaggatagaagaactcaacaagactgcaagtggcaacgtggaagcaaaagtagtatgcttttatagacgacgtgatatttccaacacacttataatgctcgcagataagcatgctaaagaaattgaggaagaatctgaaacaacagttgaggctgacttgaccgataagcagaaacatcagttgaaacatagggaactctttttgtcacgccagtatgaatctctgcccgcaacacatatcaggataccttcttctactcattggtctatgacccctcattgaaaacactattagctgacaaaggtgaaatcagagtgggacctagatatcaagcagacattccagaaatgctgttagaaggagaatcagatgagagggaacaatcaaaattggaagttaaagtttgggatccaaatagcccacttacggatcgacagattgaccagtttttagttgtagcacgtgctgttgggacattcgccagagccctggattgcagcagttctgtgaggcagcctagtttgcatatgagtgctgctgcagcttcccgagacatcaccttgtttcacgctatggatacattgtatagacacagctatgatttgagcagtgccattagtgtcttagtaccactcggaggacctgttttatgcagagatgaaatggaggaatggtcagcctctgaagctagcttatttgaagaggcactggaaaaatatggcaaagacttcaatgacatacggcaagattttcttccttggaaatcattgactagcatcattgaatattattacatgtggaaaactactgacagatatgtgcaacagaaacgtctaaaagcagcagaagctgagagtaaactgaaacaagtatatatcccaacctacagcaaaccaaatcccaaccaaatatccactagtaatgggaagcctggtgctgtgaatggagctgtggggaccacgttccagcctcagaatcctctcttagggagagcctgtgagagctgctatgctacacagtctcaccagtggtattcttggggcccacctaatatgcagtgtagattatgtgcaatttgttggctttattggaaaaaatatggaggcttgaaaatgcccacccagtcagaagaagagaagttatctcctagcccaactacagaggaccctcgtgttagaagtcacgtgtcccgccaggccatgcagggaatgccagtccgaaacactgggagtccaaagtctgcagtgaagacccgccaagctttcttccttcatactacatatttcacaaaatttgctcgtcaggtctgcaaaaataccctccggctgcggcaggcagcaagacggccgtttgttgctattaattatgctgccattagggcagaatatgcagacagacatgctgaactatctggaagtccactgaaaagcaaaagcactaggaagcctttggcatgtatcattgggtatttagagatccatcctgcaaagaaacctaatgtaattcgatctacaccaagcctgcaaaccccaactaccaagcggatgctaacaactccaaatcacacatctctgagcattctggggaaaagaaactacagtcatcacaatggtctggatgaactcacgtgctgtgtgtcagactgagctttccctgattcattctacaatccaagacttgctgcactgtcctgctgatgttcacagccgtgcctgggaagaaggcagccccactcccagtacatttcagtgggagacctctgcgtgcatccatggagacgcaatggggcggggaaggaactgtgggagtgcacgttccaaatcctgtgtctccacgtgtggatcagcagcacctcgctttcttgtcagagacctcgctgttacggagcgagacctgctgagaattgaggggctgagggaacccctccacctcctcccttctgcagcgccctgcgccccacccagcaacagcggccacttggcagtggggctgctgcaagctcagagccgctgccaccctgcatgtgtccgctcagctcggtcttatgctgtatagttactaaatatgtacaggagggccatggcatctttctgaatggatttttcttaagaaatgcgccagtgtttatgaggttcaaggtatttccctgtccttgctgttaccgtcactcagctttttctcgataggcttcatccttgtttttttgaaatgggggaatttgctgtttaccctctgcattcctatatgtgaccctccctcctactcctccaaggaacagaattaccgaggttctgacaaaagataagcctgtaaactcatcatctgtgttttgtggttggagagaaactggtgttctgcccggctctgcttggtcacagacagctccagcaagagcagttgttaaaagtgccaagcgtgtgtatcactgtgacaagccgtttgcttactgccctgttcccttgcagccaaaccagctgatgaagaactgctgccaggtgggtcctacagcaggtcacaaatgacctagtttcattttaagcagacagactctgtttggcctagaggtgtggagtgagagaactgtgtttgtgggtatgagtctgtgtggccaaccccatgacccccacccctccagcccaacatcttgtgagcacatgtgacctaggccccgggggacctgcctgctcctttggcttgggctcttcgtgtttcccacctgccctcggcacgagcccttggtggcatcacagttggccactcagctgtgctgagtagctgtgctacttgtgctggcagctgcaaggataggaatagctcagcgcccgatgagctccctgagcagatgtgaggctggcaactcccctgccctctgtttgcaggcacagggtcacagtcccaagaaagacaactggagtctgatctcccagccatctctggggttactaggaggcagctggatggcagatacgagaggcccaaatagccaagctgttgcaagacagagtggctacaattgaattgacaccctgggaagcacgaggtaacttggtaaggataatgatgctgtagatgtctgtgtcctcggaggctgagctccgcttggcagagagagcgtgctgtgtgaggtggagggcggttttgcagacatctcagcttcttttctgaggaggagttggttctcatcttaggcttctgcaagggcgagcatgggatgtctccaccaccacccactcttggagctgtgctgggtcttggcttggggcgctgagggtggggcctgtgtcagaagcatttggtgagaggggtggaggtggcaggcaggggttctcctcagggttcccactgaggggtcccttcagcaaagacctgggaggaggtgccgcatcacgtggatgtttcttccctaaagaaaaagacacaggaaagctgtctgtctgtaccctgctctggatttattgtcgtacttggacccagaaggggaaatgattccctcaccctttcactttctctctgaacccctactaagtggtgactgcagattctggaaacaattagctgcccgtgactcagctgccagcttcattttctctgccttttgggagaggccctctcacccaggcccaagagatttggagacaggagtcaggccaggtctgaagcaggagaagggaggcccctcctatctacccagttgacatttggctttgggaaaagcgcagcttgttcgagccacgtgtgccaagcaggcttttccttcctcttgtaagtaaagctcgtggttctgtagtccagtcatcctaggagggtgatgttgactgagacttcacgctctccctttgtctctggaaactgccccctcgttctgacagaatcccccaggcaatggaggaagggtgccgaggcgcctctagtctgtgcctttgccgttggaagcatttggtgctgagagggtttcccagccacccgctccctttctggggccatggtgtccctgctgtgtgtcagtggcatgtcactgtggttcagtgagcacatgggtggacgtgcagagactgtctgcgcagcccccagcagacatgcccctggggtgaggacacaggctctgcaggccatctccccctctggctcagtcatcgcctgcccacccttcacttcttaaaggtgcgcaagagaggagggccgactggagggtgtcgccggaaggtttcagcctgcccttcacaattccccttgtgcacagcccagtttccatctctcagggcccacccaggaaaatggatttcaagtgggggttttcatccagagatttgtttaacacaaaacaagaaaagctgagaggcaaaacaggggagtgaggggcaacccagaggtggggaacaacaacagcaagccgcccccatcctgagactggctgggcaccaggggaggacgcgtcaccagagcctggggccaaggccactgggggacctgccacactgtggacctgtctggtgggggctggagcctcgagaagccatgattcttgtcagaaacatttccccaggcagagagagggggccccagcctctcccctcctcttggcctccagagtcctgcaggtgcctcacagtagtgaaacccagttggaagcagctgccctgggagcctgggacaggcgacccaccgggtcagtcccctgccactcagagcagagcagggggctgagggcaagcaggtggggctgtgcgtggcctcagtgcactcggtgtcatgtctgagcctggtgtttatgccccactgctgtcctaagtccctggcgaggggaggtggaggagctgccccgtgggtgtttggagattctgttttactctgcctagagaggaaacggctttggggagggagggggaagcctttattctttactgttgtccctgttttcctttgggggaatttactcagttagcagcccctcctcaccattccccccaggaaggccatgtcccagttttctgtccacccctcctgttcctctgcactatgtctctgattttccctgccagggaagctaacccagagcacgcacctgtgctcatgagtgtttccgcaggataattcgttctgagcatgataccacagtgtggattgtctgtctgtaaggagatgccatctactaaccaatttgtattgtgtttccaataaattcctggaaatttt

SEQ ID NO: 98074 - DNA, 5914 bp, Homo sapiens
tgactctatagtgaccccaaccgtcagtcacctcctgtggatatggcggtcaacatgtaccgggtcggtatattatgtctactttgagaattcctccagcaacccatacctaataagaaggatagaagaactcaacaagactgcaagtggcaacgtggaagcaaaagtagtatgcttttatagacgacgtgatatttccaacacacttataatgctcgcagataagcatgctaaagaaattgaggaagaatctgaaacaacagttgaggctgacttgaccgataagcagaaacatcagttgaaacatagggaactctttttgtcacgccagtatgaatctctgcccgcaacacatatcaggggaaagtgcagtgttgcccttctgaatgagacagaatcagtattgtcatatcttgataaggaggataccttcttctactcattggtctatgacccctcattgaaaacactattagctgacaaaggtgaaatcagagtgggacctagatatcaagcagacattccagaaatgctgttagaaggagaatcagatgagagggaacaatcaaaattggaagttaaagtttgggatccaaatagcccacttacggatcgacagattgaccagtttttagttgtagcacgtgctgttgggacattcgccagagccctggattgcagcagttctgtgaggcagcctagtttgcatatgagtgctgctgcagcttcccgagacatcaccttgtttcacgctatggatacattgtatagacacagctatgatttgagcagtgccattagtgtcttagtaccactcggaggacctgttttatgcagagatgaaatggaggaatggtcagcctctgaagctagcttatttgaagaggcactggaaaaatatggcaaagacttcaatgacatacggcaagattttcttccttggaaatcattgactagcatcattgaatattattacatgtggaaaactactgacagatatgtgcaacagaaacgtctaaaagcagcagaagctgagagtaaactgaaacaagtatatatcccaacctacatgagacttactattataccactacaataaaaaggagccagtgagagaaacctcaaatagactaacctgaagactagaggaagaaatgtactatgtactatacttttattaaatcaaagctgcagggaaagcgtcagaaaacctatgaaatgctgtattatttgaagcaaatgtgtttcagaaagctagcagcttttcaaactatagattttgtttgggtaatgcatactgctctttggaggtttgttgtttatttggttgaggattttacattgttttcttggttccaatggcaattagaaccatatttggtaaatgtgtgataaataatggagaggttttgattattttgtttgtctagtgttctatcattattatcctttgaattcagaaatcattgtcatctcaaaatgaatgccaattttttttttttttccatttgctttgttttaaatgaggctgagcatggtagttcacgcctataatcccagcactttggggaacctcgtttctgcaaaaaatttaaaagaaatataagcagcaaaccaaatcccaaccaaatatccactagtaatgggaagcctggtgctgtgaatggagctgtggggaccacgttccagcctcagaatcctctcttagggagagcctgtgagagctgctatgctacacagtctcaccagtggtattcttggggcccacctaatatgcagtgtagattatgtgcaatttgttggctttattggaaaaaatatggaggcttgaaaatgcccacccagtcagaagaagagaagttatctcctagcccaactacagaggaccctcgtgttagaagtcacgtgtcccgccaggccatgcagggaatgccagtccgaaacactgggagtccaaagtctgcagtgaagacccgccaagctttcttccttcatactacatatttcacaaaatttgctcgtcaggtctgcaaaaataccctccggctgcggcaggcagcaagacggccgtttgttgctattaattatgctgccattagggcagaatatgcagacagacatgctgaactatctggaagtccactgaaaagcaaaagcactaggaagcctttggcatgtatcattgggtatttagagatccatcctgcaaagaaacctaatgtaattcgatctacaccaagcctgcaaaccccaactaccaagcggatgctaacaactccaaatcacacatctctgagcattctggggaaaagaaactacagtcatcacaatggtctggatgaactcacgtgctgtgtgtcagactgagctttccctgattcattctacaatccaagacttgctgcactgtcctgctgatgttcacagccgtgcctgggaagaaggcagccccactcccagtacatttcagtgggagacctctgcgtgcatccatggagacgcaatggggcggggaaggaactgtgggagtgcacgttccaaatcctgtgtctccacgtgtggatcagcagcacctcgctttcttgtcagagacctcgctgttacggagcgagacctgctgagaattgaggggctgagggaacccctccacctcctcccttctgcagcgccctgcgccccacccagcaacagcggccacttggcagtggggctgctgcaagctcagagccgctgccaccctgcatgtgtccgctcagctcggtcttatgctgtatagttactaaatatgtacaggagggccatggcatctttctgaatggatttttcttaagaaatgcgccagtgtttatgaggttcaaggtatttccctgtccttgctgttaccgtcactcagctttttctcgataggcttcatccttgtttttttgaaatgggggaatttgctgtttaccctctgcattcctatatgtgaccctccctcctactcctccaaggaacagaattaccgaggttctgacaaaagataagcctgtaaactcatcatctgtgttttgtggttggagagaaactggtgttctgcccggctctgcttggtcacagacagctccagcaagagcagttgttaaaagtgccaagcgtgtgtatcactgtgacaagccgtttgcttactgccctgttcccttgcagccaaaccagctgatgaagaactgctgccaggtgggtcctacagcaggtcacaaatgacctagtttcattttaagcagacagactctgtttggcctagaggtgtggagtgagagaactgtgtttgtgggtatgagtctgtgtggccaaccccatgacccccacccctccagcccaacatcttgtgagcacatgtgacctaggccccgggggacctgcctgctcctttggcttgggctcttcgtgtttcccacctgccctcggcacgagcccttggtggcatcacagttggccactcagctgtgctgagtagctgtgctacttgtgctggcagctgcaaggataggaatagctcagcgcccgatgagctccctgagcagatgtgaggctggcaactcccctgccctctgtttgcaggcacagggtcacagtcccaagaaagacaactggagtctgatctcccagccatctctggggttactaggaggcagctggatggcagatacgagaggcccaaatagccaagctgttgcaagacagagtggctacaattgaattgacaccctgggaagcacgaggtaacttggtaaggataatgatgctgtagatgtctgtgtcctcggaggctgagctccgcttggcagagagagcgtgctgtgtgaggtggagggcggttttgcagacatctcagcttcttttctgaggaggagttggttctcatcttaggcttctgcaagggcgagcatgggatgtctccaccaccacccactcttggagctgtgctgggtcttggcttggggcgctgagggtggggcctgtgtcagaagcatttggtgagaggggtggaggtggcaggcaggggttctcctcagggttcccactgaggggtcccttcagcaaagacctgggaggaggtgccgcatcacgtggatgtttcttccctaaagaaaaagacacaggaaagctgtctgtctgtaccctgctctggatttattgtcgtacttggacccagaaggggaaatgattccctcaccctttcactttctctctgaacccctactaagtggtgactgcagattctggaaacaattagctgcccgtgactcagctgccagcttcattttctctgccttttgggagaggccctctcacccaggcccaagagatttggagacaggagtcaggccaggtctgaagcaggagaagggaggcccctcctatctacccagttgacatttggctttgggaaaagcgcagcttgttcgagccacgtgtgccaagcaggcttttccttcctcttgtaagtaaagctcgtggttctgtagtccagtcatcctaggagggtgatgttgactgagacttcacgctctccctttgtctctggaaactgccccctcgttctgacagaatcccccaggcaatggaggaagggtgccgaggcgcctctagtctgtgcctttgccgttggaagcatttggtgctgagagggtttcccagccacccgctccctttctggggccatggtgtccctgctgtgtgtcagtggcatgtcactgtggttcagtgagcacatgggtggacgtgcagagactgtctgcgcagcccccagcagacatgcccctggggtgaggacacaggctctgcaggccatctccccctctggctcagtcatcgcctgcccacccttcacttcttaaaggtgcgcaagagaggagggccgactggagggtgtcgccggaaggtttcagcctgcccttcacaattccccttgtgcacagcccagtttccatctctcagggcccacccaggaaaatggatttcaagtgggggttttcatccagagatttgtttaacacaaaacaagaaaagctgagaggcaaaacaggggagtgaggggcaacccagaggtggggaacaacaacagcaagccgcccccatcctgagactggctgggcaccaggggaggacgcgtcaccagagcctggggccaaggccactgggggacctgccacactgtggacctgtctggtgggggctggagcctcgagaagccatgattcttgtcagaaacatttccccaggcagagagagggggccccagcctctcccctcctcttggcctccagagtcctgcaggtgcctcacagtagtgaaacccagttggaagcagctgccctgggagcctgggacaggcgacccaccgggtcagtcccctgccactcagagcagagcagggggctgagggcaagcaggtggggctgtgcgtggcctcagtgcactcggtgtcatgtctgagcctggtgtttatgccccactgctgtcctaagtccctggcgaggggaggtggaggagctgccccgtgggtgtttggagattctgttttactctgcctagagaggaaacggctttggggagggagggggaagcctttattctttactgttgtccctgttttcctttgggggaatttactcagttagcagcccctcctcaccattccccccaggaaggccatgtcccagttttctgtccacccctcctgttcctctgcactatgtctctgattttccctgccagggaagctaacccagagcacgcacctgtgctcatgagtgtttccgcaggataattcgttctgagcatgataccacagtgtggattgtctgtctgtaaggagatgccatctactaaccaatttgtattgtgtttccaataaattcctggaaatttt

SEQ ID NO: 98075 - DNA, 4518 bp, Homo sapiens
  misc_feature (80)..(80): n is a, c, g, or t
tgtttacgtccccgctttcccttcctccctccccctgccctcttccccgtttgctgctgtccgttgtccgattaactganacctggcaaacattgtttagcatcattgaatattattacatgtggaaaactactgacagatatgtgcaacagaaacgtctaaaagcagcagaagctgagagtaaactgaaacaagtatatatcccaacctacagcaaaccaaatcccaaccaaatatccactagtaatgggaagcctggtgctgtgaatggagctgtggggaccacgttccagcctcagaatcctctcttagggagagcctgtgagagctgctatgctacacagtctcaccagtggtattcttggggcccacctaatatgcagtgtagattatgtgcaatttgttggctttattggaaaaaatatggaggcttgaaaatgcccacccagtcagaagaagagaagttatctcctagcccaactacagaggaccctcgtgttagaagtcacgtgtcccgccaggccatgcagggaatgccagtccgaaacactgggagtccaaagtctgcagtgaagacccgccaagctttcttccttcatactacatatttcacaaaatttgctcgtcaggtctgcaaaaataccctccggctgcggcaggcagcaagacggccgtttgttgctattaattatgctgccattagggcagaatatgcagacagacatgctgaactatctggaagtccactgaaaagcaaaagcactaggaagcctttggcatgtatcattgggtatttagagatccatcctgcaaagaaacctaatgtaattcgatctacaccaagcctgcaaaccccaactaccaagcggatgctaacaactccaaatcacacatctctgagcattctggggaaaagaaactacagtcatcacaatggtctggatgaactcacgtgctgtgtgtcagactgagctttccctgattcattctacaatccaagacttgctgcactgtcctgctgatgttcacagccgtgcctgggaagaaggcagccccactcccagtacatttcagtgggagacctctgcgtgcatccatggagacgcaatggggcggggaaggaactgtgggagtgcacgttccaaatcctgtgtctccacgtgtggatcagcagcacctcgctttcttgtcagagacctcgctgttacggagcgagacctgctgagaattgaggggctgagggaacccctccacctcctcccttctgcagcgccctgcgccccacccagcaacagcggccacttggcagtggggctgctgcaagctcagagccgctgccaccctgcatgtgtccgctcagctcggtcttatgctgtatagttactaaatatgtacaggagggccatggcatctttctgaatggatttttcttaagaaatgcgccagtgtttatgaggttcaaggtatttccctgtccttgctgttaccgtcactcagctttttctcgataggcttcatccttgtttttttgaaatgggggaatttgctgtttaccctctgcattcctatatgtgaccctccctcctactcctccaaggaacagaattaccgaggttctgacaaaagataagcctgtaaactcatcatctgtgttttgtggttggagagaaactggtgttctgcccggctctgcttggtcacagacagctccagcaagagcagttgttaaaagtgccaagcgtgtgtatcactgtgacaagccgtttgcttactgccctgttcccttgcagccaaaccagctgatgaagaactgctgccaggtgggtcctacagcaggtcacaaatgacctagtttcattttaagcagacagactctgtttggcctagaggtgtggagtgagagaactgtgtttgtgggtatgagtctgtgtggccaaccccatgacccccacccctccagcccaacatcttgtgagcacatgtgacctaggccccgggggacctgcctgctcctttggcttgggctcttcgtgtttcccacctgccctcggcacgagcccttggtggcatcacagttggccactcagctgtgctgagtagctgtgctacttgtgctggcagctgcaaggataggaatagctcagcgcccgatgagctccctgagcagatgtgaggctggcaactcccctgccctctgtttgcaggcacagggtcacagtcccaagaaagacaactggagtctgatctcccagccatctctggggttactaggaggcagctggatggcagatacgagaggcccaaatagccaagctgttgcaagacagagtggctacaattgaattgacaccctgggaagcacgaggtaacttggtaaggataatgatgctgtagatgtctgtgtcctcggaggctgagctccgcttggcagagagagcgtgctgtgtgaggtggagggcggttttgcagacatctcagcttcttttctgaggaggagttggttctcatcttaggcttctgcaagggcgagcatgggatgtctccaccaccacccactcttggagctgtgctgggtcttggcttggggcgctgagggtggggcctgtgtcagaagcatttggtgagaggggtggaggtggcaggcaggggttctcctcagggttcccactgaggggtcccttcagcaaagacctgggaggaggtgccgcatcacgtggatgtttcttccctaaagaaaaagacacaggaaagctgtctgtctgtaccctgctctggatttattgtcgtacttggacccagaaggggaaatgattccctcaccctttcactttctctctgaacccctactaagtggtgactgcagattctggaaacaattagctgcccgtgactcagctgccagcttcattttctctgccttttgggagaggccctctcacccaggcccaagagatttggagacaggagtcaggccaggtctgaagcaggagaagggaggcccctcctatctacccagttgacatttggctttgggaaaagcgcagcttgttcgagccacgtgtgccaagcaggcttttccttcctcttgtaagtaaagctcgtggttctgtagtccagtcatcctaggagggtgatgttgactgagacttcacgctctccctttgtctctggaaactgccccctcgttctgacagaatcccccaggcaatggaggaagggtgccgaggcgcctctagtctgtgcctttgccgttggaagcatttggtgctgagagggtttcccagccacccgctccctttctggggccatggtgtccctgctgtgtgtcagtggcatgtcactgtggttcagtgagcacatgggtggacgtgcagagactgtctgcgcagcccccagcagacatgcccctggggtgaggacacaggctctgcaggccatctccccctctggctcagtcatcgcctgcccacccttcacttcttaaaggtgcgcaagagaggagggccgactggagggtgtcgccggaaggtttcagcctgcccttcacaattccccttgtgcacagcccagtttccatctctcagggcccacccaggaaaatggatttcaagtgggggttttcatccagagatttgtttaacacaaaacaagaaaagctgagaggcaaaacaggggagtgaggggcaacccagaggtggggaacaacaacagcaagccgcccccatcctgagactggctgggcaccaggggaggacgcgtcaccagagcctggggccaaggccactgggggacctgccacactgtggacctgtctggtgggggctggagcctcgagaagccatgattcttgtcagaaacatttccccaggcagagagagggggccccagcctctcccctcctcttggcctccagagtcctgcaggtgcctcacagtagtgaaacccagttggaagcagctgccctgggagcctgggacaggcgacccaccgggtcagtcccctgccactcagagcagagcagggggctgagggcaagcaggtggggctgtgcgtggcctcagtgcactcggtgtcatgtctgagcctggtgtttatgccccactgctgtcctaagtccctggcgaggggaggtggaggagctgccccgtgggtgtttggagattctgttttactctgcctagagaggaaacggctttggggagggagggggaagcctttattctttactgttgtccctgttttcctttgggggaatttactcagttagcagcccctcctcaccattccccccaggaaggccatgtcccagttttctgtccacccctcctgttcctctgcactatgtctctgattttccctgccagggaagctaacccagagcacgcacctgtgctcatgagtgtttccgcaggataattcgttctgagcatgataccacagtgtggattgtctgtctgtaaggagatgccatctactaaccaatttgtattgtgtttccaataaattcctggaaatttt

SEQ ID NO: 98076 - DNA, 5313 bp, Homo sapiens
tgactctatagtgaccccaaccgtcagtcacctcctgtggatatggcggtcaacatgtaccgggtcggtatattatgtctactttgagaattcctccagcaacccatacctaataagaaggatagaagaactcaacaagactgcaagtggcaacgtggaagcaaaagtagtatgcttttatagacgacgtgatatttccaacacacttataatgctcgcagataagcatgctaaagaaattgaggaagaatctgaaacaacagttgaggctgacttgaccgataagcagaaacatcagttgaaacatagggaactctttttgtcacgccagtatgaatctctgcccgcaacacatatcaggggaaagtgcagtgttgcccttctgaatgagacagaatcagtattgtcatatcttgataaggaggataccttcttctactcattggtctatgacccctcattgaaaacactattagctgacaaaggtgaaatcagagtgggacctagatatcaagcagacattccagaaatgctgttagaaggagaatcagatgagagggaacaatcaaaattggaagttaaagtttgggatccaaatagcccacttacggatcgacagattgaccagtttttagttgtagcacgtgctgttgggacattcgccagagccctggattgcagcagttctgtgaggcagcctagtttgcatatgagtgctgctgcagcttcccgagacatcaccttgtttcacgctatggatacattgtatagacacagctatgatttgagcagtgccattagtgtcttagtaccactcggaggacctgttttatgcagagatgaaatggaggaatggtcagcctctgaagctagcttatttgaagaggcactggaaaaatatggcaaagacttcaatgacatacggcaagattttcttccttggaaatcattgactagcatcattgaatattattacatgtggaaaactactgacagatatgtgcaacagaaacgtctaaaagcagcagaagctgagagtaaactgaaacaagtatatatcccaacctacagcaaaccaaatcccaaccaaatatccactagtaatgggaagcctggtgctgtgaatggagctgtggggaccacgttccagcctcagaatcctctcttagggagagcctgtgagagctgctatgctacacagtctcaccagtggtattcttggggcccacctaatatgcagtgtagattatgtgcaatttgttggctttattggaaaaaatatggaggcttgaaaatgcccacccagtcagaagaagagaagttatctcctagcccaactacagaggaccctcgtgttagaagtcacgtgtcccgccaggccatgcagggaatgccagtccgaaacactgggagtccaaagtctgcagtgaagacccgccaagctttcttccttcatactacatatttcacaaaatttgctcgtcaggtctgcaaaaataccctccggctgcggcaggcagcaagacggccgtttgttgctattaattatgctgccattagggcagaatatgcagacagacatgctgaactatctggaagtccactgaaaagcaaaagcactaggaagcctttggcatgtatcattgggtatttagagatccatcctgcaaagaaacctaatgtaattcgatctacaccaagcctgcaaaccccaactaccaagcggatgctaacaactccaaatcacacatctctgagcattctggggaaaagaaactacagtcatcacaatggtctggatgaactcacgtgctgtgtgtcagactgagctttccctgattcattctacaatccaagacttgctgcactgtcctgctgatgttcacagccgtgcctgggaagaaggcagccccactcccagtacatttcagtgggagacctctgcgtgcatccatgtgtggatcagcagcacctcgctttcttgtcagagacctcgctgttacggagcgagacctgctgagaattgaggggctgagggaacccctccacctcctcccttctgcagcgccctgcgccccacccagcaacagcggccacttggcagtggggctgctgcaagctcagagccgctgccaccctgcatgtgtccgctcagctcggtcttatgctgtatagttactaaatatgtacaggagggccatggcatctttctgaatggatttttcttaagaaatgcgccagtgtttatgaggttcaaggtatttccctgtccttgctgttaccgtcactcagctttttctcgataggcttcatccttgtttttttgaaatgggggaatttgctgtttaccctctgcattcctatatgtgaccctccctcctactcctccaaggaacagaattaccgaggttctgacaaaagataagcctgtaaactcatcatctgtgttttgtggttggagagaaactggtgttctgcccggctctgcttggtcacagacagctccagcaagagcagttgttaaaagtgccaagcgtgtgtatcactgtgacaagccgtttgcttactgccctgttcccttgcagccaaaccagctgatgaagaactgctgccaggtgggtcctacagcaggtcacaaatgacctagtttcattttaagcagacagactctgtttggcctagaggtgtggagtgagagaactgtgtttgtgggtatgagtctgtgtggccaaccccatgacccccacccctccagcccaacatcttgtgagcacatgtgacctaggccccgggggacctgcctgctcctttggcttgggctcttcgtgtttcccacctgccctcggcacgagcccttggtggcatcacagttggccactcagctgtgctgagtagctgtgctacttgtgctggcagctgcaaggataggaatagctcagcgcccgatgagctccctgagcagatgtgaggctggcaactcccctgccctctgtttgcaggcacagggtcacagtcccaagaaagacaactggagtctgatctcccagccatctctggggttactaggaggcagctggatggcagatacgagaggcccaaatagccaagctgttgcaagacagagtggctacaattgaattgacaccctgggaagcacgaggtaacttggtaaggataatgatgctgtagatgtctgtgtcctcggaggctgagctccgcttggcagagagagcgtgctgtgtgaggtggagggcggttttgcagacatctcagcttcttttctgaggaggagttggttctcatcttaggcttctgcaagggcgagcatgggatgtctccaccaccacccactcttggagctgtgctgggtcttggcttggggcgctgagggtggggcctgtgtcagaagcatttggtgagaggggtggaggtggcaggcaggggttctcctcagggttcccactgaggggtcccttcagcaaagacctgggaggaggtgccgcatcacgtggatgtttcttccctaaagaaaaagacacaggaaagctgtctgtctgtaccctgctctggatttattgtcgtacttggacccagaaggggaaatgattccctcaccctttcactttctctctgaacccctactaagtggtgactgcagattctggaaacaattagctgcccgtgactcagctgccagcttcattttctctgccttttgggagaggccctctcacccaggcccaagagatttggagacaggagtcaggccaggtctgaagcaggagaagggaggcccctcctatctacccagttgacatttggctttgggaaaagcgcagcttgttcgagccacgtgtgccaagcaggcttttccttcctcttgtaagtaaagctcgtggttctgtagtccagtcatcctaggagggtgatgttgactgagacttcacgctctccctttgtctctggaaactgccccctcgttctgacagaatcccccaggcaatggaggaagggtgccgaggcgcctctagtctgtgcctttgccgttggaagcatttggtgctgagagggtttcccagccacccgctccctttctggggccatggtgtccctgctgtgtgtcagtggcatgtcactgtggttcagtgagcacatgggtggacgtgcagagactgtctgcgcagcccccagcagacatgcccctggggtgaggacacaggctctgcaggccatctccccctctggctcagtcatcgcctgcccacccttcacttcttaaaggtgcgcaagagaggagggccgactggagggtgtcgccggaaggtttcagcctgcccttcacaattccccttgtgcacagcccagtttccatctctcagggcccacccaggaaaatggatttcaagtgggggttttcatccagagatttgtttaacacaaaacaagaaaagctgagaggcaaaacaggggagtgaggggcaacccagaggtggggaacaacaacagcaagccgcccccatcctgagactggctgggcaccaggggaggacgcgtcaccagagcctggggccaaggccactgggggacctgccacactgtggacctgtctggtgggggctggagcctcgagaagccatgattcttgtcagaaacatttccccaggcagagagagggggccccagcctctcccctcctcttggcctccagagtcctgcaggtgcctcacagtagtgaaacccagttggaagcagctgccctgggagcctgggacaggcgacccaccgggtcagtcccctgccactcagagcagagcagggggctgagggcaagcaggtggggctgtgcgtggcctcagtgcactcggtgtcatgtctgagcctggtgtttatgccccactgctgtcctaagtccctggcgaggggaggtggaggagctgccccgtgggtgtttggagattctgttttactctgcctagagaggaaacggctttggggagggagggggaagcctttattctttactgttgtccctgttttcctttgggggaatttactcagttagcagcccctcctcaccattccccccaggaaggccatgtcccagttttctgtccacccctcctgttcctctgcactatgtctctgattttccctgccagggaagctaacccagagcacgcacctgtgctcatgagtgtttccgcaggataattcgttctgagcatgataccacagtgtggattgtctgtctgtaaggagatgccatctactaaccaatttgtattgtgtttccaataaattcctggaaatttt

SEQ ID NO: 98077 - DNA, 3776 bp, Homo sapiens
tgactctatagtgaccccaaccgtcagtcacctcctgtggatatggcggtcaacatgtaccgggtcggtatattatgtctactttgagaattcctccagcaacccatacctaataagaaggatagaagaactcaacaagactgcaagtggcaacgtggaagcaaaagtagtatgcttttatagacgacgtgatatttccaacacacttataatgctcgcagataagcatgctaaagaaattgaggaagaatctgaaacaacagttgaggctgacttgaccgataagcagaaacatcagttgaaacatagggaactctttttgtcacgccagtatgaatctctgcccgcaacacatatcaggggaaagtgcagtgttgcccttctgaatgagacagaatcagtattgtcatatcttgataaggaggataccttcttctactcattggtctatgacccctcattgaaaacactattagctgacaaaggtgaaatcagagtgggacctagatatcaagcagacattccagaaatgctgttagaaggagaatcagatgagagggaacaatcaaaattggaagttaaagtttgggatccaaatagcccacttacggatcgacagattgaccagtttttagttgtagcacgtgctgttgggacattcgccagagccctggattgcagcagttctgtgaggcagcctagtttgcatatgagtgctgctgcagcttcccgagacatcaccttgtttcacgctatggatacattgtatagacacagctatgatttgagcagtgccattagtgtcttagtaccactcggaggacctgttttatgcagagatgaaatggaggaatggtcagcctctgaagctagcttatttgaagaggcactggaaaaatatggcaaagacttcaatgacatacggcaagattttcttccttggaaatcattgactagcatcattgaatattattacatgtggaaaactactgacagatatgtgcaacagaaacgtctaaaagcagcagaagctgagagtaaactgaaacaagtatatatcccaacctacagcaaaccaaatcccaaccaaatatccactagtaatgggaagcctggtgctgtgaatggagctgtggggaccacgttccagcctcagaatcctctcttagggagagcctgtgagagctgctatgctacacagtctcaccagtggtattcttggggcccacctaatatgcagtgtagattatgtgcaatttgttggctttattggaaaaaatatggaggcttgaaaatgcccacccagtcagaagaagagaagttatctcctagcccaactacagaggaccctcgtgttagaagtcacgtgtcccgccaggccatgcagggaatgccagtccgaaacactgggagtccaaagtctgcagtgaagacccgccaagctttcttccttcatactacatatttcacaaaatttgctcgtcaggtctgcaaaaataccctccggctgcggcaggcagcaagacggccgtttgttgctattaattatgctgccattagggcagaatatgcagacagacatgctgaactatctggaagtccactgaaaagcaaaagcactaggaagcctttggcatgtatcattgggtatttagagatccatcctgcaaagaaacctaatgtaattcgatctacaccaagcctgcaaaccccaactaccaagcggatgctaacaactccaaatcacacatctctgagcattctggggaaaagaaactacagtcatcacaatggtctggatgaactcacgtgctgtgtgtcagactgagctttccctgattcattctacaatccaagacttgctgcactgtcctgctgatgttcacagccgtgcctgggaagaaggcagccccactcccagtacatttcagtgggagacctctgcgtgcatccatggagacgcaatggggcggggaaggaactgtgggagtgcacgttccaaatcctgtgtctccacgtgtggatcagcagcacctcgctttcttgtcagagacctcgctgttacggagcgagacctgctgagaattgaggggctgagggaacccctccacctcctcccttctgcagcgccctgcgccccacccagcaacagcggccacttggcagtggggctgctgcaagctcagagccgctgccaccctgcatgtgtccgctcagctcggtcttatgctgtatagttactaaatatgtacaggagggccatggcatctttctgaatggatttttcttaagaaatgcgccagtgtttatgaggttcaaggtatttccctgtccttgctgttaccgtcactcagctttttctcgataggcttcatccttgtttttttgaaatgggggaatttgctgtttaccctctgcattcctatatgtgaccctccctcctactcctccaaggaacagaattaccgaggttctgacaaaagataagcctgtaaactcatcatctgtgttttgtggttggagagaaactggtgttctgcccggctctgcttggtcacagacagctccagcaagagcagttgttaaaagtgccaagcgtgtgtatcactgtgacaagccgtttgcttactgccctgttcccttgcagccaaaccagctgatgaagaactgctgccaggtgggtcctacagcaggtcacaaatgacctagtttcattttaagcagacagactctgtttggcctagaggtgtggagtgagagaactgtgtttgtgggtatgagtctgtgtggccaaccccatgacccccacccctccagcccaacatcttgtgagcacatgtgacctaggccccgggggacctgcctgctcctttggcttgggctcttcgtgtttcccacctgccctcggcacgagcccttggtggcatcacagttggccactcagctgtgctgagtagctgtgctacttgtgctggcagctgcaaggataggaatagctcagcgcccgatgagctccctgagcagatgtgaggctggcaactcccctgccctctgtttgcaggcacagggtcacagtcccaagaaagacaactggagtctgatctcccagccatctctggggttactaggaggcagctggatggcagatacgagaggcccaaatagccaagctgttgcaagacagagtggctacaattgaattgacaccctgggaagcacgaggtaacttggtaaggataatgatgctgtagatgtctgtgtcctcggaggctgagctccgcttggcagagagagcgtgctgtgtgaggtggagggcggttttgcagacatctcagcttcttttctgaggaggagttggttctcatcttaggcttctgcaagggcgagcatgggatgtctccaccaccacccactcttggagctgttttactctgcctagagaggaaacggctttggggagggagggggaagcctttattctttactgttgtccctgttttcctttgggggaatttactcagttagcagcccctcctcaccattccccccaggaaggccatgtcccagttttctgtccacccctcctgttcctctgcactatgtctctgattttccctgccagggaagctaacccagagcacgcacctgtgctcatgagtgtttccgcaggataattcgttctgagcatgataccacagtgtggattgtctgtctgtaaggagatgccatctactaaccaatttgtattgtgtttccaataaattcctggaaatttt

SEQ ID NO: 98078 - DNA, 1688 bp, Homo sapiens
tgactctatagtgaccccaaccgtcagtcacctcctgtggatatggcggtcaacatgtaccgggtcggtatattatgtctactttgagaattcctccagcaacccatacctaataagaaggatagaagaactcaacaagactgcaagtggcaacgtggaagcaaaagtagtatgcttttatagacgacgtgatatttccaacacacttataatgctcgcagataagcatgctaaagaaattgaggaagaatctgaaacaacagttgaggctgacttgaccgataagcagaaacatcagttgaaacatagggaactctttttgtcacgccagtatgaatctctgcccgcaacacatatcaggggaaagtgcagtgttgcccttctgaatgagacagaatcagtattgtcatatcttgataaggaggataccttcttctactcattggtctatgacccctcattgaaaacactattagctgacaaaggtgaaatcagagtgggacctagatatcaagcagacattccagaaatgctgttagaaggagaatcagatgagagggaacaatcaaaattggaagttaaagtttgggatccaaatagcccacttacggatcgacagattgaccagtttttagttgtagcacgtgctgttgggacattcgccagagccctggattgcagcagttctgtgaggcagcctagtttgcatatgagtgctgctgcagcttcccgagacatcaccttgtttcacgctatggatacattgtatagacacagctatgatttgagcagtgccattagtgtcttagtaccactcggaggacctgttttatgcagagatgaaatggaggaatggtcagcctctgaagctagcttatttgaagaggcactggaaaaatatggcaaagacttcaatgacatacggcaagattttcttccttggaaatcattgactagcatcattgaatattattacatgtggaaaactactgacagatatgtgcaacagaaacgtctaaaagcagcagaagctgagagtaaactgaaacaagtatatatcccaacctacagcaaaccaaatcccaaccaaatatccactagtaatgggaagcctggtgctgtgaatggagctgtggggaccacgttccagcctcagaatcctctcttagggagagcctgtgagagctgctatgctacacagtctcaccagtggtattcttggggcccacctaatatgcagtgtagattatgtgcaatttgttggctttattggaaaaaatatggaggcttgaaaatgcccacccagtcagaagaagagaagttatctcctagcccaactacagaggaccctcgtgttagaagtcacgtgtcccgccaggccatgcagggaatgccagtccgaaacactgggagtccaaagtctgcagtgaagacccgccaagctttcttccttcatactacatatttcacaaaatttgctcgtcaggtctgcaaaaataccctccggctgcggcaggcagcaagacggccgtttgttgctattaattatgctgccattagggcagaatgtagtgccacaatgtaacccctaaggatgctgttataatgagactccataatcgagacagtacagtccagtcttacatggattcattaggtttaaataaaatttgccaatttacactaaa

SEQ ID NO: 98079 - DNA, 1075 bp, Homo sapiens
gcggccgcctactactactaaattcgcggccgcgtcgacaaaactactgacagatatgtgcaacagaaacgtctaaaagcagcagaagctgagagtaaactgaaacaagtatatatcccaacctacagcaaaccaaatcccaaccaaatatccactagtaatgggaagcctggtgctgtgaatggagctgtggggaccacgttccagcctcagaatcctctcttagggagagcctgtgagagctgctatgctacacagtctcaccagtggtattcttggggcccacctaatatgcagtgtagattatgtgcaatttgttggctttattggaaaaaatatggaggcttgaaaatgcccacccagtcagaagaagagaagttatctcctagcccaactacagaggaccctcgtgttagaagtcacgtgtcccgccaggccatgcagggaatgccagtccgaaacactgggagtccaaagtctgcagtgaagacccgccaagctttcttccttcatactacatatttcacaaaatttgctcgtcaggtctgcaaaaataccctccggctgcggcaggcagcaagacggccgtttgttgctattaattatgctgccattagggcagaatgtaagatgcttttaaattcttaaccttatatgttgtgcttctgaccattttctcttttcctctctttccttttttttttgtttgtttgtttgcaataaacataagttcttgtgtacagccttttatttggtttattttttaacattgtttttgtgtgctgccatttgtatcatgccaacctggaaaaaaaaaaatcaaaacattgaaacttctgtactctttaccagagagtagtgcttagcaaaagattggtgggaggtgatcctattccatggggttttgtgatggaattgcctgcagagcccttattgcagcacttttaccttttaggtagtgccacaatgtaacccctaaggatgctgttataatgagactccataatcgagacagtacagtccagtcttacatggattcattaggtttaaataaaatttgccaatttacactaaa

SEQ ID NO: 98080 - DNA, 733 bp, Homo sapiens
gcggccgcctactactactaaattcgcggccgcgtcgacaaaactactgacagatatgtgcaacagaaacgtctaaaagcagcagaagctgagagtaaactgaaacaagtatatatcccaacctacagcaaaccaaatcccaaccaaatatccactagtaatgggaagcctggtgctgtgaatggagctgtggggaccacgttccagcctcagaatcctctcttagggagagcctgtgagagctgctatgctacacagtctcaccagtggtattcttggggcccacctaatatgcagtgtagattatgtgcaatttgttggctttattggaaaaaatatggaggcttgaaaatgcccacccagtcagaagaagagaagttatctcctagcccaactacagaggaccctcgtgttagaagtcacgtgtcccgccaggccatgcagggaatgccagtccgaaacactgggagtccaaagtctgcagtgaagacccgccaagctttcttccttcatactacatatttcacaaaatttgctcgtcaggtctgcaaaaataccctccggctgcggcaggcagcaagacggccgtttgttgctattaattatgctgccattagggcagaatgtaagatgcttttaaattcttaaccttatatgttgtgcttcggcgcaaagttggggccctgtaaaaaacccccccctggattgtttttatacactagaaataagggaa

SEQ ID NO: 98081 - DNA, 1021 bp, Homo sapiens
tgactctatagtgaccccaaccgtcagtcacctcctgtggatatggcggtcaacatgtaccgggtcggtatattatgtctactttgagaattcctccagcaacccatacctaataagaaggatagaagaactcaacaagactgcaagtggcaacgtggaagcaaaagtagtatgcttttatagacgacgtgatatttccaacacacttataatgctcgcagataagcatgctaaagaaattgaggaagaatctgaaacaacagttgaggctgacttgaccgataagcagaaacatcagttgaaacatagggaactctttttgtcacgccagtatgaatctctgcccgcaacacatatcaggggaaagtgcagtgttgcccttctgaatgagacagaatcagtattgtcatatcttgataaggaggataccttcttctactcattggtctatgacccctcattgaaaacactattagctgacaaaggtgaaatcagagtgggacctagatatcaagcagacattccagaaatgctgttagaaggagaatcagatgagagggaacaatcaaaattggaagttaaagtttgggatccaaatagcccacttacggatcgacagattgaccagtttttagttgtagcacgtgctgttgggacattcgccagagccctggattgcagcagttctgtgaggcagcctagtttgcatatgagtgctgctgcagcttcccgagacatcaccttgtttcacgctatggatacattgtatagacacagctatgatttgagcagtgccattagtgtcttagtaccactcggaggacctgttttatgcagagatgaaatggaggaatggtcagcctctgaagctagcttatttgaagaggcactggaaaaatatggcaaagacttcaatgacatacggcaagattttgtaagtagaaaattatgagtaaaataaaatgttgagatgggaatattctgttttagaaatctggtaaaccttacagtattcatttag

SEQ ID NO: 98082 - DNA, 105 bp, Homo sapiens
gcctgttatcccagcactttgagcagctgaggtgtgggtgagggaccgttgcaggccagaagttcaagaccagccttttcaacatagcaagatcctgtctctatt

SEQ ID NO: 98083 - DNA, 923 bp, Homo sapiens
tctcaggcttccctccatctgaaagagcataaaaaaaaaaaccaagtgattgttttctcaatcgtcatcaaggttaaaagtggatacgtgttctctgctagccaaggaggaacctgttgggggtttctgggaaagctattccttctctgatagcggaagtgcaagagcttttaagctgctcctcatccctgctccctgctcctgaatatgctgatggtgcacaaagctacagaggggatcctgtgtcagtcagatgacaacaagtgaatcaaatgcctgagttcttggtgacagcattaaacaaggcaaacttcaggttttgtgataaatagggaaaaaatcaaaaaggatttaaagatcatactgttacttgctggcaagctcaccttaaaagaaggaacaatcaagccttattaaagcaggaaaaaacaaacaggaatttttaggaaagtatttaattttaggataaagatctaatgttaaaaatttcagttttcgtgaaaaagcagtaactatgcaaaatcaatgactatatagtgaaagaagatttttttgctgacttactactttcaggcaaaatgccataaaagttattatagttctgaattaatagataactgcattcgaaagaggcaataaaatagtttaagatttttacagggaatgaaaagattcaatagtttcttgtagactctttaaatgacatatacaaagagatttaaagtaattttggttttagtttatggttaggactagggcaaaatacaaaagaccttatttatgtcttttgaaactttattactgccaggcaagtaatatatgtttactggggaactgttgtaacttagagtcattttatttcacaagtatttatcagtaaatgctttatttttcacaataaaatggtcctgagggaataagca

SEQ ID NO: 98084 - DNA, 257 bp, Homo sapiens
tttagtagagacggggtttcgccatgttggccaggctggtcttgaactcctgacctcaggtgatccgcccaaagagctgggattacaggtgtgagccaccacgcctggcctactgtctttaacttcttactttactgtaaaagaaaatccttggaaatccatggaacaagagagggaatgaagttttaaaataaatttacttattgtataaccacattactgaacattttgtaaaacaaaggaaaacgaaaaacaaa

SEQ ID NO: 98085 - DNA, 156 bp, Homo sapiens
caaggataagcacgacaaggcaaggccacaggggaaggaaaggagaagagaaggggacttgggcaggggagccaatgacaaaggccaggagtgcaagaaacatggtacctgggaggaactacaagcagtcctggactgctgagggctatgtccata

SEQ ID NO: 98086 - DNA, 497 bp, Homo sapiens
ccatccatcctttcctgagaagttagtttcttacaagcattatgctagacggggttagaaaacagaatgttgaacaagacactgcaatcttttatagaactctggctcgctacattaaaaacaattactatttcttgaaatgagaaagtattgtttctgagtttctgccaattcaatttaatgagaaatcaccaaaactcacttcagagaaatgccatttatgttgtttttgtcactatgccttattaaaataatcttgattacttcttaactcttttttgcaatgctaagcctcaaaccatgcacacaatgatgaagagcagcagacagacaaaggtctgaggcacactgcaactaagggcttaatgaaaggaatgaaggctgatggcagactagatggaagtcgaagttcaaaaaactcaaatccatggcttcctggaaaataaattacttctagcctaaaaggtcttcctgcttttaatttgtttactttccaa

SEQ ID NO: 98087 - DNA, 577 bp, Homo sapiens
ccccccccacacggtggggagtttctattggcccgggggatttgggaacccaagagccgtggttgggcccccccccccccccccgggccaaacccccaaacttttccccaaaaaaaaaaaaaaaaaaaaaaagattgaacagctctttttcatttttgttttgttcattttatacatgacacaaattgtttatcttgctctcattgggagtttctgttgattccctctttcaatgatcatcaaaagtcatcacccctgacttaaatggttttatgaaattcaagaagttgtgaacaaggctttaacaaaatatttccacttttaatgcctatgctctgattttatataaattttgtatgtaggacatgatgttgaagtaaaaccaataaatagccactcagtattcatctctagcgtcaactgaatcctgacctcaatcttcaaaagaatcagaatagtttcacacttcataagttacatatactccagaataaataaaagcagtttgcttgaagtattatcttgggctcatttgtgctgctataacaaaacacacttgagactgggttatttataa

SEQ ID NO: 98088 - DNA, 1105 bp, Homo sapiens
agaaaatgtgctttgcaaagcaaaaaaggcaaaaattggggatgagttcttcagacaagtaccaaaaatgatttctcgtcatttttaatgtatgcatattcatcatagaaaataattttttgttttattgggaataaaatcatgatacttaaaatctgatacacatttcaatgatcgtattaatccaataggttaaattaacaaattcttaggaaaaaaatctgtttatatgaagctatggagaaatctagaaagtaggtaatggtttagattttgagggacctatgaactcagaacaagttcatttagaggtgggaaacctgagattcaaagaggtctgcatggctgccaagattgcagggacagaatccaagcctgggctcactcatgatctgctctcctgtataaatgtcccatgtgcatctatgaccttattgtttgcaaagcaaattcatattccacgacttgtctgcttcttacaacaaactacaaggcaggcattgtgatttctaagtaagaaggaaaaattaagtagtcaagataatatttagaataaatatttttgaagatgatagttaaatagatggctcttcagactcctagctcaggctatttttccagccttcttttcccaaggaagagaagacaaaaaaaaaaaaagattgaacagctctttttcatttttgttttgttcattttatacatgacacaaattgtttatcttgctctcattgggagtttctgttgattccctctttcaatgatcatcaaaagtcatcacccctgacttaaatggttttatgaaattcaagaagttgtgaacaaggctttaacaaaatatttccacttttaatgcctatgctctgattttatataaattttgtatgtaggacatgatgttgaagtaaaaccaataaatagccactcagtattcatctctagcgtcaactgaatcctgacctcaatcttcaaaagaatcagaatagtttcacacttcataagttacatatactccagaataaataaaagcagtttgcttgaagtattatcttgggctcatttgtgctgctataacaaaacacacttgagactgggttatttataa

SEQ ID NO: 98089 - DNA, 963 bp, Homo sapiens
  misc_feature (869)..(869): n is a, c, g, or t
  misc_feature (959)..(959): n is a, c, g, or t
agaaaatgtgctttgcaaagcaaaaaaggcaaaaattggggatgagttcttcagacaagtaccaaaaatgatttctcgtcatttttaatgtatgcatattcatcatagaaaataattttttgttttattgggaataaaatcatgatacttaaaatctgatacacatttcaatgatcgtattaatccaataggttaaattaacaaattcttaggaaaaaaatctgtttatatgaagctatggagaaatctagaaagtaggtaatggtttagattttgagggacctatgaactcagaacaagttcatttagaggtgggaaacctgagattcaaagaggtctgcatggctgccaagattgcagggacagaatccaagcctgggctcactcatgatctgctctcctgtataaatgtcccatgtgcatctatgaccttattgtttgcaaagcaaattcatattccacgacttgtctgcttcttacaacaaactacaaggcaggcattgtgatttctaagtaagaaggaaaaattaagtagtcaagataatatttagaataaatatttttgaagatgatagttaaatagatggctcttcagactcctagctcaggctatttttccagccttcttttcccaaggaagagaagacaaaaaaaaaaaaagattgaacagctctttttcatttttgttttgttcattttatacatgacacaaattgtttatcttgctctcattgggagtttctgttgattccctctttcaatgatcatcaaaagtcatcacccctgacttaaatggccgtgtgtggtggcttatgcctgtaatcccaccactttgggaggccgaggcgggtggattgatcacctgacgncagaagttcgagagcagcctggccaacattggtgggaaccctgtctctaataaaaatataaaaaaattagccgggcgtgatggcgggcgnctgt

SEQ ID NO: 98090 - DNA, 974 bp, Homo sapiens
tccccttcctgtgtctccttctgtcaatctcctcaaattcacgttcataccctcttcaaaacacttctcctccttcatcttctaactttagtggcattgcctcaggctgggggagaattctatccacactcagtcatgctgcaaacatttgctgagggctatttcacattctgaatgctgaggagttaataggagaaaggcgctgacaacatgtctgtaccagaggaaaagataaactccaccttcggaagtgaaattgagtataatatacaaataacagcaaactgtaaagtaacggaagtgcctgaaaatcttgagcatttccacaaaaattttcatttgcctccctgtttttcctcagtctccagcattcaagagaggtagattgttattttgaaagtatttatttttgatttttaatttaaatgccaacattgttagtaattgattgtgaatgtgtttcagctgtgttttggttgggatatgtgtgaaagatgtggctaggagctgtccagggaattaaactgccagctctaataatgatttctatagaaaaggccttctctaattccaaacaacttttggattagagtctactcctaacagaacgtgcgcttaaagtaatataaacacctaattgccactacatacaggatatgagaaatggggcaatagcagaagaccaactgtgggagagggagtctaaacaagtgtgtggaacgcgaatagaagacaataggtggtctacaacagaccgtcgcgactcacgagacaacactttggaggctgaggcaggtggatcacctgagctcaggagttcgagaccagcctgaccatcatggtgaaaccctgtctctactaaaaatacacaaaattagccaggcatggtgttgcatgcctgtaatcccagttactcaggaggctgaggcaggagaatcgcttgaacccgggaggtggggttgcagtgagctgag

SEQ ID NO: 98091 - DNA, 1216 bp, Homo sapiens
gaaaataaaaagtttttcaatttgttttcgtatttgatttgcttagggaaatctcaattttgtatttatttacagaaataatgcatagtctatagcagtaatttcagcaagctttttgtttaaattttagcctctgtagaatcaaaagcataaagaattacaggttgagcattcctaatccaaaaatttgaaatctgaaatgctccaaaatccaaaactttttgagtgccaacatgacagcacaaatggagaatttcacacctgacctcatgtgacaggtcagtcaaaacaaaggcacacaacagtttattaaaactactgtataaaattaccttcaagctatgtatatatgaaacatgaatgaatttcatgtttagacttcccatcccaaagatatctcattatgtatatgtaaatattccaaaatctgaaaaagttaaatctgaagcacttctgttcccacacatttcagataagggatactcaacctgtatctactttttaaaaataatattctgaaattcgatactgtttttcatcttccatgctatttttgctatcaagatatggttacatacagtggctggtccataatatattcctatataatattttagatgtttccttatgagtcatgattcagggtttttttctttgctttgtttatgttaatattacatagtctgagagtgaatttttatttacttgcaagtgatatgtatgctgataggtttttctctctgtcatcaaatctattgagtaaaccatgccaggccaatttgtccatctccttttttctaagtaagaaatcacaaatatacagtaaatagagtgcactaatcataagtgtacttgatttttttacatgtgtatacattcgtatcaagatcatataaaaatgtatacactcagatcaaagtattaaaaatttcaaattctcttatgccctttcctagtctatacatctcgcagaaataactcttcttttctaaagatctgttagttttggttgttctcagatttcatgtgaatggaatcatacagtatatattgttttatgcctggcttctttcagcaatgtacttcttcttttttttattgttatagactatttgattatatgaatatatcataattcatttatccttttacctgttgacatttatttccaattttttgttattatgaataaagctataataaacattcaaatgta

SEQ ID NO: 98092 - DNA, 544 bp, Homo sapiens
ctagctagggaccccaccctgaatcaccttgttagcataaactcaggtgttgcgaagggcagttatgaatagcaaaagatactcctaaagggtggggtgtgttaggaataacaaactatcacttagggaatttctagggttttagacactgtgcgccaggaacccagaacaaaggacaaatatattttgtactctaccacaactagccttatttccactgctaccacactaaacaatgcatatttacagcaaatagcctgctcacagcagagcctgcgggggtagggaagagctgggtggcaagagacctggcttctagtgctggctctcttctaatgtaatctatgaccttgaatcagtcccttaactttgctgggctttgacttataaaaatgcaggacgcagatgatctgttactttgtgattccaaatatttaccttggcaaggactcagtttccaaactgagatttaaaggatttgctgaaaaatccaaatcatctaaatcagtgcatctcaaattgtaatgcatacatgaatcatctt

SEQ ID NO: 98093 - DNA, 912 bp, Homo sapiens
ctggccgcgctgcacaacatggccgagatgaagacgtcgctgttcccctacgcgctgcagggtccggccggcttcaaggcgcccgcgctggggggcctgggcgcgcagctcccgctcgggaccccgcacggcatcagcgacatcctgggccggcccgtgggcgcggcgggcgggggcctcctgggggggctgccccggctcaacgggctcgcgtcgtccgccggcgtttacttcgggcccgcggccgctgtggcgcgcggctaccccaagcccctggccgagctgccggggcgcccgcccatcttctggcccggcgtggtgcagggcgcgccctggagggacccgcgtctggctggcccggccccggccggcggcgtcctggacaaggacgggaagaagaagcactcgcgcccgaccttctcgggccagcagatcttcgcgctggagaaaaccttcgagcagaccaagtacctggcgggcccggagcgcgcgcgtctcgcctactcgctgggcatgaccgagagccaggtgaaggtctggttccagaaccgccggaccaagtggcgcaagcggcacgcggcggagatggcgtcggccaagaagaagcaggactcggacgccgagaagctgaaggtgggcggctcggacgcggaggacgacgacgaatacaaccggcccctggaccccaactcggacgacgagaagatcacgcggctgctcaagaagcacaaaccctcgaacttggcgctggtcagcccgtgcggcggcggcgcgggggacgccttgtgaggacccgcggggtgggggcgaatctatttttgcagaatccgggggcggccccgggtgggcgcgagtcgctttgtatcatcaataaattatttaacgggtccccgtcggagccgtcgctccgga

SEQ ID NO: 98094 - DNA, 617 bp, Homo sapiens
ctggccgcgctgcacaacatggccgagatgaagacgtcgctgttcccctacgcgctgcagggtccggccggcttcaaggcgcccgcgctggggggcctgggcgcgcagctcccgctcgggaccccgcacggcatcagcgacatcctgggccggcccgtgggcgcggcgggcgggggcctcctgggggggctgccccggctcaacgggctcgcgtcgtccgccggcgtttacttcgggcccgcggccgctgtggcgcgcggctaccccaagcccctggccgagctgccggggcgcccgcccatcttctggcccggcgtggtgcagggcgcgccctggagggacccgcgtctggctggcccggccccggccggcggcgtcctggacaaggacgggaagaagaagcactcgcgcccgaccttctcgggccagcagatcttcgcgctggagaaaaccttcgagcagaccaagtacctggcgggcccggagcgcgcgcgtctcgcctactcgctgggcatgaccgagagccaggtgaaggctggctccataaccgcccgtacaagtggcgcaagcgacacgcggggtctattgcatctggcacgcacaaataggactcaggc

SEQ ID NO: 98095 - DNA, 620 bp, Homo sapiens
ctggccgcgctgcacaacatggccgagatgaagacgtcgctgttcccctacgcgctgcagggtccggccggcttcaaggcgcccgcgctggggggcctgggcgcgcagctcccgctcgggaccccgcacggcatcagcgacatcctgggccggcccgtgggcgcggcgggcgggggcctcctgggggggctgccccggctcaacgggctcgcgtcgtccgccggcgtttacttcgggcccgcggccgctgtggcgcgcggctaccccaatggcgcaagcggcacgcggcggagatggcgtcggccaagaagaagcaggactcggacgccgagaagctgaaggtgggcggctcggacgcggaggacgacgacgaatacaaccggcccctggaccccaactcggacgacgagaagatcacgcggctgctcaagaagcacaaaccctcgaacttggcgctggtcagcccgtgcggcggcggcgcgggggacgccttgtgaggacccgcggggtgggggcgaatctatttttgcagaatccgggggcggccccgggtgggcgcgagtcgctttgtatcatcaataaattatttaacgggtccccgtcggagccgtcgctccgga

SEQ ID NO: 98096 - DNA, 198 bp, Homo sapiens
ggacccgagtttgtgcgtgggagagagagacgcgcccttgggacaggagcgctgtgtgtgccctgggagggtctcaggatgggagtgtgtgtgtgtgatcgagggcctgttggagtgcaagttggtgtgggggtgagtttgagtttgggggcttgagagggaaacagtgggactcggtgtgggtgtgaggtgaggggc

SEQ ID NO: 98097 - DNA, 507 bp, Homo sapiens
ctggattgagagacacacatagctggtcaaacacgatttcagccatgaatcaggcataaatattctgatggttaattgtagacgtctacttgactggattgagagacacacacagctggtcaaacacgatttctgggcatatctatgagggcgtttctggaagacactgagataaccatgacccaatgtggatgggcactgatatggtttggctgtgtccccacccagatctcatcttgaattgtagttcctgtaatacctacatgtcgtgggagggacccaatgggaggtgactgaatcgtggtggtggttactgccatgatgttctcatgacagtgagtgagttctcatgatctgatggttttataaggggcttttcccctttggctcagcacttcttgttgctgccatgtgaagagggatagctttgcttccccttctgccatgattgtgaggcccctgcagccatgtggaactgtcagcccattaaacccctttgttctttat

SEQ ID NO: 98098 - DNA, 649 bp, Homo sapiens
tggattctcagtgggcattattcttggtagtaatttcaagtaaagtgttttacttctactctggaaacaagtaaacctggaaaacaatttatagtactaatatgaaaactctaaattcatcctggctttaaaacacccatagggaaggacatggctagattaccaagactaccatgacttttgtttcctaggtacatcttttccgttattctccctacataatacaaatgtagatttattgatttgtttttgctgctttttaaaagagaaaatgaacaaaaaataaatatccctcatatgtagttttaaaattattgaggagatatattgcttttaaatatcaaggagataaattacttttaaagattataaactataaccttaaaatcaagtatgatgcttaatattaaatggacaaaaaattagaatgtaacatattatataatacagccttaggttctttcatgttctttcattcaataatgttagaaataagtaggtgaattattgtagcatcacactatgttgcccaggctagtctcgaactcctgggctcaagtgaacctcccaccacagcctcccaagagctgggactataggcacttgccaccttgccctgctagaatcatttttaaatagcaacacatcc

SEQ ID NO: 98099 - DNA, 115 bp, Homo sapiens
tggaacatcagctcacccctcactgctgtggaacagccccccaggggcactcctggccctgtctactttttccacaagcccccaggacttccccttctactacctgcaacagggt

SEQ ID NO: 98100 - DNA, 411 bp, Homo sapiens
gagctcacaccactacactagagcctgggtgacacagcgagaagaaaattcctgacaaaatgcttaaaataaatcatcagtggatgaaacttgttttaagaagctggtgctccccccaccatcccacctggtaccccagttgccagccaagaattgtgttacctttaccctgactatcgtctttctggatccaatctcagatctaatggttagataattattctcttctcctataaaatgtccctattagagtgaatcttaattggccaacaagagaccttttttccttgcatgtaagattgtaataaaatgttcactcatgctcatagctatgttgtccaaaaagttttctttaacacaccaagaactaatacttcaggtttgtaggaatggaaaggaaggacaccaaag

SEQ ID NO: 98101 - DNA, 316 bp, Homo sapiens
gcccaggctggtctcaaactcctggtctcaagagatctgcctgccttggcctcccaaagtgctgggattacaggcatgtgccaccgtgcccagctagtttctattagtttttgaaattctgtgtatttttgtggttttcccagtctgttattttgcatatgtatgctttgttctttttacttttttttcaggtagtgaaattcagtggtatttatttttctccatctttttcaagctttcaacaataagcatctattacttcttatcaaaaaactaaaaaaaagacggtatggcatcataaatatttattttagaa

SEQ ID NO: 98102 - DNA, 175 bp, Homo sapiens
gccccagggagactctttcccatgctactctgtggtgaaatggaggtcacatgactggttctggccaatggcatgcaggtggaagtgaggaatgtccactccagacttgacctccacatttcccacccccagatccttagctcagtggctcttgcttctgtctcttggttggatg

SEQ ID NO: 98103 - DNA, 223 bp, Homo sapiens
tggaagcaaaatactgaatgtataaaaacaattgctcagagaatgagttcaacctctcaagagcattccaatgggaatgctgcatgcaacaacacgccctcagggaaaagtgggcattcctttcctaatagttggcagtgagaataaagttgtcatacagaacttttgaattgccttagggtgaaataagcagatcttcactaagagtaatattaagaaaaag

SEQ ID NO: 98104 - DNA, 441 bp, Homo sapiens
  misc_feature (1)..(1): n is a, c, g, or t
nagagaatgagagattatctcgatacctccattcctacctcacttctgatacatggagtggacttgagtaagttaaatgggcatgtaatgtgaccccactacttttctctgtttcttgtactttgttgccttttgcctttacttactctaaaatctgtggaaatcttatataatcccacccagcccagatgttttctctttcatgaagtttttcttgttcattcttgtaagaagtagtatgtcattttctaatctctggtaaaatcatttatttcattcatcatacatttatttggatttagaactactgtgtttgtctttgaaggcaaggacaactgtctttgaatccatgtaacatctctacaatcccttatatactaagtcccccataaatatttctcaaataaatgcttgcaaaagtgtgcttcattaaaaaaaaaa

SEQ ID NO: 98105 - DNA, 392 bp, Homo sapiens
atccccaccatttaacataactgacgcagtgtgtgctaaacatctcaattctgaatactattacagaatttgtttcaaagtactataacatatcccaactatcaaatgtctaattttaagtatcttttttatattttgaactttcatattatagtttccaaaaaaagaatgacaagaaatatagctacgtattctttaattagctgagaaacaggttaaaaccattttccaaagatttacatgaagttttaccttccccgaatcctcttaattgatcaggtgtgatcataaatgatataataatttatagtatttgatcacgttttaagtgtaatagagttctggacaactacaaaaccaattaatataaaattaattgtgctactgattgt

SEQ ID NO: 98106 - DNA, 339 bp, Homo sapiens
cactgcctttttgtagcttgggatctaatttgtaacaccttgctacctatgaaaagtgggaatgtaaaagggaaaaagcaacttggcatttactaaacttaggctaaccaaaaccctctgtagagatccttactagacatgggtgcaacagcaagcatcccagaggacccaccactggggtatgttttaggccaatggagcaaattcaaatttggctaaaagaagaagaaactcatttagtatggcaataatatttgcgttcgacacaaagtggcaaaccaacacatttggcctaaacatggttctatatgttataatgatactttacaattagacttc

SEQ ID NO: 98107 - DNA, 131 bp, Homo sapiens
gaaatcctaggtgctacaaaaatatttgggcctgaataaataacctgatttggttgttttgggagtttgaagaggtttaccaaaattcctcaagttagctattttccactttcaggatgcctcactaaaca

SEQ ID NO: 98108 - DNA, 558 bp, Homo sapiens
tctggacgagtgcactggggggaaggtacccgcccctcccccgccccccgccagcacctaggcaataggaaaagctggcttggcctggtggacttgggtggggagggggctttggttggtggctgcagtgacttcgagttctggtccaagactctcgattccttctcctttatgggcacagagggcaaggagtgtgggctttaaggagaatattccgatggggaggggcaagggccaaggcctgggctgtacccccaggacactgcctctgagttggaaccccttcatgggcaaacttggggatcagccccagtctccccgacccaggccactaaacttagcagtctcctgtctcctcatcagctgctcactaacatggctttaattctttgctgcctactcctgggcctatttccttctgtcctcagtgcaaggggtgggatggaagctggcaggcagaggatttcagttcccagtagcttcactgcctctgcagcagcacagtaagtaaagctgccttcccggtgtgaccagtccttgggaggaccccgtgagatg

SEQ ID NO: 98109 - DNA, 399 bp, Homo sapiens
tgtctcccacagccagtcttgaaaaccgagcaggaaactgcgtaccaagcaaagccaacagcacatgagagtttagaggcctgagagcctggcactcagggaactgcagtcaagtgtagctgctgccttagacgtgggggaaatgtgggaactgaggtgggagacatgggtgaggtacagatcacaaaggaccatgatgtcagggcttaccctgaagccctagggaggcaccaagggattttaggcagtggagcaatatggaaaaaactggctcggaatgtttgtttttttttttgagacgaagtctcacactgttgcccttgctggtgtgcagtgagccatgatcatgccactgcattccagcctaggcaacagagcaagaccctatatcaaaaaaaa

SEQ ID NO: 98110 - DNA, 505 bp, Homo sapiens
agacatcctggacagaagagcccgcctgtataaagcctctagtgtgagatgatcaccttggaatccttcatcctcatctgctgctgcacgaagccaggccagacgtggcccagcattcagaggtggaacagcaggttcctgccctggtgtggcccattcttatccaggaatagttctccagcctgaccctaggtttttttttcagccttaaaagttgaccccacggcagagagggaatagagttacattgaaaagtaagtgtagttctcttgagtgaaattgctctacagtatttaatagaatagttccacagtctgtgtatataactgtcatgttattctgtgggcctttcttggagtggggtgataagtgcgtttattgttccctaacttactcacctcactccttgaaatatttagtgtaccttccttcctgtagccagggttgatgacagatgttccttattgatcacactgagaacctatggccagatgaaggaaagaag

SEQ ID NO: 98111 - DNA, 343 bp, Homo sapiens
tctttcatttgtggcagccagattaaaatcggagaacaatttctgccaggcttctaggaactagtcagacaggtatgtgagggaagaaaccggagggcagccaaaggactggaaaagcgaagacacggggtatgaggaggtgaaagggtgtgttaccaggccgtggatgacaggcactggctgaggatgatttgaaaagattctgactggtagaactagtggtgaaaacgaggtaaagcattcgttgtttaattcacacctggatttttggcatgtcaaagcagttaaagctttcttgcagaagtttagaaatggatatcgattgagcctaggcggaattttc

SEQ ID NO: 98112 - DNA, 399 bp, Homo sapiens
gtaggattcaaacctggagttctgaaaatgacctttgccactgcaatgaagaagtccgactgggaaggaaggaaacatggaatggatccagaggtttctgaagtcttcaacacatacttaactctacaaaccaatcgctttcctttctattttaaacaatttggtttgggtttctgtcacttgccaccaaatgtatcttaaagcattataaatcagagtgacagagttttagatacagaactttgaaacatttgattcagagagaccaaaagtagagaaatgaaattggagccaagtgaatttctattaattcaattctacctctagtaagccctgtgccctacacaagtcaagtctgtttgtccctctgggccatgtattcttaacctatgtggtagg

SEQ ID NO: 98113 - DNA, 395 bp, Homo sapiens
ctaagtttcccaggctgctcttgaactcttgaccttgagccatccttccacctccgcctcttgaagtgctggggttacaggcatgagccatggtgcccagcctgctgtttctttagttcatgacgtttatcacaatgtgctactgtttccattgtttacatcatagtaggaaagggaaaataaactccctaagggcagcaataatttctgtctttgaatccttcattcagcaaatatttgttgagcaccaagggccagatggaactgagtatgtagtgttggagccagaaagaaggtccctgctctcctggagcttgtggtctgaccggcaagagagacaacagggggcctgcgagaaaaactgctgtgggtcaaaaaaagcctttttctctagt

SEQ ID NO: 98114 - DNA, 306 bp, Homo sapiens
taaaaaagccaggataggacaaagtctatttcaattaaactgtaggccaaagggatgtgaggaacgcaagatgcaaagcagagaaaaaaagtcacacaaatagaaaggctatcactgcatcaataattcaccagtgacaggcctttagaaggtttactgggaagaagtaactcagttatatacaaagagtaaataatctgaatttaaatgaataccaaaaatgtcaaaatgggcaatttttctgcaaataaccaagagaaaccctaaaataaagaactcatattccaatccagattaatacttatc

SEQ ID NO: 98115 - DNA, 776 bp, Homo sapiens
tcctcatttccagactttccgggcgcccaccaggctcccgggctctcaccggagaccacagggaggagcttcaaggtaccccaagtccctgcggcctccagcagtgaagagttccacaagggagtcttcctacgtcactgaataatgaatgaagatgagaggggaaaagagaagagacaaagtcaatccaaaaagctctcaaaggaaattaaactggattccatcatttcctacctatgattacttcaaccaagtgacgctacagttattagatggctttatgattacactgagcacagatggagtgatcatttgtgtggctgaaaacatctcttctcttcttggacatttaccagctgagattgtgggcaaaaaattattaagccttctgcctgatgaagagaaagatgaagtctaccaaaagattattctcaaatttcctttactaaactcagaaacacatattgaattttgctgtcatttaaaaagaggaaatgtcgaacatggtgatagttctgcttacgaaaacgtgaaatttattgtgaatgtaagagatatttgtaatgagtttcctgtggtctttagtggcttgttttccagccacctctgtgctgactttgctgcatgtgttcctcaggaggatcggctttatcttgtgggaaatgtttgcattctcaggactcagctcctgcagcaactttacacttcaaaggcagtcagtgatgaagctgtacttacacaagattcagatgaggaaccttttgtgggagagctca

SEQ ID NO: 98116 - DNA, 389 bp, Homo sapiens
agtgctgttgataaaggcgggtggggttgttctaacatcctcggtgacatgtgccccggcttttgagaactcctggctctgccggctctcagacttcataaaacccatgtggttgtggcaggcagtctgtcatagctggtctgtgcagtgtggtccatgcccgccaggcaggcttgaactcctcttcctctgtgatccgctctggcaaaataaaccagccaggtctggggtggcacctgccccgcactgaccctcaggcctgccgtgggctgagcacagggtaagcaggtggatccacgctctctctgcccctctcgctccctctccctgctccatcacacttcccattgaagaggaggatgagacgctcagtattttacttctcgccg

SEQ ID NO: 98117 - DNA, 439 bp, Homo sapiens
cacctatgaccaggggaccaagtgctcatcagcaaaccccataacctcgagtgcttcctggggcacaataaagatttgctgaatgagcaagggggggttgttggatggcagagggatgccaagggatgcagactggcttttctgtcaccctctcgaatgccgttgaacttaaaagtccccagagtgagggagcggggtctggagaccttggctctgacaaagcacgtgtggaagatgtgactgccatcactctcttcctgctttgcaccctgatctggaagcagatggtgtccccgtgtccctgtcctctgacaaagaactgggccacaggacgaccttggatagacctggcaaaggctcagtgttggcaggcagtgtccaggtggccatccgtgcatccgcccctccagctagcatttttgggcacctgttatgcttg

SEQ ID NO: 98118 - DNA, 398 bp, Homo sapiens
gatccaaaatgactggtctctctataagaagagaatattaggatacagagacacagagcagagatcatgtgcagacagagggaaaagatagccatttacaagtcagggagagatgcctcagaagaagccagcccagctgatgccttgatttggacttctagcctccagaactatgagaaaacaagtatgtattgtttaagctgtcaggtctgtggtattttgttgtggcagccctagcaaactaatacagcttcctagacatatcagtatttatgtcaaatgcaaatggactatatggtcaaattaaaaggctcaaattgcaatgaaagaagacccttgttggttacaagagacatatcaagaacacaagaatgtggaaagattagaataaaaaggtg

SEQ ID NO: 98119 - DNA, 805 bp, Homo sapiens
ttaggaatgcttcctttattagagattgaccatttatcttctttacatcttagagacataaaatttcacaagagtaaggagagatggaagtgggtcaaatgatttcctacatctttttttccttatcaaatacagtgctcaaaaaatttaagcattccctttattgctttctttcagtcttttcgagaaagtgggaatcagttcaagtagccgtgaggatcagacatggaataatttatttggtgatgggagggtacaaagacagattttgcctacaacccataattggtcttctgtagggacactcaggtaagtatctcagcaaaaggaagacatatagtttttatagactttctgggccagatggttgctgatgaaaactcacaagcttctcatagactactcccattaaacttcacccagaggaaatcccaccaggccttaagcaaagggacgagtcccttctaaatagattagaggacatatatccaaaaagtaggctttcctggaatgtcagtgagacagaaccattaactcacctggaaaaggggatgaagccagggagctgagtgctcttgcacagcggatccaacccccatggagcccaataagctaagatccactggtttgaaattcttgctgccagcacagcagtctgaagtcaacctgggactctcgagcttggttggggaaggggtgtccaccattgctgaggcttgagtacggggttttcccctcacagtgtaaacaaagtgcctgggaagctcgaactgggcggagcccgccacagcgctcaaagccctgg

SEQ ID NO: 98120 - DNA, 200 bp, Homo sapiens
ggcggcgacagcggagccgggccgggggctcagcggggtccgggggctgggggcagcgagcagggcggccccatggccgggcccccctgaggcagtccgggggagtcccctcccctccccagctcgggggtctccgggccccatgagccggggcgcgggcgcgcttcagcgccggacaacgacctacctcatctcgctga

SEQ ID NO: 98121 - DNA, 474 bp, Homo sapiens
cagtgtctgcacacctcattcctcttggtcgtgagacaagaactcagaacttgctgaaatgcagaagtgaaagagcagtatcactccatcctgctgaactacgggagtgaagaagccacagtaggactttactagaagtgaggattggagaacagaatctttccaaaagttttgaagaagcttccatgttgtgagagagcatatggagggggccacgtggcaaggaactgtagtggccactgagtactgagagtgctgagtgctgaacatagaacctcagggcaacagttgcaaagacatgaattccaccaacaacatgaaggccttggaaatggattattctctagtccaggctctgatcaccacagccccagccaacacctgaatttgagccttgtgagaccctggagtagagaacttagctaggatatgcctgacttctgccctacagaaacaaagacataataaatgtgt

SEQ ID NO: 98122 - DNA, 725 bp, Homo sapiens
agccccagctgtgggaacattcctacaaagctgattctcttccgattctgctggaatcctgagtctctctcaaactggaattatcttaacaattcttttgcttgaggtttcctggacggcatatgtggataatggtctcactctgtcatccaggctggagtacagtggcatgatcctagctcactgtagattcgaaatcctgttccagtggtcctcccacctcaacctcctgatcaactgaactacaggaatgcaccaccaaacccagctaattatttttttgtagaggtgggggtctcacaatgctgcccagactgttctcaaactcctggcctcaagtgatgttcctgcccaggcctaaaattttaaggagcaggtgatgtttagcctggagaactgaaggctcaggaagaacggggtcttcaaacacctgaaggactgtctcatgaaaaagagatgcacaagacaggagaattgagcagagagatgtttaactcaaatcgaagaacaaagacagcattgaatcaccacctatcaagggtcttacttgaatagactttggtttggatgagaggctatagaagaaaacctcaaaagtctcttccaattctaaggtttcatgattccaggcatttggagaattaggaaaaataatcacttaaaaaaaaaactatttagtgccaagcttcctaaaacatctttaaaatgtccaatatccatgaatc

SEQ ID NO: 98123 - DNA, 531 bp, Homo sapiens
ccttccttacagtttttaaaaataacttttttgagtaagaattaacatgtagtaaactacatgtttccagagtattaaagttttctcatatgtgtacagctgtgagaccatcactacaagttaggaaatgaacctgtccatcccctgccaaagtttctgcctgaccttttataatctttctcatccagctttccccacagcacacttccacactctccaaccccatctctaatcaatgatctatatctaatcattatagattagatgcattttctgggatattatagaaattgaatcatatagtatgtactcttttcctttttttggtttggctttctcacacaaaataaataacttgacactcatttttgttgtagcatgtatcaataggtcatacatttattgccaagtagtatttcgttgtatggatatgctacaattagtgttatctatttatctgttgatggacatttacactggttgtttcccattttctactatttcaaataaagttgctatgacacttgtgta

SEQ ID NO: 98124 - DNA, 260 bp, Homo sapiens
aactggggcatcagagaggccaagcggcttgcccaaggtcacacagcggatgttcgagtggaaatggaatgcaagcattcagactccagaacttgcactgtcttcagaaatggcctcaagttagtggtttgctcaggggtgaagagcaaagcaaagttcagggcctcatcccagggtgtgtcacttggcatgagggacgaggacccccatttcctctcagctgaggggaagagctctccacaatgtccccctgcacggtc

SEQ ID NO: 98125 - DNA, 424 bp, Homo sapiens
agactgatgcagataacccgatctcctcacctgttgatccacccgcctcggctcccaaagtgctgggattacaggcgtgagccactgtgcccggccgagaagtctttttaacatcattggagagatatggtagaggaagagaccgagacgtagggagcagtgagtcggtttgggatgagactggcaggagcaggcagatacagtattcgacctcggagctgggcttttaggctggggtcctggcgcccctagagtgtcaggaggtgagggcctgaagctacaggcagaatcccagtgtctgtgtgggccgtgggcttgctctggacactctggggacaggatgcaaggccgtcatcagattctcaaaggggcccgtgtccagaaaaaaaacgtgttaaacctccgatatggaagcatctgcagt

SEQ ID NO: 98126 - DNA, 349 bp, Homo sapiens
aaaggggaagagaggcagtaagtggactgtaaagagtgcttattccacgctgggcaggtcattagaattgtcatgtcaaattcccttccttaatcccctcaactacccagtggagtcaggattattaatctcttcctctatacgtgaggacagtgaatccagagtggcttgctggtgctgaatagatcatgttgtcttacaacttgagcttttcccttgttcctttccctatttgtctgctgaactcatctgtctccaggttgtaaatgagattctcctctgaagagcctctgagccccctgtaactctattcttgtattgcatgacgatactcttgttctttaggttt

SEQ ID NO: 98127 - DNA, 286 bp, Homo sapiens
cgacaggattctaggatagtcagtagaattagaattgtgaagatgatcagtgtagagggaaggttattgtgttgctattgattgacatttggaaactgaagctgaggttaatacagagtaaactattctctcttatgaagggttattaactcgttcaggccttctgtcagtggtatgtaattccctgcatgggagtcagaacaacaaagttggaaggttaagagaaacttaacccacccatcgtagaaagaagaggccagaaaagcaaagtggcctgctaaaagtc

SEQ ID NO: 98128 - DNA, 131 bp, Homo sapiens
atcctggaagacaagtgaagctagggtgcaacagagtatcaaatgctactgagatatcaagaataaaaatgggtgagaaatgaccactgactctacatacattttctaaacctgttctttcctattccacg

SEQ ID NO: 98129 - DNA, 392 bp, Homo sapiens
agaagacaagcctcttaggaaggctgcagtttcatcagtttggaagcaggaatagggattattccttagtgatctgacctcgtagggatttgcccagtcttcactgtgtgaatctcaaggttaattacttatgcctaaattaacatggtagaaagcacactgcttaagccagagagctcttcctaactgaggaatggttggaatctttattaaacaatctgaattccttttccctttgggttccaaacaagttttctgaagccattacagaccttttgggtggtccctccagatgagtggcagagatgttgtgagcagtgtacacttctccccgggggtaaggctgtgagtctgccctagctgtggcatctgggatgcaagcaggtacagta

SEQ ID NO: 98130 - DNA, 398 bp, Homo sapiens
aggaggtgaaggctgccgtggtcatgatcacacccccgcactctagtccgagtgtcagagaccttgtctcaaaagaaaaacaaaagaaaagaaggaatagtacacacagagttgaatggcctcatggatccctcctacatggtattcccatcctctgcccctgccaaagaggtagattgtggtaatttcctcaacccatgcccaccccagatcagtcctggctttctctgtgccctgggaggctgatccctaggaactgccctccagttgagtttagtcaatggtagtcaccagaagactggagggcgggagaagagagaggctggggtatctgtttctcctgcctcctccctgttctgctgcccccttcatccactacagctcctcactggcagctc

SEQ ID NO: 98131 - DNA, 117 bp, Homo sapiens
cacatgctgctccttctgtttccaatccttatcttcccctttatttatttatttattttttttttgagacaaggtctcattctatcacccaggctagattgcaatggtgtgatccca

SEQ ID NO: 98132 - DNA, 139 bp, Homo sapiens
cccctcccatcctctagccaggacctggctctgcatttgtctctagctgttgagttcacctgatgttgttacatacttcgtgtacttttcccacactctagactgtacgccacatgcaagtagaacatttatgtcttgt

SEQ ID NO: 98133 - DNA, 347 bp, Homo sapiens
cagatgctggagaggacgtggagaaatagtaacgcttttatgctgttggtgggagtgtaaattagttcaaccattgtggaagacagtgtggtgattcataagctatttttaattgtttttatgttcctggatctagtccatgtaacgtagagaaccaaataaatgggaaaatgagctattatatgtattttgtttgttttggttttttttttttgagatagagttttgctctgtcgcccagtctggagtacagtggtgcaatcttggctcactgcaacctccgcctcctaggttcaagcaattctcatgcctcagcctcccaaatagctgggactagaggcgtgtac

SEQ ID NO: 98134 - DNA, 705 bp, Homo sapiens
atcagttggcgcagcccggaagcttcgaggagctcctagaaccgccgccttagctggcggcgccggctcttagcctggaggtcggcggaccgcttccaaaagtggaccgaaattccggggatggatgccgggtggggacgcggacggccgcaggccagcctcctgacagccggggctgagggaaccggccgcagcaaatcgcacaccctctctgtgtgccagagtgactggcgcaggccgcgtaagagaggagcgagaccccggaccagcccgcaccgcggaggaccggagagggcgattcgaaatgacttactaggggacgagaaacacgtacttggaaagaattgagccagctgaaatggaaaactgtgggaaggggatggggaacgaggctgctccacctgagatccggctccaggacttacagcaaggggaacttggcaacatggacaatctttcctaagctgctcagcttacaagaatcaggacatcatactgctaagaattcagacgtcagcagatcatagtccctgactccaactcttctggcacaaacatcagacatggtggtatccagccgggccttggtccagcgacgaaggcagagatgaacattctagaaaatcaacgagaaattgcgcccccagctggcagagaacaaaccagagttcagaaacctcaaagagaactgttgggtagctcaaa

SEQ ID NO: 98135 - DNA, 528 bp, Homo sapiens
aaaaaaaaaaaaagtgtagtctgtagtgttggtgggattgtgggggaagtagaggctgacatctacaataagtgggtagtgctatcgtggaggttagtttgacagttacctgtcgatatggcaagtgctgacactctttgacccggccgttccttctccaagtatctattctagagaaaaacctatcacagacgcactagacaacatgaataaggacatttgttgcagtgtcaataaacttttaaaaaggaataaaccaactgtctataggggattggcctgagaactcagtcacattgttcaggtaaaaaaaatctcaaaacacatccttgaagaacctttctccaacccctgtcttccatctgctagtccccacctctcccatggtaggcaacaactaccatcatccatttctagactgtccttctagaaatttcttctatgcctatagaagcaactgtgaatacatctttccccctttttagacaaatagttgtgtactatcatgcatttctacactttgctgtt

SEQ ID NO: 98136 - DNA, 569 bp, Homo sapiens
cctcacatgcgcatttcacaatagggtttgtactcctatgagaatcgaatgctattgttgatctgacaggagccggagctcaggtggtaacgcttgctcaccctcccaacgcctgccgtgcacctggttcctaacaggccatagactgataccagtccgtgtcctgggctttggggactcctgacttaacttgtttctttatctcctctccaatatttcctgtggaatatcaaaggctttatcataattatattgtatcacttcagatggcatgtattgtctagctgtttcactgttagtgactagaaattaaggtaaatccctggattaaggtagtgacatctgattccttcattgtaaagttaatattttatacttgagataggcaagaacttcgtagagagatagtttggtactatgtaactgtccagatactcatcattctttcacttaatgagctcagtgtccattgatgatttcttcctgaatcggttatgtcaccgagagctacaaattggtgattttcctattctgttatttcatctgcatttatttcctggcatcttctt

SEQ ID NO: 98137 - DNA, 424 bp, Homo sapiens
ctaaatagggcacacagctcacgtttttacttggaagaaatggacacttacgtgggctggggcagttacaagctgacatcagcaagttcctgcccatggctgttttcctgcaggttgaaaaacctgtttggacagccctggcctggccacgttacaaaatctggtcattgaagagatttccaaggcagaggcagtttcccacatacgttcccacgaggactttgtgcactgctccttggcatggctgtcttaatagccacggcttcagctctagggtctcccggaaagatggtgtcctggttccaagtacccactttccccacttctttaaaattttttttgagacacggtctcgctctgtcacccaggctagagtgcagtggcgcaatcttggcttactacaacctctgcctcccaggctcaa

SEQ ID NO: 98138 - DNA, 545 bp, Homo sapiens
caaccagcatccccagagacagttagcctgacatcagaattgtgttttgctagctaaatacagattccctctacagtattatgcaatttattacaagcagacgggcttgatccagtagctgagaagtcagctgagtcctccttaagaacttgctgaaataaagggaaaggggaaggcaaagggtccaaagacagaaaaggcagaaacagtcagaaataaagagttagtaccaatgtctttagcggcacctcagagatagtcatgggggaatcttgtcaaatgcggattctgactcagtagatctgaggtggggatgaagggtctgaatttctgacaagctcccaggaaatgctgtttatcccaaaaaacaatagtgtcaagaatactaagagcaccaagagtgtcctttttctttgtttaaggatgcttttgctcccaaaaggatacattgtatatgtgctctggttttctttcatattctctttataggatgtagttttgtttctctctaatgttatttcatttgtactgttttcaggtcgcat

SEQ ID NO: 98139 - DNA, 3787 bp, Homo sapiens
ccggcgcgggagtaactcctcgcagaggcctctgggagttgtagtttttttgcctttgcctctccatgacgcaattcctgtgcgacatacgtagcggccgccattgttccgcgccgatggcgagatccttgttcctcagatagcgttcatcgcccgtcgtggtcaacgggccagccgagtctggagtggttgcgaacccttctggctgcagatctggaggtggaggcagtaccctggactctattctgctgccccttcagggtttggaggagccggagcatccctcgcgtcctgtcacttccagcgaggcacacaaaactgaccgtagggatggccaccagggtccggacagcttctatttgggtcccacctctccaagaacgaaacagttcatgggataggatcagaaagctccaaggtcaggaatccatcttgggccaagggactcctggtctgcaacctctccctggaacacccaggcagaagcagaagagtcgcagaatagagaaagtcctagagtggctgtttatttcccaagagcagccaaaaatcaccaagtcctggggacctttgtcattcatggatgtgtttgtggattttacctgggaggagtggcagctgctagacccagcacagaagtgcctgtacaggagtgtgatgttggagaactatagcaacctggtgtccctagggtaccaacacaccaaacctgatatcatcttcaagttggaacaaggagaagagctgtgtatggtgcaggcccaagttccaaatcagacctgtccaaacacagtctggaaaattgatgatcttatggattggcatcaggaaaataaagacaagctgggaagtacggcaaaaagctttgaatgcactacatttggaaaactatgtcttcttagtacaaagtatctttcaagacaaaaacctcataaatgtggcacgcatggaaagagtttgaaatatatagatttcactagtgattatgctagaaataatcctaatgggtttcaggtacatggaaaatcattcttccattctaaacatgagcaaactgttattggaataaaatactgtgaaagtattgaatctggaaaaaccgtcaataagaaatcgcaacttatgtgccaacaaatgtatatgggcgaaaaaccctttggatgcagctgttgtgagaaagccttcagcagcaagtcataccttctagtgcatcagcaaactcatgccgaagagaaaccctatggttgtaatgaatgtgggaaagacttcagtagtaaatcatacctcattgtacatcagagaattcatacaggagagaaactacatgaatgcagtgaatgcaggaaaacattcagtttccattcacagcttgttatacatcagagaattcacacaggtgagaatccctatgagtgctgtgaatgtgggaaagtcttcagtaggaaagaccagcttgtttcacaccagaaaactcattcaggacagaaaccatatgtgtgtaatgaatgtgggaaagcttttggtttaaaatcacagctcattatacatgaaagaattcatacaggagagaaaccatatgaatgcaatgaatgtcagaaagcctttaatacaaagtcaaaccttatggtacatcagagaacccatacaggggagaaaccttatgtttgtagtgattgtggaaaagcctttacattcaagtcacagctcattgtacatcaggggattcacacaggagtaaagccctatgggtgtattcagtgtggtaaaggattcagtttgaaatcacagctcattgtacatcagagaagtcacacaggaatgaaaccttatgtatgcaatgaatgtggcaaagccttcaggagcaagtcataccttattatacatacaaggactcatacaggagaaaaactccatgaatgcaacaattgtgggaaagccttcagttttaaatcacagctcattatacatcagaggattcatacaggagagaacccctatgaatgccatgaatgtgggaaagccttcagtcggaaataccagcttatttcacaccagagaactcatgcaggagagaagccttatgaatgcaccgactgtggaaaggcttttggtttaaagtcacagcttattatacaccagagaactcatacaggggagaaaccatttgaatgtagtgagtgtcagaaagcctttaatacaaagtcaaacctgattgtacatcagagaactcatacaggagagaaaccctatagttgtaatgaatgtggaaaagcctttacgttcaaatcacagctcattgtacataaaggagtgcacactggagtaaaaccctatggatgcagtcaatgtgcaaaaacctttagtttgaagtcccagctcattgtacatcagagaagtcacacaggagtaaaaccatatggatgcagtgagtgtgggaaagccttcaggagcaagtcataccttattatacatatgagaactcatacaggagagaaaccacatgagtgcagggaatgcgggaaatcctttagtttcaattcacaactcattgtgcatcagagaattcacacaggagaaaatccctatgaatgcagtgaatgtgggaaagcctttaataggaaagaccagctcatttcacatcagcgaactcatgcaggggaaaagccttatgggtgcagtgaatgtgggaaagcttttagcagcaagtcatacctaattatacacatgagaactcattcaggtgaaaaaccatatgaatgtaatgaatgtgggaaagccttcatttggaaatcactactcattgtacatgagcgaactcatgcaggggtcaacccttataaatgcagtcaatgtgagaaatccttcagtgggaaattacgccttcttgtacaccagagaatgcacacaagagagaaaccatatgaatgcagtgagtgtggaaaagccttcattaggaattctcaactcattgtacatcaaagaactcattcaggagagaaaccctatgggtgcaatgaatgtgggaaaaccttctctcaaaaatcaattctcagtgcacatcagagaacacatacaggagagaagccttgtaagtgcactgaatgtgggaaagccttttgttggaagtcacagctcattatgcatcagagaactcatgtagatgacaaacattgataattttacgaaactctgaaaagtggattcacaagagatagaaacaatcatatataaagagaaactctgtaagtggaatcatcttgtcatcttccagaaaactcatactgaatagaactttatgaatgcacagcatatggaaaggcatccacagaaagctgttctttacatgcaaaaagatagtagacaatacacaggaaaactgaatttagtaaccactctgaaaatttttagcagcaagtcatacctttttttaaaaagttcatacaggtgaggaaccatgttaaacgttgtaaagtcattttactaacataagattcacaaagaggaaacttcatgaaccagatgaatatagaatagacttctttgaaattcatagtttacagaattttaatgagagaaattattgagctaatgaatggcagaattaacaaaattacaaacattttatgtatcggaagcatataccttggagggaccatgctatgagggaaagtgtaaatctagaaatgagaaacccctagggaaaaaatatatataggagtgaacatcttatgaatgtaccaaataaaccacagctggactgttaacctcaccttagaagcttctttct

SEQ ID NO: 98140 - DNA, 3725 bp, Homo sapiens
ccggcgcgggagtaactcctcgcagaggcctctgggagttgtagtttttttgcctttgcctctccatgacgcaattcctgtgcgacatacgtagcggccgccattgttccgcgccgatggcgagatccttgttcctcagatagcgttcatcgcccgtcgtggtcaacgggccagccgagtctggagtggttgcgaacccttctggctgcagatctggaggtggaggcagtaccctggactctattctgctgccccttcagggtttggaggagccggagcatccctcgcgtcctgtcacttccagcgaggcacacaaaactgaccgtagggatggccaccagggtccggacagcttctatttgggtcccacctctccaagaacgaaacagttcatgggataggatcagaaagctccaaggtcaggaatccatcttgggccaagggactcctggtctgcaacctctccctggaacacccaggcagaagcagaagagtcgcagaatagagaaagtcctagagtggctgtttatttcccaagagcagccaaaaatcaccaagtcctggggacctttgtcattcatggatgtgtttgtggattttacctgggaggagtggcagctgctagacccagcacagaagtgcctgtacaggagtgtgatgttggagaactatagcaacctggtgtccctagggtaccaacacaccaaacctgatatcatcttcaagttggaacaaggagaagagctgtgtatggtgcaggcccaagttccaaatcagacctgtccaattttgaaggctggaaagtccaaagccaaggtgctggcaggtttggtgtctggtgagggcctgctctgtgcttccaagatgacgccttgttgctgcatcctctggagacacagtctggaaaattgatgatcttatggattggcatcaggaaaataaagacaagctgggaagtacggcaaaaagctttgaatgcactacatttggaaaactatgtcttcttagtacaaagtatctttcaagacaaaaacctcataaatgtggcacgcatggaaagagtttgaaatatatagatttcactagtgattatgctagaaataatcctaatgggtttcaggtacatggaaaatcattcttccattctaaacatgagcaaactgttattggaataaaatactgtgaaagtattgaatctggaaaaaccgtcaataagaaatcgcaacttatgtgccaacaaatgtatatgggcgaaaaaccctttggatgcagctgttgtgagaaagccttcagcagcaagtcataccttctagtgcatcagcaaactcatgccgaagagaaaccctatggttgtaatgaatgtgggaaagacttcagtagtaaatcatacctcattgtacatcagagaattcatacaggagagaaactacatgaatgcagtgaatgcaggaaaacattcagtttccattcacagcttgttatacatcagagaattcacacaggtgagaatccctatgagtgctgtgaatgtgggaaagtcttcagtaggaaagaccagcttgtttcacaccagaaaactcattcaggacagaaaccatatgtgtgtaatgaatgtgggaaagcttttggtttaaaatcacagctcattatacatgaaagaattcatacaggagagaaaccatatgaatgcaatgaatgtcagaaagcctttaatacaaagtcaaaccttatggtacatcagagaacccatacaggggagaaaccttatgtttgtagtgattgtggaaaagcctttacattcaagtcacagctcattgtacatcaggggattcacacaggagtaaagccctatgggtgtattcagtgtggtaaaggattcagtttgaaatcacagctcattgtacatcagagaagtcacacaggaatgaaaccttatgtatgcaatgaatgtggcaaagccttcaggagcaagtcataccttattatacatacaaggactcatacaggagaaaaactccatgaatgcaacaattgtgggaaagccttcagttttaaatcacagctcattatacatcagaggattcatacaggagagaacccctatgaatgccatgaatgtgggaaagccttcagtcggaaataccagcttatttcacaccagagaactcatgcaggagagaagccttatgaatgcaccgactgtggaaaggcttttggtttaaagtcacagcttattatacaccagagaactcatacaggggagaaaccatttgaatgtagtgagtgtcagaaagcctttaatacaaagtcaaacctgattgtacatcagagaactcatacaggagagaaaccctatagttgtaatgaatgtggaaaagcctttacgttcaaatcacagctcattgtacataaaggagtgcacactggagtaaaaccctatggatgcagtcaatgtgcaaaaacctttagtttgaagtcccagctcattgtacatcagagaagtcacacaggagtaaaaccatatggatgcagtgagtgtgggaaagccttcaggagcaagtcataccttattatacatatgagaactcatacaggagagaaaccacatgagtgcagggaatgcgggaaatcctttagtttcaattcacaactcattgtgcatcagagaattcacacaggagaaaatccctatgaatgcagtgaatgtgggaaagcctttaataggaaagaccagctcatttcacatcagcgaactcatgcaggggaaaagccttatgggtgcagtgaatgtgggaaagcttttagcagcaagtcatacctaattatacacatgagaactcattcaggtgaaaaaccatatgaatgtaatgaatgtgggaaagccttcatttggaaatcactactcattgtacatgagcgaactcatgcaggggtcaacccttataaatgcagtcaatgtgagaaatccttcagtgggaaattacgccttcttgtacaccagagaatgcacacaagagagaaaccatatgaatgcagtgagtgtggaaaagccttttgttggaagtcacagctcattatgcatcagagaactcatgtagatgacaaacattgataattttacgaaactctgaaaagtggattcacaagagatagaaacaatcatatataaagagaaactctgtaagtggaatcatcttgtcatcttccagaaaactcatactgaatagaactttatgaatgcacagcatatggaaaggcatccacagaaagctgttctttacatgcaaaaagatagtagacaatacacaggaaaactgaatttagtaaccactctgaaaatttttagcagcaagtcatacctttttttaaaaagttcatacaggtgaggaaccatgttaaacgttgtaaagtcattttactaacataagattcacaaagaggaaacttcatgaaccagatgaatatagaatagacttctttgaaattcatagtttacagaattttaatgagagaaattattgagctaatgaatggcagaattaacaaaattacaaacattttatgtatcggaagcatataccttggagggaccatgctatgagggaaagtgtaaatctagaaatgagaaacccctagggaaaaaatatatataggagtgaacatcttatgaatgtaccaaataaaccacagctggactgttaacctcaccttagaagcttctttct

SEQ ID NO: 98141 - DNA, 812 bp, Homo sapiens
ccggcgcgggagtaactcctcgcagaggcctctgggagttgtagtttttttgcctttgcctctccatgacgcaattcctgtgcgacatacgtagcggccgccattgttccgcgccgatggcgagatccttgttcctcagatagcgttcatcgcccgtcgtggtcaacgggccagccgagtctggagtggttgcgaacccttctggctgcagatctggaggtggaggcagtaccctggactctattctgctgccccttcagggtttggaggagccggagcatccctcgcgtcctgtcacttccagcgaggcacacaaaactgaccgtagggatggccaccagggtccggacagcttctatttgggtcccacctctccaagaacgaaacagttcatgggataggatcagaaagctccaaggtcaggaatccatcttgggccaagggactcctggtctgcaacctctccctggaacacccaggcagaagcagaagagtcgcagaatagagaaagtcctagagtggctgtttatttcccaagagcagccaaaaatcaccaagtcctggggacctttgtcattcatggatgtgtttgtggattttacctgggaggagtggcagctgctagacccagcacagaagtgcctgtacaggagtgtgatgttggagaactatagcaacctggtgtccctagggtaccaacacaccaaacctgatatcatcttcaagttggaacaaggagaagagctgtgttttgggtggcaaaggccccaagtttccaaaattaagaacccttgttcccaaatttttggaaa

SEQ ID NO: 98142 - DNA, 3893 bp, Homo sapiens
ccggcgcgggagtaactcctcgcagaggcctctgggagttgtagtttttttgcctttgcctctccatgacgcaattcctgtgcgacatacgtagcggccgccattgttccgcgccgatggcgagatccttgttcctcagatagcgttcatcgcccgtcgtggtcaacgggccagccgagtctggagtggttgcgaacccttctggctgcagatctggaggtggaggcagtaccctggactctattctgctgccccttcagggtttggaggagccggagcatccctcgcgtcctgtcacttccagcgaggcacacaaaactgaccgtagggatggccaccagggtccggacagcttctatttgggtcccacctctccaagaacgaaacagttcatgggataggatcagaaagctccaaggtcaggaatccatcttgggccaagggactcctggtctgcaacctctccctggaacacccaggcagaagcagaagagtcgcagaatagagaaagtcctagagtggctgtttatttcccaagagcagccaaaaatcaccaagtcctggggacctttgtcattcatggatgtgtttgtggattttacctgggaggagtggcagctgctagacccagcacagaagtgcctgtacaggagtgtgatgttggagaactatagcaacctggtgtccctagggtaccaacacaccaaacctgatatcatcttcaagttggaacaaggagaagagctgtgtatggtgcaggcccaagttccaaatcagacctgtccaattttgaaggctggaaagtccaaagccaaggtgctggcaggtttggtgtctggtgagggcctgctctgtgcttccaagatgacgccttgttgctgcatcctctggagacacagtctggaaaattgatgatcttatggattggcatcaggaaaataaagacaagctgggaagtacggcaaaaagctttgaatgcactacatttggaaaactatgtcttcttagtacaaagtatctttcaagacaaaaacctcataaatgtggcacgcatggaaagagtttgaaatatatagatttcactagtgattatgctagaaataatcctaatgggtttcaggtacatggaaaatcattcttccattctaaacatgagcaaactgttattggaataaaatactgtgaaagtattgaatctggaaaaaccgtcaataagaaatcgcaacttatgtgccaacaaatgtatatgggcgaaaaaccctttggatgcagctgttgtgagaaagccttcagcagcaagtcataccttctagtgcatcagcaaactcatgccgaagagaaaccctatggttgtaatgaatgtgggaaagacttcagtagtaaatcatacctcattgtacatcagagaattcatacaggagagaaactacatgaatgcagtgaatgcaggaaaacattcagtttccattcacagcttgttatacatcagagaattcacacaggtgagaatccctatgagtgctgtgaatgtgggaaagtcttcagtaggaaagaccagcttgtttcacaccagaaaactcattcaggacagaaaccatatgtgtgtaatgaatgtgggaaagcttttggtttaaaatcacagctcattatacatgaaagaattcatacaggagagaaaccatatgaatgcaatgaatgtcagaaagcctttaatacaaagtcaaaccttatggtacatcagagaacccatacaggggagaaaccttatgtttgtagtgattgtggaaaagcctttacattcaagtcacagctcattgtacatcaggggattcacacaggagtaaagccctatgggtgtattcagtgtggtaaaggattcagtttgaaatcacagctcattgtacatcagagaagtcacacaggaatgaaaccttatgtatgcaatgaatgtggcaaagccttcaggagcaagtcataccttattatacatacaaggactcatacaggagaaaaactccatgaatgcaacaattgtgggaaagccttcagttttaaatcacagctcattatacatcagaggattcatacaggagagaacccctatgaatgccatgaatgtgggaaagccttcagtcggaaataccagcttatttcacaccagagaactcatgcaggagagaagccttatgaatgcaccgactgtggaaaggcttttggtttaaagtcacagcttattatacaccagagaactcatacaggggagaaaccatttgaatgtagtgagtgtcagaaagcctttaatacaaagtcaaacctgattgtacatcagagaactcatacaggagagaaaccctatagttgtaatgaatgtggaaaagcctttacgttcaaatcacagctcattgtacataaaggagtgcacactggagtaaaaccctatggatgcagtcaatgtgcaaaaacctttagtttgaagtcccagctcattgtacatcagagaagtcacacaggagtaaaaccatatggatgcagtgagtgtgggaaagccttcaggagcaagtcataccttattatacatatgagaactcatacaggagagaaaccacatgagtgcagggaatgcgggaaatcctttagtttcaattcacaactcattgtgcatcagagaattcacacaggagaaaatccctatgaatgcagtgaatgtgggaaagcctttaataggaaagaccagctcatttcacatcagcgaactcatgcaggggaaaagccttatgggtgcagtgaatgtgggaaagcttttagcagcaagtcatacctaattatacacatgagaactcattcaggtgaaaaaccatatgaatgtaatgaatgtgggaaagccttcatttggaaatcactactcattgtacatgagcgaactcatgcaggggtcaacccttataaatgcagtcaatgtgagaaatccttcagtgggaaattacgccttcttgtacaccagagaatgcacacaagagagaaaccatatgaatgcagtgagtgtggaaaagccttcattaggaattctcaactcattgtacatcaaagaactcattcaggagagaaaccctatgggtgcaatgaatgtgggaaaaccttctctcaaaaatcaattctcagtgcacatcagagaacacatacaggagagaagccttgtaagtgcactgaatgtgggaaagccttttgttggaagtcacagctcattatgcatcagagaactcatgtagatgacaaacattgataattttacgaaactctgaaaagtggattcacaagagatagaaacaatcatatataaagagaaactctgtaagtggaatcatcttgtcatcttccagaaaactcatactgaatagaactttatgaatgcacagcatatggaaaggcatccacagaaagctgttctttacatgcaaaaagatagtagacaatacacaggaaaactgaatttagtaaccactctgaaaatttttagcagcaagtcatacctttttttaaaaagttcatacaggtgaggaaccatgttaaacgttgtaaagtcattttactaacataagattcacaaagaggaaacttcatgaaccagatgaatatagaatagacttctttgaaattcatagtttacagaattttaatgagagaaattattgagctaatgaatggcagaattaacaaaattacaaacattttatgtatcggaagcatataccttggagggaccatgctatgagggaaagtgtaaatctagaaatgagaaacccctagggaaaaaatatatataggagtgaacatcttatgaatgtaccaaataaaccacagctggactgttaacctcaccttagaagcttctttct

SEQ ID NO: 98143 - DNA, 1520 bp, Homo sapiens
ccggcgcgggagtaactcctcgcagaggcctctgggagttgtagtttttttgcctttgcctctccatgacgcaattcctgtgcgacatacgtagcggccgccattgttccgcgccgatggcgagatccttgttcctcagatagcgttcatcgcccgtcgtggtcaacgggccagccgagtctggagtggttgcgaacccttctggctgcagatctggaggtggaggcagtaccctggactctattctgctgccccttcagggtttggaggagccggagcatccctcgcgtcctgtcacttccagcgaggcacacaaaactgaccgtagggatggccaccagggtccggacagcttctatttgggtcccacctctccaagaacgaaacagttcatgggataggatcagaaagctccaaggtcaggaatccatcttgggccaagggactcctggtctgcaacctctccctggaacacccaggcagaagcagaagagtcgcagaatagagaaagtcctagagtggctgtttatttcccaagagcagccaaaaatcaccaagtcctggggacctttgtcattcatggatgtgtttgtggattttacctgggaggagtggcagctgctagacccagcacagaagtgcctgtacaggagtgtgatgttggagaactatagcaacctggtgtccctagggtaccaacacaccaaacctgatatcatcttcaagttggaacaaggagaagagctgtgtatggtgcaggcccaagttccaaatcagacctgtccaattttgaaggctggaaagtccaaagccaaggtgctggcaggtttggtgtctggtgagggcctgctctgtgcttccaagatgacgccttgttgctgcatcctctggaggtgaggaacactgtgggacagaaagaggggcaaaaaaggcctaagatcattccctcaagcccttttagaaacgactaatccattcatgagggcacaacttaatcttctcttaataccaccacaatggggagtaagtttcaacatgagttttagaggggacacattcaaaccttaataacttccattcggaagattgaagctcttttcctctactggtaattgatagccatactgatcttttatctgccctttggtcctggttttgattgattcactggcatctccctcataccactccctggcctcgttttcagaaactggaatcgtctctcccactgctccacctacataccaccttcttttcatctttcttctctttgtttatcctgttttttaaattctaattttgtatttttagacagggtttcaccatgttgatcaggctggtctcgaactcctgacctcaggtgatcccgcctcagcctcccaaggtgctgggattacaggcatgaaccactatgcccggccaaccctgtctctttaaaaaaaaaaaaaaaaaaggccaggtgtggtggctcatgcctgtaatcccagcactttgggaggctgaggcaggtggatcacgag

SEQ ID NO: 98144 - DNA, 329 bp, Homo sapiens
attccttatgcttgtttcacttggttgagaatggtgctacagctcagcttgcacatcctcacaccgactcccaaacgagaagaaagaatcaaaggctttctctttacaaggctttgatcttttattcaggaggcatctttctaagctctccagacaacatttcctgatgtctccctgggcagagctaggacagggctgcaaaggagcctgggccaataggcagctggccaagggagttaggggtgctatgtgaacctagtccagtcaagattcatcccttgggaccggacacggtggctcacgcctgtaatcccaccactttgggaggc

SEQ ID NO: 98145 - DNA, 321 bp, Homo sapiens
tatagtaggagctcagtaactgtttggtcggttggtcctgccttctgtctgattcccttccttgtcctgagctcaaactcatttctccagctgcttgctggacatgtcacctgagccacctcagttaaaaatcttatctctaaaatgtttctgagttcctcccccattttcctccatctttctgtcgtcattatctcttgcctgcattattagaattacttcctaactggactccccccttactggtctctcacttgctggtgcacacttggcactgctactcaggagatctttctaacccacagccatctgatcatgtta

SEQ ID NO: 98146 - DNA, 279 bp, Homo sapiens
tcataattacttatttaaaatttgttgccatttaatttctgttcctcttagcttagtaactttaggatttttaaataacaactattgaaatcatgccctcgaggtgttacaacctattttggtaaaacgttaggactacaaaccttttaaattttttaaaaaatagatgagtgtggtggctcatgcctgtaatcccaacactttgggaagccgggtcgggaggatagcttgagtccagcagtttgagaccagtcagggcaacacagcaagaccccatat

SEQ ID NO: 98147 - DNA, 330 bp, Homo sapiens
gctctgttcctggtaagtgcccagtacaggtgtgccattttttatcttttataccatatttttactgtacctgttctatgtctaaatatgtttaggcacacaaatactcaccattgtcttacaatggcatttagcattcggcacagtaatgctgaggtgtgtagcctgggggcaataggctacaccatatagcctgggtgtgtagcaggccttacagcctgcatgtgtataactgtactcttggatgttcacacagtgacaaaattgcctgatgacgtgtttctcagaacacatctgtgttattaagtgatgcctgactgtaaaatctcc

SEQ ID NO: 98148 - DNA, 338 bp, Homo sapiens
atactataataaattgccatcaccatccccttcctcactgtggatcaaagccttggagtgcttgatgaaaatttattagacctctgcccactgattcccacctggctgctcacagcacccttggccagcattgccttgagctggctggagacggacactctgatgactaacagctgggtgtctcagacaagccgtctctacctccagcatccacgggctaactctgcttgctttcctacttctcttttcttatcttacacttaggtcttttggtcaattcatggcagaggctgccaaggatgtcaaaaacaagacgtgggggcaaaggggtgggtgtg

SEQ ID NO: 98149 - DNA, 937 bp, Homo sapiens
tgagaatgcgacggggcgacagcttcctgtcttttccagtggcttttggcatccccagaggaaaaaacggggagacccgctttggcctcaggaagcgcagaaacactgtcctggctgcgcgcgcaagggcgagaacctaggggacccgcctaaagcgccgttggggctgagcaccgaactcgcacagctccgggcagcgacccgcgatgcggcatccttccgtccggtcggagccctcctagccctcagcgcgtctattcctagcttcggtccccgcaaccatataagcaatgacaccctcgccgactcgcctgccagttggcctgcttcccctcactcctcgggccttgctcttcccccaggtgcccactgccctccctgctgtgtaccactttcttgctgcctgtgaaggtatttgtcctcactcttgtgctgctccttcaatgatagaactttgggactttctcatccagcagcaccagcctgaaaaagcagtggcttgcaccaccacacacatacctggtctcagatatcagctccatgagaacaggcaccttgtttaccttgtccatggatacagaacagtgcctagtgctcactaaatgaacagtgagtgaataagtgagtgtcgacgtcggctaaggtgaaccttcagatgagcttgctaatgcagatttgtggacgatgtagagcaaagcgaggacgtctgaacgaattccgagtagtttggaagatgggtgccagaaggatggccggaaagcatgtcaggggcgatgtgcggcgcaaaggtatccaacgcaagagtacaggagtaggcacgactggggcaagtggcagaggagcctgaggcagaactggcgaagcccgcaaacggtgaggactccggaaccaaacaaccggattgggccaaggggtgaaaacacaaggcggcgccacg

SEQ ID NO: 98150 - DNA, 385 bp, Homo sapiens
tgagaatgcgacggggcgacagcttcctgtcttttccagtggcttttggcatccccagaggaaaaaacggggagacccgctttggcctcaggaagcgcagaaacactgtcctggctgcgcgcgcaagggcgagaacctaggggacccgcctaaagcgccgttggggctgagcaccgaactcgcacagctccgggcagcgacccgcgatgcggcatccttccgtccggtcggagccctcctagccctcagcgcgtctattcctagcttcggtccccgcaaccatataagcaatgacaccctcgccgactcgcctgccagcttggccgcctccctgcagagggctgacgcttctccagaagttgtaagaaaaggagggaaagcaggc

SEQ ID NO: 98151 - DNA, 342 bp, Homo sapiens
gagagagccattaagattcttttatcctgctgcctgcctgagtattctgggaatcctacaaggatttgagggagcccttgggattccaacctaacaaattagttttctgtaatattgttctagtccatttagattgtgtaaatgatctaaatggtgtaaccatttaatatcaaaagtataacagcatttaagtcagcttttcgaagaaacttttattttttaactaaaaacaaactttttttcagagacaaggtctcactatgttgcccaggctggacatgaactcctgggcttaagacatcctcctaccctagcctcctgagtagctgggactgtgggcac

SEQ ID NO: 98152 - DNA, 723 bp, Homo sapiens
ctcgggacgaagttctcggacagagaacaagtgcgctcctgtcgtacgaagtacgtgaagctgcagaggccaaaaaacacgccgagcccttggggatgcggtttgattttaaagttgctgccgtgtcgccccgacttcgcagtttagcagtgcccagtaagatagaagaggacctgccttgcagccagctagactgtcagtttttattggagacattgtcatgacggccatcagaagggttgctattcgtccaaagtgaaaactaagcacagttctcaaaatgcgcggaatagggaagatgaattcaatattaagttatgtatttacaaacatatttaagcccattttgcagcggccaaaatacgggagcaaggcaccaacagcaccattaaggcagtgtaggtggacttaatggtggtgttgtattattcttgtttctcaaatcataggagatgacatttgttcctgtgacattctcaaactaaatgtaaagtggttggagcgaggtgagtgacttgggagttcatctgtgtgagattttggcttaacacatgttctgccaaaatgggcaggtcgtctcagatgagggagggaacttcagattagcacccacagaaaggaggctttcacccagcttcttgcatggatttagttaccactttgttttcatgtggtctggactgtaaggagggcaggaggcttagcagtgctatagtgtagaat

SEQ ID NO: 98153 - DNA, 153 bp, Homo sapiens
tatggtggggttacgtccagataaacctgttgtaaattaatgatctcataagtcagaagttcatttgatacttcatttgatatcataggatacttctctttgaaaactgaagagcattccgagtgtgtaccactttggcgcaattataaagtc

SEQ ID NO: 98154 - DNA, 815 bp, Homo sapiens
cagaaccaccgggttggttgccgtctgagctgtgcctcctcgtcaccgccaccgctatgcctggaggtcggcttcttggggacgtggctcccaactttgaggccaataccaccgccggccgcgtccgtttccaggactttctgggaaactcactgggcattctcttctcccaccctcgggactttaccccagtgtgcaccacagagcttggcagagctgcaaaactggcaccggaatttgccaagaggaatgttaagttgattgccctttcttttttctttctttttctttttctttttttgagacggagtcttgctctgtcgcccaggctggagtgcagtggtgcactcttggctcactgcaatctcggctcactgcaatctctgcatcctgggtttaagcaattctcctgcctcagactcctgagtagctaggactacaggtgtgcgacaccacgcccagctaatttttgtatctttagtagagatggggtttcaccatgttggtcaggctggttttgaactcctgacctcgtgatctgcccacctcagcctcccaaagtgctgggattacaggtgtgagccaccacacctagcggattaccctttcgatagaccgtgttgaggaccgtcttgcctggagcaaggatatcaatgcttacaatggtgaagaatccacagaaaagttaccttttcgcatcatccatgataagaatcgggaccttttcatcctgttgggcatgctggatccagcggagaaggatgaaaaggacatgcctgtgacagctcgtgtggtgtttgttattggtcctgata

SEQ ID NO: 98155 - DNA, 230 bp, Homo sapiens
tttttcttttgcaaggttattaattattgattcaaatatttcaatggatgtaggcctagtcagattacgtatttcttcttttatgagtttttgaaggttgtgcttttcaagtaattggcctttttcatttaaattatcaaatttgagagcatcaatttattcacatatttctttattatttgtttaatgttcatggaatctatggtgatgttccttctttaattttgaca

SEQ ID NO: 98156 - DNA, 424 bp, Homo sapiens
tggagaagttaagctttgaggcccagggagccaagacaaagtccaattccagagtctatgccttggctacagtgcattctatcctgcctacctttcctcttccctccttgcaccccaggtcccctcagatgctgctggagaattccagaggcctgctgggctgcaccagcgtcagcatgtgggttgggtttccatagcccagtgggacccccaggcctctcagcctctcaggttccatggccaggccaagagagggggcctgggggtccctgcagacccagagctccccctgtgtccctgggacagactggctggtggagaaagttccccctcttctcaagtgcctgagtttcctgcacttcagggaaaggactctatcccaaagatgtcctttcagagcacagaagagattgccctagacctg

SEQ ID NO: 98157 - DNA, 439 bp, Homo sapiens
gtctagaggatccgtgtcatcccccttcgtctctatgaatttgacatctctaggtaactcacataagtgggatcagagagtatttgtctttttgtgtctggctgacttcacctagaatagcgtccacctagcaggacatccatgtagcacgtgtcagaatctccttccttctgaagatggaagaatatttcatggcaaggccaccttttaaagtggggctctagggctgggttgacggggttcttggccagaatatgcagtgaggaaggagtccagaagcctgtgccacccacttgctggtgaccctaaaaaaaacgctcaactctgagctaatatcacctgccctgcctttctcagagtcagggtgaggctctgatgaggtcccaggcagctgctgcaaggaatgggaggggacagtattgctgaccccggttgaccc

SEQ ID NO: 98158 - DNA, 289 bp, Homo sapiens
  misc_feature (9)..(9): n is a, c, g, or t
  misc_feature (18)..(18): n is a, c, g, or t
cccaatgtntgggctggnattggccccaggttttccccctagggttttcatagtgtggggttttatttatttatttatttatttatttatttatttattttatttttttgagacacagtctcactctgcactctagcctgggcaacagagcaagaccctgtctcataaaaaaataaaaaagaaagaaagcagctagatctgcccaggtagggacaagaaacttttccagttaagattatatttgatctgggtcttgatagaaagataagtttaggagtttactaagctg

SEQ ID NO: 98159 - DNA, 160 bp, Homo sapiens
gacagtccagccaattatggaagcacttagagatgcaacaaggagacgcacctttgccctggtctctcaagcatatacttcaatcatcactgatgattttgcagcctttgttggacttcctatagaagaggctgtgaaaggcttattagaacaaggatgg

SEQ ID NO: 98160 - DNA, 767 bp, Homo sapiens
aatccttgagtacagcataatcctgctgctaatggacatcatctaggctcacaaaacagcaatttatatgtgttttaaagtttgtgattttcttatatttttgctacaatagataaaactttttttcctgaactatattctggaaaaatagcatatttttggccagtagataaggttatatactcaattcactacatggcttactaactaaacacactatattctggaaaaatagcatatttttggccagtagataaggttatatactcaattcactacatggcttactaactaaacacacttctatgaatctgatattaaagcctgaggtggcattataaaaataacccctaatattctcagctgtttcccacacagtgtcaatctatccaacatattaggccactgacaattccttcacagttgtttaatatgcatgacatttttatgatagaaaagatttttcaagtttaagaggtgtattctctgtatgtgtacatttgtgcattcctacatagaacttatgtaatacagcagactagataacctgaaaaacctctcactacaaaaccagttacactgtgcagaatatgaaacagcatgcaaagaagagctttgaaaaaaagtaaaggaaatcccagtgcttaataaaaagagactaaaaggcataaaaccagaaaattaaacatattgtaatggtaatacaagaactggagacaaagcctgatcttgcaggagccaggtgttggaactgagaccttacataa

SEQ ID NO: 98161 - DNA, 104 bp, Homo sapiens
agacacaacagacacagcatggtcagtgctgtgggagaagaggccccagcaggggatggagcttctcagtcttggacgagaacctgggcacagctgtatgcacg

SEQ ID NO: 98162 - DNA, 857 bp, Homo sapiens
agcggatatcatttcctttccctttcagtttataccttgtgatccctccagcccattcatactcttgccactaccccagtccttttgtttactagtcttgcaaaggctaagctcacaataagtcaaaccattttactcttcactctcaatccaggatgctgacttaagatacaagaaagaaggggggctgttgatgggtgcaaggaaacatgggttgagagagtaacaagtgggctgagggtccaattgtgattggaaatgtaaatgtgtcaagacaccaactcacatggttgtgtgatttcctccagtgacccagggtaggagtacagtgaccaaatggttggatttagggccttgcagtagaggtgaatggaatgataagacaacgaaggaactgagatagacggaagcaaagggccatagtagtatctaaattgaagaggaaagggagtaaaagcataacttctgttgggcctagtatgtacactgtatccatctactttctttttctttatttggggtatatgagaacctggcacagtgttaataagacccaagtgttcagaagagaatgcaagccaggctaatgaaggtggcaggaatagcaccatctctcctggaccattcaccacacacaaatgtgactgcggtgacatggagatctaaaatgatctaatgcagccagttggtaagggctcaaggctagatttcatctttcagggtaatgagatgtagcatcagtaattgagagtgcaggcttgaaggcagggggctacaatccaagaacaccaggggattcctgaaacctcagatagtactgaacactatatatactaggttttttcctatacatacat

SEQ ID NO: 98163 - DNA, 382 bp, Homo sapiens
tagcagagtgtcctccctgaaaggagactatccagaatgaagtctacctgagcctcctggcagcccaggctccatagccctgctccctcctctgcacaagcctgatctgatttctgagggcgatacctctatgccaaagcagttcaggcttctacatctcttgcctgggttacaacagtttcctcactattcgccctgtctctgttctagtttctttcaaactcatcctctaccaagcagtgagtacaatttttctaaaattcaaatctgggccaggcacagtggctcatgcctgtggtctcagctatttgggaggctgagcctgggaggtggaagctgcagtgagccatgatcttgccactgaagtccagcctgggtgaca

SEQ ID NO: 98164 - DNA, 554 bp, Homo sapiens
tgtgatgtaattattttgtaaatgtggaggggacgacaactggggaaaaggtgtgggcatgatttgttagattctcatctgccataaatgaaagtcaatgcataatgtctcaaattgataagccatgaaatatccataacgcttactgtttagaaacacgaaagtagatcccagaagaaaacaattaaaaacaataaaaaaaaagtttgcttctggggagtagatctcaaaggtggtagggaattttttttttcattataagcactgtagcaccaacttacatttaaattcatgcatactattttaatagaaaaaaatgtcaaggacaattgggaaggtaagaagtagccatcgtgaatctaaacagctttctcaagaattttgacaatacaggaaaagaaataatatctgatacatatgtagccttaacattagctaggtaccattctgaacgctttaggtatattaactgtttaatcctcgtctcaaacctatgaagtaggtactgttactggccccattttacagatgaggaaacagttctcacagctagt

SEQ ID NO: 98165 - DNA, 234 bp, Homo sapiens
caaaaatctccataaaccacttacttaaaatgccattatgtccctattcatagtaggctctcaacaaatatttgtacaacgtaataatgactggtgaaataaaggaagcatgtgtgaaccagtatatatttttaaaaaattgtagtaaaattctgggatatattttcctcataaacgatttattcttaagttttatatattaaagatccaaaattcagaatgtgaagggggcta

SEQ ID NO: 98166 - DNA, 285 bp, Homo sapiens
agcaacgagcctagctgtgtaggctcggcagcggccccaggtgtcagaagcagacaagcactaaatcaagctactggtagctgatcccactgcagaggcctaacccccagaggcagagtaagaaggatgctgaagatgagcaggctgtggtggcacggcagtccacagtgtcatcaggaataggcaccttctctctctatctgccacccttagcaagtgactccgtcttggcgtgcaccagacggcacctctgcagtggtgttccaggtctgagccagggaagga

SEQ ID NO: 98167 - DNA, 498 bp, Homo sapiens
aaaatgaaataaaatgtaaaattattggccaagtgcggtggctcacacccgtaatcccagcattttgggaggccgaggtgggtggatcaattgaggcccggagtttgagaccagccctggcccaacatggtgaaacctcgtctctacaaaaagatacaaaaagtagcccaggtatcatggcacatacatgcagtcccagctactgaggaggctgaggtaggagaatcgcttgaatccaggaggcggaggtttcagtaagctgaaatcatgccactgcactccagcctgggcgatagagtgagactccatcttaaaagaaaaataaataaataaaattatttatatattctatagcatataataatggtaaattagtgttagctattactaacttcagtcctctggcacatagaagtgcccagcctattttgttgaatgagtgaatgaatgatggtgaatatacctctaagcaatctgagccttagactacatgaccat

SEQ ID NO: 98168 - DNA, 138 bp, Homo sapiens
ggcagggctctcaagccaaataactctacacacacatacacacacacacacacaaacgctgctttttagtttataaaatattttatggaaattgtctgattcaaattgtctaaatcatgttcctgaactaatattcca

SEQ ID NO: 98169 - DNA, 249 bp, Homo sapiens
tcggacagtggtgtgccagtaaatgtttaacaaccagctctctggaaagaagagctctgacttacagcctttgccaattgccgtggtttaaatactcctatcatggttgagttcaagctaccaacatgacatcaccgaatacagaggagaagaggtgcgtaatcaacagcacaagcatcatgtagtatttacacacagggacaataaagtatagataatagtaaaatgaaataaaatcattagaaaatg

SEQ ID NO: 98170 - DNA, 731 bp, Homo sapiens
ttgttgatgaattttttaataaacttttgattcactatttagaatacatttatttctaccagacctcagtgggaaattaacccaatatatcattttaatgaatttatgactataatcgtatatatgctctttacgaactataaattcaatatatataatgcaatataaatgtaatatgaaaattcaattttcagtataagtttatttggtttgtgcaataactactaaattctagagatatcacagaataaactgttccactaggcattttatttttcttatctttcagtcactggagtttaaatgagtagcaagtaaattgcaaataattatttttcaatagcttttgggtacaagtgtttttggttacgtgaatgaatcatatagtgctgaagtctgacattttttagcatttaaaacattaaatttacctgattaacataaagatttggcattaaacaaagacccttataaataatcccactattttattagcagtacataaaaatgtgcatcaagacatcttgatgtcaggtgcagtggctcaagtctgtaatcccagcactttgggaggccgaggcgggcagatcacaagttcgagaccagcctggccaacatggtgaaaccccatctctacagaaaatacaaaaattagctgtgtgtggtggtgggcacctgtaatcccagctacttgggaggctgaggcaggagaatcgcttgaacccagaagg

SEQ ID NO: 98171 - DNA, 232 bp, Homo sapiens
gcatagctcaacactgatcaaggatggtggtcttcagcccttattatggttccatcagcctttgaccgttttttccttggctcttcaattacatatgggactcgaggtctaaactgaccctcatctcattttcccaaagtcaaagttgctgcaagatcttgctaataaaacattggctaagcaatgtgctatcacgcagtgtcatctttttatttaacacaacttggctttt

SEQ ID NO: 98172 - DNA, 437 bp, Homo sapiens
aaaggcagctcagagtcttattgcccaaggtcacgtcacacagcctgcaatttttgattttcttattttttagttttgggggtgcataggtgtatatatttatggggtacctgagatgttttgatataggcatgcaatgcataacaatcacatcatgaaaaatggggtatctatccccttaaacatttctcctttgttacaaattatacacttttatttttaaatgtacgattaaattattattgactatagtcgccctgttgtgctgtcaaatagtgggtcttattcattatatttttttgtatccattaaccatccccatccccaccccagtacccttcccagtctctggtaaatcttctactctatctatctccatgagtccaattgttttgttagttcccacaaataagcgagaacatgcgaagtttgtcttt

SEQ ID NO: 98173 - DNA, 460 bp, Homo sapiens
agtgttctcttttctctgcagccttgctggcatctgttggtttttgactttttgttagttgccattctgactgatgcgagatggtatctcattgtggttttgatttgcatttctctgatgattagtgatgttgagcattttttcatgtttgttggccacttgtccatcttcttttgagaagtgtctgttcatgtcttttgcccattttttttttgaaacagggtctcactctgtcacccagggtggagtgtagtggcacaatcttggctcactgtagccttgacctcctgggctgaagcagtccttctatctcagcctcctgagtgagtagctaggactaaaggtgcacaccaccatactcagctaattttgtttatagtttgtagagatgaagtctcattatattgccctggccggtctcaaactctgggctccagctctcttcctgcgtcggccttcc

SEQ ID NO: 98174 - DNA, 541 bp, Homo sapiens
cgtctcgctgaggtcgatcctttacggcaggcgtccgcgtcgctagctagtcgttctgaagcggcggccagagaagagtcaagggcacgagcatcgggccatgcctttcttggacatccagaaaaggttcggccttaacatagatcgatggttgacaatccagagtggtgaacagccctacaagatggctggtcgatgccatgcttttgaaaaagaatggatagaatgtgcacatggaatcggttatactcgggcagagaaagagtgcaagatagaatatgatgatttcgtagagtgtttgcttcggcagaaaacgatgagacgtgcaggtaccatcaggaagcagcgggataagctgataaaggaaggaaagtacacccctccacctcaccacattggcaagggggagcctcggccctgaacagagcagctgctgatgtctggaggctgattttcctgttctctgttctccactggaaaggttgtttacgacaaacctccttgtcaaagtgtgtaaaaataaaggattgctccatcctaa

SEQ ID NO: 98175 - DNA, 525 bp, Homo sapiens
aacttaggcagtgcgaggctgggtgaatcggccgaggcttgggagcggcggccagagaagagtcaagggcacgagcatcgggccatgcctttcttggacatccagaaaaggttcggccttaacatagatcgatggttgacaatccagagtggtgaacagccctacaagatggctggtcgatgccatgcttttgaaaaagaatggatagaatgtgcacatggaatcggttatactcgggcagagaaagagtgcaagatagaatatgatgatttcgtagagtgtttgcttcggcagaaaacgatgagacgtgcaggtaccatcaggaagcagcgggataagctgataaaggaaggaaagtacacccctccacctcaccacattggcaagggggagcctcggccctgaacagagcagctgctgatgtctggaggctgattttcctgttctctgttctccactggaaaggttgtttacgacaaacctccttgtcaaagtgtgtaaaaataaaggattgctccatcctaa

SEQ ID NO: 98176 - DNA, 497 bp, Homo sapiens
gcgcttctgccagcggcggacctataacctgtcagggcgcgagcatggggtaggccatgcctttcttggacatccagaaaaggttcggccttaacatagatcgatggttgacaatccagagtggtgaacagccctacaagatggctggtcgatgccatgcttttgaaaaagaatggatagaatgtgcacatggaatcggttatactcgggcagagaaagagtgcaagatagaatatgatgatttcgtagagtgtttgcttcggcagaaaacgatgagacgtgcaggtaccatcaggaagcagcgggataagctgataaaggaaggaaagtacacccctccacctcaccacattggcaagggggagcctcggccctgaacagagcagctgctgatgtctggaggctgattttcctgttctctgttctccactggaaaggttgtttacgacaaacctccttgtcaaagtgtgtaaaaataaaggattgctccatcctaa

SEQ ID NO: 98177 - DNA, 839 bp, Homo sapiens
  misc_feature (647)..(647): n is a, c, g, or t
  misc_feature (650)..(650): n is a, c, g, or t
  misc_feature (692)..(692): n is a, c, g, or t
  misc_feature (697)..(697): n is a, c, g, or t
  misc_feature (706)..(706): n is a, c, g, or t
  misc_feature (709)..(709): n is a, c, g, or t
  misc_feature (712)..(712): n is a, c, g, or t
  misc_feature (716)..(716): n is a, c, g, or t
  misc_feature (719)..(719): n is a, c, g, or t
cgtctcgctgaggtcgatcctttacggcaggcgtccgcgtcgctagctagtcgttctgaagcggcggccagagaagagtcaagggcacgagcatcgggccatgcctttcttggacatccagaaaaggttcggccttaacatagatcgatggttgacaatccagagtggtgaacagccctacaagatggctggtcgatgccatgcttttgaaaaagaatggatagaatgtgcacatggaatcggttatactcgggcagagaaagagtgcaagatagaatatgatgatttcgtagagtgtttgcttcggcagaaaacgatgagacgtgcaggtaccatcaggaagcagcgggataagctgataaaggaaggaaagtacacccctccacctcaccacattggcaagggggagcctcggccctgaacagagcagctgctgatgtctggaggctgattttcctgttctctgttctccactggaaaggttgtttacgacaaacctccttgtcaaagtgtgtaaaaataaaggattgctccatcctaaaaaaaaaaaaaaaaaaaaaaaacaaaagaaacacccggggggccatcaatgcgcgggggcggggaaaaaaggggatggaaagggcacagggccaaaaggggttccnggnacccaggttttctgggtcacaaggggggaaaactcggcgggnccccnaaaaggggngcnganaaantcnagacgcgggtacctgtagatgcgcacgacaaacagcgccaccacacaaaagaggaactggagcaacagaacattacacctaaacagtaatcagctaaacgacacactaacccggttcaca

SEQ ID NO: 98178 - DNA, 710 bp, Homo sapiens
  misc_feature (4)..(6): n is a, c, g, or t
  misc_feature (11)..(11): n is a, c, g, or t
  misc_feature (30)..(30): n is a, c, g, or t
  misc_feature (38)..(38): n is a, c, g, or t
  misc_feature (50)..(50): n is a, c, g, or t
  misc_feature (537)..(537): n is a, c, g, or t
  misc_feature (539)..(540): n is a, c, g, or t
  misc_feature (547)..(547): n is a, c, g, or t
  misc_feature (558)..(559): n is a, c, g, or t
  misc_feature (572)..(572): n is a, c, g, or t
  misc_feature (574)..(574): n is a, c, g, or t
aggnnntttgnagcccccttcctgtttganttaccgtntcagaagagtcnagggcacgagcatcgggccatgcctttcttggacatccagaaaaggttcggccttaacatagatcgatggttgacaatccagagtggtgaacagccctacaagatggctggtcgatgccatgcttttgaaaaagaatggatagaatgtgcacatggaatcggttatactcgggcagagaaagagtgcaagatagaatatgatgatttcgtagagtgtttgcttcggcagaaaacgatgagacgtgcaggtaccatcaggaagcagcgggataagctgataaaggaaggaaagtacacccctccacctcaccacattggcaagggggagcctcggccctgaacagagcagctgctgatgtctggaggctgattttcctgttctctgttctccactggaaaggttgtttacgacaaacctccttgtcaaagtgtgtaaaaataaaggattgctccatcctaaaaaaaaaaaaaaaaaaaaccccggggncnnctaaggncgggggcgcgnnaaaaagaggaaangnaagggcgcccggggccaaacgggtcccgtgacccagtttcctggggccaaagggggacactcgccggcccccataagggaggcggaataaatccagaaacccgggtaccggttagcctccgaaaaccccaccaaca

SEQ ID NO: 98179 - DNA, 611 bp, Homo sapiens
cgtctcgctgaggtcgatcctttacggcaggcgtccgcgtcgctagctagtcgttctgaagcggcggccagagaagagtcaagggcacgagcatcgggccatgcctttcttggacatccagaaaaggttcggccttaacatagatcgatggttgacaatccagagtggtgaacagccctacaagatggctggtcgatgccatgcttttgaaaaagaatggatagaaaaaaaaaaaaaaaaaaaaaaaaaaaaaactgtgtgggggcgcgcgctggggcgccccggaaaaacgtttctaaagaaccatatcgcggggggcgcgcgcgggggccccaagaaggagaagggcgacactggggccaaaagggggtacctaagaggagaaaccgcgggcaacgagtgaacaagaggcgcggggatttcctccaaccaattaaaaaagaggccgcgggggggacaaacgcagagaggcgttcgcggaacaccaaatctccgcaagagagggaggctcgggggaggacaacatgagaggggacattctctccacagagggagcgtcccaggggagagactgcagaatttcaaatataaggcccggcgtgggggggcaa

SEQ ID NO: 98180 - DNA, 395 bp, Homo sapiens
gaggatccccagggagtgctcgtctttggcagaaaacgatgagacgtgcaggtaccatcaggaagcagcgggataagctgataaaggaaggaaagtacacccctccacctcaccacattggcaagggggagcctcggccctgaacagagcagctgctgatgtctggaggctgattttcctgttctctgttctccactggaaaggttgtttacgacaaacctccttgtcaaagtgtgtaaaaataaaggattgctccatcctaagctggagtgcgacggcatgatctcagcttaccgcaacctccgcctcccgggttgaagcgattctcctgcctcagctgctgagtagctgggattacaggtgtggcatctggcatgaaaccaaaagacgagcac

SEQ ID NO: 98181 - DNA, 743 bp, Homo sapiens
  misc_feature (628)..(630): n is a, c, g, or t
  misc_feature (632)..(632): n is a, c, g, or t
  misc_feature (637)..(637): n is a, c, g, or t
  misc_feature (647)..(648): n is a, c, g, or t
  misc_feature (654)..(655): n is a, c, g, or t
  misc_feature (664)..(666): n is a, c, g, or t
  misc_feature (674)..(674): n is a, c, g, or t
  misc_feature (694)..(694): n is a, c, g, or t
cgtctcgctgaggtcgatcctttacggcaggcgtccgcgtcgctagctagtcgttctgaagcggcggccagagaagagtcaagggcacgagcatcgggccatgcctttcttggacatccagaaaaggttcggccttaacatagatcgatggttgacaatccagagtggtgaacagccctacaagatggctggtcgatgccatgcttttgaaaaagaatggatagaatgtgcacatggaatcggttatactcgggcagagaaagagtgcaagatagaatatgatgatttcgtagagtgtttgcttcggcagaaaacgatgagacgtgcaggtaccatcaggaagcagcgggataagctgataaaggaaggaaagtacacccctccacctcaccacattggcaagggggagcctcggccctgaacagagcagctgctgatgtctggaggctgattttcctgttctctgttctccactggaaaggttgtttacgacaaacctccttgtcaaagtgtgtaaaaataaaggattgctccatcctaaaaaaaaaaaaaaaaaaaaaaaaaaaaaaaaaaaaaaaaaacccggggggcaattttgggggggggggaaaaaggggtttggaagggnnntnggtcnaaggtgttcnnggcccnntttttttgnnnaagggggnaaaattgggggggccccaanaggggggggaaaaaattggaaagcggggtaccgtgttttatttggataa

SEQ ID NO: 98182 - DNA, 752 bp, Homo sapiens
cgtctcgctgaggtcgatcctttacggcaggcgtccgcgtcgctagctagtcgttctgaagcggcggccagagaagagtcaagggcacgagcatcgggccatgcctttcttggacatccagaaaaggttcggccttaacatagatcgatggttgacaatccagagtggtgaacagccctacaagatggctggtcgatgccatgcttttgaaaaagaatggatagaatgtgcacatggaatcggttatactcgggcagagaaagagtgcaagatagaatatgatgatttcgtagagtgtttgcttcggcagaaaacgatgagacgtgcaggtaccatcaggaagcagcgggataagctgataaaggaaggaaagtacacccctccacctcaccacattggcaagggggagcctcggccctgaacagagcagctgctgatgtctggaggctgattttcctgttctctgttctccactggaaaggttgtttacgacaaacctccttgtcaaagtgtgtaaaaataaaggattgctccatcctaaaaaaaaaaaaaaaaaaaaaaaaaaaaaaaaaaaaaaaaaacccggggggcaattttgggggggggggaaaaagggggtaaaaaggggccagggggcaaaggaggcaaaccggaacccaacatcgggggacacaagggggcaaaaatgcccggagaccccatagaagggagacgcgcaataaacccggaaaacccgggtaagccgcacgaaa

SEQ ID NO: 98183 - DNA, 510 bp, Homo sapiens
  misc_feature (4)..(6): n is a, c, g, or t
  misc_feature (11)..(11): n is a, c, g, or t
  misc_feature (30)..(30): n is a, c, g, or t
  misc_feature (38)..(38): n is a, c, g, or t
  misc_feature (50)..(50): n is a, c, g, or t
aggnnntttgnagcccccttcctgtttganttaccgtntcagaagagtcnagggcacgagcatcgggccatgcctttcttggacatccagaaaaggttcggccttaacatagatcgatggttgacaatccagagtggtgaacagccctacaagatggctggtcgatgccatgcttttgaaaaagaatggatagaatgtgcacatggaatcggttatactcgggcagagaaagagtgcaagatagaatatgatgatttcgtagagtgtttgcttcggcagaaaacgatgagacgtgcaggtaccatcaggaagcagcgggataagctgataaaggaaggaaagtacacccctccacctcaccacattggcaagggggagcctcggccctgaacagagcagctgctgatgtctggaggctgattttcctgttctctgttctccactggaaaggttgtttacgacaaacctccttgtcaaagtgtgtaaaaataaaggattgctccatcctaa

SEQ ID NO: 98184 - DNA, 727 bp, Homo sapiens
  misc_feature (612)..(614): n is a, c, g, or t
  misc_feature (616)..(616): n is a, c, g, or t
  misc_feature (621)..(621): n is a, c, g, or t
  misc_feature (631)..(632): n is a, c, g, or t
  misc_feature (638)..(639): n is a, c, g, or t
  misc_feature (648)..(650): n is a, c, g, or t
  misc_feature (658)..(658): n is a, c, g, or t
  misc_feature (678)..(678): n is a, c, g, or t
aacttaggcagtgcgaggctgggtgaatcggccgaggcttgggagcggcggccagagaagagtcaagggcacgagcatcgggccatgcctttcttggacatccagaaaaggttcggccttaacatagatcgatggttgacaatccagagtggtgaacagccctacaagatggctggtcgatgccatgcttttgaaaaagaatggatagaatgtgcacatggaatcggttatactcgggcagagaaagagtgcaagatagaatatgatgatttcgtagagtgtttgcttcggcagaaaacgatgagacgtgcaggtaccatcaggaagcagcgggataagctgataaaggaaggaaagtacacccctccacctcaccacattggcaagggggagcctcggccctgaacagagcagctgctgatgtctggaggctgattttcctgttctctgttctccactggaaaggttgtttacgacaaacctccttgtcaaagtgtgtaaaaataaaggattgctccatcctaaaaaaaaaaaaaaaaaaaaaaaaaaaaaaaaaaaaaaaaaacccggggggcaattttgggggggggggaaaaaggggtttggaagggnnntnggtcnaaggtgttcnnggcccnntttttttgnnnaagggggnaaaattgggggggccccaanaggggggggaaaaaattggaaagcggggtaccgtgttttatttggataa

SEQ ID NO: 98185 - DNA, 582 bp, Homo sapiens
cgtctcgctgaggtcgatcctttacggcaggcgtccgcgtcgctagctagtcgttctgaagcggcggccagagaagagtcaagggcacgagcatcgggccatgcctttcttggacatccagaaaaggttcggccttaacatagatcgatggttgacaatccagagtggtgaacagccctacaagatggctggtcgatgccatgcttttgaaaaagaatggatagaatgtgcacatggaatcggttatactcgggcagagaaagagtgcaagatagaatatgatgatttcgtagagtgtttgcttcggcagaaaacgatgagacgtgcaggtaccatcaggaagcagcgggataagctgataaaggaaggaaagtacacccctccacctcaccacattggcaagggggagcctcggccctgaacagagcagctgctgatgtctggaggctgattttcctgttctctgttctccactggaaaggttgtttacgacaaacctccttgtcaaagtgtgtaaaaataaaggattgctccatcctaacctaaatcgtcgagtgtttatagttgtttctttttgttctt

SEQ ID NO: 98186 - DNA, 486 bp, Homo sapiens
caggtggggccgggcacggtggctcacgcctgtaatcccagcactttgggaggctgaggcaggcggatcacctgaggtcaggagttcgagaccagcctgagcaacatggagaaaccccatctctactaaaaatacaaaattagcctggcgtggtggcgcatgcctgtaatcccagctactcaggagggtgctactctgcactttccagagtgcaagatagaatatgatgatttcgtagagtgtttgcttcggcagaaaacgatgagacgtgcaggtaccatcaggaagcagcgggataagctgataaaggaaggaaagtacacccctccacctcaccacattggcaagggggagcctcggccctgaacagagcagctgctgatgtctggaggctgattttcctgttctctgttctccactggaaaggttgtttacgacaaacctccttgtcaaagtgtgtaaaaataaaggattgctccatcctaa

SEQ ID NO: 98187 - DNA, 896 bp, Homo sapiens
gataggcacaggacagaataagttcatcttcagatactaaatataattgtacagattacagaattgtggcaaaggttaagtgctcaacctcagcaagttctcttgctaagattaggacactgattgggaaggagtaggaccatagacttgtgataggaacatttggacagacacagacaaagccgaattcccaaatctcaaggctcccttgtatacagaagcagccccgcctcccctgtgcaaggaaattagccttcacatacactaagagctttcaagacttcactggggcctctgcctcccacatggatgcctgttctcctccaaacttgcccctgatgcacctcattgactccaggagcataacaagaataaactctctacagagcccagaaggagaaatgcaaggtcagccagagaagaggaggatggaaatagattatataccacgaaagctggaaaatcttgccaatatgtgttgcagagaagctgagaactgtgtatgggaatggattctaaagtgttagactaaggaggatgaaatactaggttaggccaggcatggtggctcacacctatattcccagcactttggaaggcagagacaggaggatagcttgaggccaggagttcaggaccagcctcggcaacgcggtgagacaccgtctctacaaaaaatgtaaaaattagccacgtgtggtggtgcacgcgtgcctctggtcccagctgctcaaaggctgaggtgggaggatcatttgaacctaggaggtcaaggctgcagagacctataatggcaccattgcacttcagcctggtgacagagcaagaccctgtctcgaataaaatataaagtaagattcagcaaaatttatgaatatgcatacattcccctggga

SEQ ID NO: 98188 - DNA, 486 bp, Homo sapiens
acacacccaatgggattctcggaggtaacaaaattagatgagggtatttaatccatcattttaatctggagcccctagggatgaattatttagatgcaggatacctaataattagtttaactcatattgttttagctgaattggatgttgaaggcattccaatactaaatgaggagttgggttacggagtggacattgggacattgttttttagctactcaaactcattccttcttcctactagacctccatttacttgggggccttaactcctgtcccatgtgcatattcttaggaaggtactccctacccacatcaaaactaaggggaccagaattgcactctccctgctccaataaacatagggtagacatcccttccagtcaaccccctccctgactaaaaacaatattctgatttctgtttgattcattgattgagatgggatcttgctatgttatataggcaggtcttgaactcctggcc

SEQ ID NO: 98189 - DNA, 215 bp, Homo sapiens
ttacaatagggttcacgctcctatgagaatctaatgcttgcgactgatctgacaggaggcggagctcagtctggaatggttgctcacctccagctgtgcagcccagtacctaacaggccatggactgctactggtctgttgcctgggggttggggatccctggtataaagaggagaaggggccaggctaggtggctcatgcttgtaatctcagca

SEQ ID NO: 98190 - DNA, 219 bp, Homo sapiens
ttaaaacaaaactgaaaagtctcacagataaatccaaggcacataattatgttatgactgttgtgctgagtggtaatttagtatggatatcaggtagtttacttaaaagattgtaattatccttattacactgcaagtcaaagattttaaaatttacattctttcgtatcagcagatacataccagttcagccatcattagtttgtcaaaagctagtgc

SEQ ID NO: 98191 - DNA, 239 bp, Homo sapiens
agcacttagaacaacagcaacaaaagtctccataatgtgtatattgacacgtgttgaaatgatactattgtagatatagtggtttaaaatagtaaaattaattttacctatttgtttctttaactttaaaaaaatgtggttagtagaaagtttaaagttacatatgtgcttcatattatgtttctgttggacagtgcagccctagagtttctgagaaggtaactttgactagttattta

SEQ ID NO: 98192 - DNA, 505 bp, Homo sapiens
tcaccactgatgcagtgggagaccctcgggcctgacccctttctatgccaggcattgtctttgctgcttctgagcgaccagctgagtggaacacagaagggctggtcaaaggctgcagggcagggagcgctgagctgagaccaggactcaagctcactttgtctcggggcgacatttgctgggtgagggctcttggcagcccctctctttcacatgtgagttgccagatgatgagtgaacacaactgccacacgcatgtaaaaggttaattattgattacatagaaagagacccttagtaaatatctctacgttttggtttgcgcctctgtagaatggattctgtggttattttgtgttgatactctgccactggcatcagtaacacccaatcttttcttaaaggtggaatttaactttttgagttggtaaaatactacgtggttcataacgctttaaaaaagatttacaatgcgttcctttcttcatccacctcatctcccacc

SEQ ID NO: 98193 - DNA, 297 bp, Homo sapiens
gacaacgcccgaaaaacaagaggaaagaagtttcaggtctcactctgttgcccaggctggtctcaaactcctgacctcaagtgatccatctgcctcagcctcccaaaagtgctgggattacaggtgtgagccaccacacacaacctaaagcattctgtctgatctcttcaatgttgcaaaacatctctgtgaatatgattcttgtaattagtcaaaaggacgagtaatatagagctaagtaatgaatgccatgttttgggtgccaaatggagttcaatgattttaaaaagagggttt

SEQ ID NO: 98194 - DNA, 511 bp, Homo sapiens
ttgcactccactggttgcgtattactgtatatattgtggttcttgagtcaacttttcttccaaatctggaaaaaaataagcttggtttaagaattctgaagaagaaaacataggccaggcatggtgactcatgcctgtaaccccagtgaggcaggagaatagggtctggaggcagggaacctaaggcccacccaccctgactggatataagatataacccctcctttttctggtggcagctggaaaatgaaagtaactctgattggtcccccctacaaccaatcagactagtcgtggaccactagagtgaaccaatgggaaaccaatgggaaacctctagaaggcatataaaccccagaagaaccagtgttcctgagcctcttgcttcagccggctcccaccctgtggagcatactttcatttaaaataaatctctgctttcactgccttggttttttgtgcattttgtccaattctttgttcaaaacaccaaggagctagacaactaccc

SEQ ID NO: 98195 - DNA, 421 bp, Homo sapiens
gaaaattattgtatgaagaggtggtgagtgataaagcaggagtggtaagcagaggtcagatgatggagagtctttgcattgttttctatttactgctgtaacaaatgaccacaaattggtggcttcaaacaacatgaatttatcacctataggttagaagtccacctgagctaaaaccaaggcatctacagggctgcattcccttctagagaatctaagggagaattaatttcttgcctttgtcagctagcttctggatgctgcccacattccttggtccatggcccactttctccatgttcaaagccagcaacattgcatctgtctgagaattcttctgtagtcacatctccctctgactctcttctacctctgcttttctgctcttaaggatgtttgtgattatattggtctcacctgg

SEQ ID NO: 98196 - DNA, 675 bp, Homo sapiens
ctgcctttagccaccaggaggctcggttcctgattcccctcctggtccccctggtcctgctttgtagtccacagacgcagcctgtgccttggaagggcactgtggtcctcttcaacgccctcggtgccctcctcttcggctgcctgcatcaggggggcctggtgcctggcctggagtacctggagcaggtggtccatgcccctgtgctcccaagcacacccacccactacacactcctcttcactcacacctacatgcccccccggcacctcctacacctcccaggcctgggggcaccagtggaggtggtggacatgggggggactgaggactgggccctgtgccaaaccctgaaaagcttcaccagacaaccagcctgccaagtggctggtgggccatggctctgccgcctctttgtggtaacccctggcaccaccaggcgtgccgtggagaagtgcagcttccccttcaagaatgaaacacttttatttccccatctgaccctggaggatccaccagccctgtcctccttgctgagtggggcttggagggaccacctcagtcttcacattgtggagctgggggaagaaacctgacaatatgacagagcacccactgcccaagactcagccatagaagatgccgccccaccttctacttgggtagctgggctgg

SEQ ID NO: 98197 - DNA, 198 bp, Homo sapiens
tgtttaaaataagtaaatacatatatactaaactcatgattagactaagctggttttcattcatttataaaattttctgggaatgtaatagcaataaaccgatgctgatcaacccaaataaacacgtacactctatttctcttgtggtatgagagtaactatgctgaatttgagtcatggctgggcatggtggctcac

SEQ ID NO: 98198 - DNA, 409 bp, Homo sapiens
gttccctcaggtgaaaaatgaggactagcttggattattaatattttgcttgtacccattttcccctgaagaatgtctcattacataaatttgtagtattcacaactaagtttttgtcaacaacatattttgaaatcattcacggccgggtgcgatggctcacgcctataatcccagcactttgggaggctgaggctggtggatcacgaggtgaagagatcgagaccatcctggccaacattgtgaaaccccgtctctactaaaaatacaaaaattagctgggcatggtggtgcgtgcctatagtcccagctccttgggaggctgaggcaagagactcacttgaatccaggcggtggaggttgcagtgagctgagattgtgctactgcactccagcctggtgacagagc

SEQ ID NO: 98199 - DNA, 630 bp, Homo sapiens
gtgtttttttaagacagggtttcattctgtcacaaaggctagagtacaatggcacaatcatagctcactgcagcctcaaactcctggggttaagtgatcctcctacctcagcctccctagtagctgggactacagacaggtacatgccaccaaccctgggctaatttttgtattcttgtagagagagagagagagagacaggatctcactatgttgcccaggctggtcttgaacttggggctcaagtgattctcctgccttgacctcccaaagtgctgggattacaggcaagagccatcatgctcggcccaaaattctagtttttctctgaagctcacattttattgttattggaaagtactatcaattgtttaccttgaagtgacaggctcactttgttcattgttctagacagtgtctctgaatacccaactgtgaatagccatggattgtcagctgtgcttccaggcaaaattcatgtttcctgaaaggggagctagttcagctcacaaacaacagcacaaatgcttttctcaagatgactaacagactttcatctgcagcagaagggctttatgttcactttccatccattacaccaaatattaaaaaggtgtgtacttaaggatc

SEQ ID NO: 98200 - DNA, 673 bp, Homo sapiens
attttagtcaaggcccccaggtatctggcacaaccccggcaatatgcaaagcctcctctaatgatggttgaatccaggagaccccaaccgctgtgatggaaacctcgccacctccagaggcagccgatgactcctggggcagccccacccggctcaaaggcaacctgctccacagagccagccccatccctaggcttggagccaaacaggattgctccttcataagaaaaaaaaatcagagctacagagtcagccgtcttaaaaagctccctgcattcttgccttgcccagccaagcagcctcaggtccccctgctccctgtacctggctgggctcagagccactctcaaccacatattttttaagtcctttgtcccagactatgaacggcatggaaaccaattgaggactgggggtggcagcttgtgtgtgtgactgcttgagctctggagggtccttctactgtcagcgcctccccatcccccacccccattcttctgtgatggccccgagtgtctgtaatgcatccctcaacttttcatctgccagtgagactcacagagcaaatagcccaaggaaagacaaactatggatcaaactcatactaaagtataaatgactttcttctcccagatcattttgatagtgaacaggacaatcagcatcaggccca

SEQ ID NO: 98201 - DNA, 327 bp, Homo sapiens
ctgcctagaactgtgctgagcatggagtagatgctcagggatatttgttgaaagaattgcaggtgcttcatgaatatccattgaatcgatacataaaagtcacttcaactaaagtctataggtttgctttgaagaatgatctatttctgaaattctgcctttgaaacccaagctattaagctgcaatccccactgaattaaaacctttccttctgagcattcattttctctttctcactctctctctctttctctctctctttttctctctctttctctctctctctctttcagacagggttttgctgtgctgcccaggctggactt

SEQ ID NO: 98202 - DNA, 551 bp, Homo sapiens
gccaggaatggggttacctaagccggatcatgaaggacgagaacagactcaccaggggtcgagggacaaggaggcagcaagtccgcagcatgaaggcaggagagaacattgctgtaagcctttaccatggccactgcatggggaggaaacaggagatttggaatgagctgtgacactgggcaggaaagcaagacccaggtcttgtgaggccttgagcgtcaagcttaggagtcaggacctggggattttaagtacagcaatatcataattacattcatgtttcagagagatcactcaggcagcagtctggaaggtggagtggaaaacggagaaattagtcatgaagacctatttagaaagtagtaggcaagaaatacccagggcctaacctgaggtgtaggcaggggatgggaatgagagcaattaccgaactagaatgaactaaactcaatgaacaggagcggggaagagggaatgcagaaatggctctcagatttctgacttgttcgcttaatgactggggttgtcatttgtttagataagcaataaag

SEQ ID NO: 98203 - DNA, 359 bp, Homo sapiens
tccctctgcccaccaaactgcgagccagagccccatttcacatgtgcagaaactgccctaaaaggctaagcgacttgccggaggtcacacagctcaaaagcagcagaactggggctcacagcaaggtgtgcagactttccactcattggtcaggatattttttcctaatgctctgagaattattcccataggaaacattcagctcatttggaactcttttgacactaaaacctctttccctgagaacctgccttcaggggcaaaacaaggctggtggctgctgataagccacagcgtggcatggagaagcagcacggactttcaacgaggcagcccccgtcccgggtccacccccgaag

SEQ ID NO: 98204 - DNA, 728 bp, Homo sapiens
ggtgggctgaagggctcctcaagtgccgccaaagtgggagcccaggcagaggaggcgccgagagccagcgagggctgtgagaactgccagcacgctgtcacctctcactaccaaggtgggtgagggaagaccatcagatgggggtggggctaggcgagtctgggcttagactcttcttggtcagatcttgctgtggctgctgtcaggggtgggggtgagattcccaggtcactggagttgtgtacctaggaggattatggttgcctctgctgagtcatgaaatttttcagggaagtggggaaagccagcagtcacaggcctcagctagcactcacacaaactaaagggctggtctcactcccctatgcccttgccaacagccctcagaccttttccaggcagagtgatataggcttgaaaaactgccccaggctaactgcttcccagctgcgaaagaaatgggcttgcttctttccctgcctgtggagccagcacaacagatttgcaccctcccatgagttctggccgggaggcttctcaccccattcaaactgttacaaagttcagctagaggtttgctattccctgtagttttaccccctctgttcctccagcattggatccgtctgatgccaagcaggaatgacttcctaggggaccctgtgagctcccagggcctttctgctgtttcctcagtggttcacatctataatcacagcactttggaa

SEQ ID NO: 98205 - DNA, 192 bp, Homo sapiens
ccttaatatcagatattcaggtttaaactcattgtgaaaattcagactagtgtcttcctcatattatgataaagttgtgaaatttgtgatacttgtaattgttactaagaaaaactaaagttgtgactaattttagtggcaaagacagtactttgaattacaaataaatattacagcatttctttgaattgc

SEQ ID NO: 98206 - DNA, 550 bp, Homo sapiens
tgctcctgctctttgacatattttccgtgtagaagatatggagcctggaaatcatgtgacagttggagtaagccattcctaatcccatgccagaacggaaggctaatggccacattcttcttttaaagaaggtgagaagacaattcctaatccaaaaccagtgcctatcttcacgaccacatccgccaggcaccggtcccacttccggccaagctccaactccgacctgttccccaccggcgcctccagctttcctcttggccggcttcccgctccaacccctgcaagtctcgcgagctattttctttaaaagcattacccttgaaaacttccatagtttcggctcttaacaccatcaaaattagtcttaatctctgaacacataaagataatcctttcttctctctttctgcacaatatagattttcaaaacagagggaaataaagcactttatttagttccagatttattgtgttccatttaggaatgaactactatctgggtaacccatgggatgccaactctatatggagagaataaactatttta

SEQ ID NO: 98207 - DNA, 128 bp, Homo sapiens
ctccaacaacaacaacaacaacaacaaaattatagtgtatatgtcattgatttgatatgtaaggacatgaataaaagtaaacgctaaaaaactgcaagtttaatactggaatcgttttttttaatcct

SEQ ID NO: 98208 - DNA, 797 bp, Homo sapiens
agacatagggcatcactatgttgcccaagctgatcttgaactatcctcaagtgaccctcctgcctcagcctcccaaaatgctgatctcactcctctataatttgccaaagtatcatacatgtgtgaagggaaaacgaacagaaagacattctcatactggaaagatttagaaggcaatttacacatgtattcctcttaaaaaattacttgaataaaattacagtctttttaaaaatgaatcaaaacaaagctcaaatatggaagttaatgtaatttttaaaatgtattaagcaaagaaaatggaatatggttatgaaaatggaaatgacaaagtaatgattgaaagagaagacagataacctaaaatgttcattatcaaaactttaaaatcttatattgttttcctaggtactagagcttaggagaagaatagaagaaaacaaagatatggtaaatttctcatttaacaaaggtaatcagtagaaacaatttgtttcctgatatttagggaaaaatcgactcacaatattagaaattgactcagtcaccttataattaaaaaagcatgaaattacaaaaattatgaaacaaaatcttgaattttttttgttaaaatagatcataaaattgaaagaaaaaaactggaaaaaatattaacatatacataaaacatcttaatatgaaaagagtagttataaattaatcatttgataaagtctatgtagttaatttaaaaggcatgtcagacttatgtttctgcatttaaaaattaatatatacctatatacacatacaca

SEQ ID NO: 98209 - DNA, 634 bp, Homo sapiens
tcattcctgttacccctttcctgcactctcatgtgttacttggatatattgtcatactgtattttaatttgcctactgtgattttgactgtgtctctgtgtaaacatttttattgatttatcctgggattacaaaatctgtaggtatgtatcattgactaaattttgcaagtttttagccattatttattaaaaaatattttcagcaccatgctgtttctttttaacttctggtatttcaatgatacaaatatcagactttttgttgatatttcacaagtccctgggactttgctaatgttttcattgagatataatttatagataataaaattcacctatgtaattaccttcatcagtgctgtttatttcttcatgtggaatcaagttattatcaagtgtattttcatttcagccagaaaaacttcctttaacatttcttttcagggaagtatgctagagaaaaactttctgagcctttggctatctgggtatgtcttgatttctcctccatatttagaggaaagtttttcttcatatagaattctttgtttgcactctctgtccctctcttccccaggacgttaaatgttatcccactgtcttctatcgtacattatttctgattagaaatc

SEQ ID NO: 98210 - DNA, 334 bp, Homo sapiens
aaagtttcagtggggttagttacttgtgggggctgtgcgggagaatctgttgcacgcctctctccttgttcctagtgacagcaggcagtccttgatgtttctcccgtgtgtttctgtcttttcttctctttttcttttttcttttcttttctttcttttcttttctgttcctcctctcctgtcttcattcttcttcttcttcctcttcttcctcttcctcctcttcttcttcttcttccttttctctctctctctctctgtctctttcttcttctttcaacagagtctcactttgtcacccagtctggagtgcagtagtgcaaaaccaactcac

SEQ ID NO: 98211 - DNA, 583 bp, Homo sapiens
caggagaggaagtcagagatttgacagctagcagacaatggggagctcagtcaataagctttcaaggaaatgaattctgcctacaaacaatgaacttggaagagaatcccaaatcccaaataagaagcccagccctggacaacactttgatttcagtctaaagaaaccctgagaagagaatacagtgacattgtacctagacttccggcctacacaactgtaagataataaatacatgttgttttaagctgtacagtctgtggtaatttgtggcacagtaagagaaaactaatacaagctgggcgtggtggctcatacctgtaatcccagcactctaggagacccagaaaggcggaccacttgagcccaagttttgagaccagcctgggcaacatgtgaaacgctgtctctacaaaaaatattaaaaaaaaatcacccaagcatgatggtgtgcacctatagtaccagctaattaggagactgagctgggaggattgcttgagcccaggaggtcaaagctacagagagctgtgatcatgccactgcactgcagcctgagcaactgagcaagaccctgtctcca

SEQ ID NO: 98212 - DNA, 513 bp, Homo sapiens
ctttgagctaatcagaaccagccccttgccttcaactacagtttacatcataatgactcctaaatcccatatctctgctgagttttgggaaccagttctaacaccatactagatatttttaccttatgctacatagccatcacaaatgtaactcccttatccaaaactgaactcattatccaaccacactaacttcatctccactgatggcagtatgacccatccagtggtagaagccagaagtttgggagttagcctagatttctccttgaattttgtgtaccactggtcaatcattacattttaagattctgcttccaaaatagctctctaatttgttacctcccctttccactgccttaatttaggccctcatattttttgtactgctgcattggtgtcttaactgatacgcccatttctgacctagttccatccctcagtttcatccttcacattaaaaccattttgtcttttaatttttaattttatttttgagacagggtctggctc

SEQ ID NO: 98213 - DNA, 514 bp, Homo sapiens
ttttttgagacagagtcttgctctgtcacccaggctggagtgcagtagcataatcttggttcactgcaatctttgccacccaggttcaggcgatcctcctgcctcagcctcccgagtagctgggattacaggtgcacgccaccacgcctggctaatttttgtatttttagtagagacggggtttcgccatgttggccaggctggtcttgaactcctgacctcaaatgatccacccgcttcggcctcccaaagtgctggcattacaggagtgtgccactgcacccagcctgtactagtttttataacatagaagaatacctgacattttgaaaatccttattattccaagtgctttacacgtattttctccttcacctgattaaataccttttccaggtggcctggcaggtaagggggaagcaggtgttcacgaagggaccagagtctgggctccagagtccaccctgtgtgccaccacactgtactgcctgtgggtaccttggtaaagcaagtc

SEQ ID NO: 98214 - DNA, 5908 bp, Homo sapiens
  misc_feature (5760)..(5760): n is a, c, g, or t
  misc_feature (5763)..(5763): n is a, c, g, or t
  misc_feature (5765)..(5765): n is a, c, g, or t
cggccgcctctcttcgcccaaggagttgacattttgcaggactcgcgcgacgcccagtcgccggcgctccccgggaccccgccgccgggaggagggggcggaggagggtggagactgcggggcttggccaaggaaggcgcacatcctcgggcgggcggccgtgacgcggcggggatcaactttgcatgaataatgtgagtgcgcttggaaaagagacctcctgctccgcgggctcggggcaagagcccgcaggctaccttccccgggcaggggcgctcaacccaaccggctccagggcactggtaatttggctagaggaccgcgcggaggcagcgggatctgcgatttccttctggttggctgtcctgcgtgggtgccaagttccacacatgatttaatgaataagaaggagatgtcagtgaaaaaagggatccagaatgattactaacctatgactcccaacagtatgacagaaaatggccttacagcctgggacaaaccgaagcactgtccagaccgagaacacgactggaagctagtaggaatgtctgaagcctgcctacataggaagagccattcagagaggcgcagcacgttgaaaaatgaacagtcgtcgccacatctcatccagaccacttggactagctcaatattccatctggaccatgatgatgtgaacgaccagagtgtctcaagtgcccagaccttccaaacggaggagaagaaatgtaaagggtacatccccagttacttagacaaggacgagctctgtgtagtgtgtggtgacaaagccaccgggtatcactaccgctgtatcacgtgtgaaggctgcaagggtttctttagaagaaccattcagaaaaatctccatccatcctattcctgtaaatatgaaggaaaatgtgtcatagacaaagtcacgcgaaatcagtgccaggaatgtcgctttaagaaatgcatctatgttggcatggcaacagatttggtgctggatgacagcaagaggctggccaagaggaagctgatagaggagaaccgggagaaaagacggcgggaagagctgcagaagtccatcgggcacaagccagagcccacagacgaggaatgggagctcatcaaaactgtcaccgaagcccatgtggcgaccaacgcccaaggcagccactggaagcaaaaaccgaaatttctgccagaagacattggacaagcaccaatagtcaatgccccagaaggtggaaaggttgacttggaagccttcagccattttacaaaaatcatcacaccagcaattaccagagtggtggattttgccaaaaagttgcctatgttttgtgagctgccatgtgaagaccagatcatcctcctcaaaggctgctgcatggagatcatgtcccttcgcgctgctgtgcgctatgacccggaaagtgagactttaaccttgaatggggaaatggcagtgacacggggccagctgaaaaatgggggtcttggggtggtgtcagacgccatctttgacctgggcatgtctctgtcttctttcaacctggatgacactgaagtagccctccttcaggccgtcctgctgatgtcttcagatcgcccggggcttgcctgtgttgagagaatagaaaagtaccaagatagtttcctgctggcctttgaacactatatcaattaccgaaaacaccacgtgacacacttttggccaaaactcctgatgaaggtgacagatctgcggatgataggagcctgccatgccagccgcttcctgcacatgaaggtggaatgccccacagaactcctcccccctttgttcctggaagtgttcgaggattagactgactggattccttctctataattcctacagcactactgggtgtcatttcattccattgcctagctcttttttgtttgtttctttgtgttgggagggattatttgggagggaaaagggaagtagtccttggcatagacatggatgaaattgccccttgaatgcgggtacttgaaactattgcatttcgttctccggtcctgtgatgtgaatgctctgaaggttttatggttgtggaggtggggtgggggacaatcattaactcaccagcaccaagcatcaccagctcccacccgtccctggtccaagacttgagtcagcaaaatggcgccacaggacactaaagaagccttaaaaccaagataatacgaccacctccacccaatcctgatgttcgcagggctgaagttaacagagcacagaccacctttagttagatgtggctttcagctttttagggaaagactcgaacaaattttcatctattcaagagcatgctgtttgcagcactctttatggtctcctaggagcataacttggaatgtacaggaatatttgtgtcctaaaaaaatcagctgcccttccaatatcatttttataacgttatggtttaattcaagttatacaaaggtgtgactcaaggatgtgcaggtattgactgatggaggccgacaaggaaaatattttttttcagtgagccgagagaaattagaaatcttcaccaatgtcagtgactgcatggtttccaaaaattcacatagtattacctcacagtaggaaggcttctttcccatttaggctcagagaacacttttacagaaatcaaacctatttacagggtggcaccccttttctgtggcatctgatctgtcatctcccaagctcctgaagttctttatccaggttgtatctttgctgagctgacaactaatttctctcggacaaatgattctaatcaaggaaagatacggtgaaacttcagtcttcttctggaggaatgctgaggcgagattagtgcagctacattctgagttgaaggaaatgcagtgttctgagggcccctttgtgtcctgatggctggaggacgcttcctcctggttagatcctcaagctccttgcctcattgacaaatgtctcctagtcccctttttccctctgactctgaggaactaaatagcttgactatctctaaacagagactggccctgccactgaccctcctgtccctctcatagcataccctgacagatactcaatagaaaacacctgcagaccatgtgcacacttaactttcctgcccaacctgcctccccaacggcccatgctagaatagcttgtgcccagaaaacaaacggtgacacttcatctcttcagcgtcagaaaatgggcatagaatgtacccatgcaattgaatgtatctcattctccactggcatagtagatataaactattcctttgcctaccttttactgccttatcctggaaatattggggaaaataagccatatcagtgagatttacctaaaaacaaaggaaggaaagtcactatggaaaccaagtagatgctttttgtaagtttggtggagcataactggcccagaagtctgggtgcctgagttctagttcgtgctctgtcaactggtagatttgtaattctaggtcttggttttcttacctggtgaataagtcatgatctctaaaacccttcctgcccttaatattgtctgaatttcaaggggaaaaaaaaaatctggttcctttaattatttttttttaacacttaaattcctaactttattagacaagaagtatggcccacttaacagttaaggaacgtaaatttgttattggctcgaaataataatttgacacaatactagtcaaccatttagaggccttggaaaaagaagaggaacagcactgaaaattccaagtatgattggaaattatctgggagcggggaattaaatattcaatgcatgaaagcaattgtactggcttctgggaaaaaggaaacaagaacattgctatggaacttgttacccagagaaaggaagtgaaaagatttacaattataagcacgaaattcattggcagattacctgctttatctacagacagattgttttggggtttggttttgtctaggcagcctctggccaggctccttaattgcttgctctgctaatatttcagcttcctctcttgactccttgaggaaccaaccgctctttggaagacaaacacttagccacctctgtgctccagggtaaccctgagaagctctgctgtctggggcaagctttctttccaaagggaatgagaggaaggcaagcaggcagggtcctgcagcgtcaggccttctggggaaagtttcctcattttgtttgacagggtcctcagtacatcagacacccagatttgaatataagttcagagcctgatctcaagctaaatcagaatgctttggggactaaccatgatcgagaattggccaaatagtatggcatataaacagccatccagccagccgcaagtaaaggaacgtttgatccttggcaccttaaatgattgattgccttcaataggcaaactgctggtctggaaatctcgttgaaggctgaatacttcatgcggagtaggacaagccttagcccaccttcaggttgaaaggaaaggccataggactcaaaagataatgactctgaaactaaactccttccttctgaagctgacagaggtacttagtgcatctcaagactccatctcataaaactcatttgtgagggatttgctctagatttttctaaacattttttcatctattgtccagacttgcaaatccagtgtggacctgatggagatacccttcacacctgcgctcccaccccctcggcagggagacgtctcagtagaggagaacacacccattatgctgggatttgtatttataaatcacttcccttttagggatgagcggtgtggggcgtgtgtgcgtgtgagtgtatgcgcgtgcgtgtgtgaccctcaagtgtactttgctcaatttagacgtgcagtatttccagaaacaatgaaaaaagtaagatgttttcttctttatgattctgctcaaaacaccacgtgccgcctcagagctttttctagagcctcggtcctcaatgacgcgcttgacctgttgatgcctcagcccagcgaagccccttcacctgtgccccgggcgacagttctttcagtgtggcagtgcaggcctgggggtgggactgccagggctttcgctcttgttgccagcaacggcctttcttgttgctcctccatgaacagcgggtacaagccctggcccctcctcgacactaagccccccacagactcagcctccaaggaaccgctgagcacccttgaagcatgtcattgtcagtgatacctttttattctatggaactctaacctattcgtgtcatattgaccttttgctgcatgagtcataaattatgaaatcagtcttacagtttttgaaatgtagccagcatttgtaaggctaaacctttttcatgaactgaatttaagtgaataaccaagccacagttcctcctcaaatggagagtgatgatcgacatttgaatctctttgccctttccaacggctatggcatcaggttctaaaataagctcgtaatttttcctgttattttaataatatggaaatattagcatagtgtttcttttgatagtgatagactataatccatatttaaattttatagagaagaaattttattgtactgtgatgtagatatttattatccaggtaaggatttgcccggtgtgtattttttacaattgagacattttactttaatctttaaaaaaaatgcattaaaaacacactcaaaaaaaaaaaaaaaaaaaaaaaaaaaaacccnatngnggggggaaaaagggttggggcctttttcacaagaattttaaaaggggcgggacaaaagttgtttggacattgggaaaagtgggggatcttaaaggggtgtgtcccactttatataaaaggggcggctttaaggaggacatttt

SEQ ID NO: 98215 - DNA, 5727 bp, Homo sapiens
cggccgcctctcttcgcccaaggagttgacattttgcaggactcgcgcgacgcccagtcgccggcgctccccgggaccccgccgccgggaggagggggcggaggagggtggagactgcggggcttggccaaggaaggcgcacatcctcgggcgggcggccgtgacgcggcggggatcaactttgcatgaataatgtgagtgcgcttggaaaagagacctcctgctccgcgggctcggggcaagagcccgcaggctaccttccccgggcaggggcgctcaacccaaccggctccagggcactggtaatttggctagaggaccgcgcggaggcagcgggatctgcgatttccttctggttggctgtcctgcgtgggtgccaagttccacacatgatttaatgaataagaaggagatgtcagtgaaaaaagggatccagaatgattactaacctatgactcccaacagtatgacagaaaatggccttacagcctgggacaaaccgaagcactgtccagaccgagaacacgactggaagctagtaggaatgtctgaagcctgcctacataggaagagccattcagagaggcgcagcacgttgaaaaatgaacagtcgtcgccacatctcatccagaccacttggactagctcaatattccatctggaccatgatgatgtgaacgaccagagtgtctcaagtgcccagaccttccaaacggaggagaagaaatgtaaagggtacatccccagttacttagacaaggacgagctctgtgtagtgtgtggtgacaaagccaccgggtatcactaccgctgtatcacgtgtgaaggctgcaagggtttctttagaagaaccattcagaaaaatctccatccatcctattcctgtaaatatgaaggaaaatgtgtcatagacaaagtcacgcgaaatcagtgccaggaatgtcgctttaagaaatgcatctatgttggcatggcaacagatttggtgctggatgacagcaagaggctggccaagaggaagctgatagaggagaaccgggagaaaagacggcgggaagagctgcagaagtccatcgggcacaagccagagcccacagacgaggaatgggagctcatcaaaactgtcaccgaagcccatgtggcgaccaacgcccaaggcagccactggaagcaaaaaccgaaatttctgccagaagacattggacaagcaccaatagtcaatgccccagaaggtggaaaggttgacttggaagccttcagccattttacaaaaatcatcacaccagcaattaccagagtggtggattttgccaaaaagttgcctatgttttgtgagctgccatgtgaagaccagatcatcctcctcaaaggctgctgcatggagatcatgtcccttcgcgctgctgtgcgctatgacccggaaagtgagactttaaccttgaatggggaaatggcagtgacacggggccagctgaaaaatgggggtcttggggtggtgtcagacgccatctttgacctgggcatgtctctgtcttctttcaacctggatgacactgaagtagccctccttcaggccgtcctgctgatgtcttcagatcgcccggggcttgcctgtgttgagagaatagaaaagtaccaagatagtttcctgctggcctttgaacactatatcaattaccgaaaacaccacgtgacacacttttggccaaaactcctgatgaaggtgacagatctgcggatgataggagcctgccatgccagccgcttcctgcacatgaaggtggaatgccccacagaactcctcccccctttgttcctggaagtgttcgaggattagactgactggattccttctctataattcctacagcactactgggtgtcatttcattccattgcctagctcttttttgtttgtttctttgtgttgggagggattatttgggagggaaaagggaagtagtccttggcatagacatggatgaaattgccccttgaatgcgggtacttgaaactattgcatttcgttctccggtcctgtgatgtgaatgctctgaaggttttatggttgtggaggtggggtgggggacaatcattaactcaccagcaccaagcatcaccagctcccacccgtccctggtccaagacttgagtcagcaaaatggcgccacaggacactaaagaagccttaaaaccaagataatacgaccacctccacccaatcctgatgttcgcagggctgaagttaacagagcacagaccacctttagttagatgtggctttcagctttttagggaaagactcgaacaaattttcatctattcaagagcatgctgtttgcagcactctttatggtctcctaggagcataacttggaatgtacaggaatatttgtgtcctaaaaaaatcagctgcccttccaatatcatttttataacgttatggtttaattcaagttatacaaaggtgtgactcaaggatgtgcaggtattgactgatggaggccgacaaggaaaatattttttttcagtgagccgagagaaattagaaatcttcaccaatgtcagtgactgcatggtttccaaaaattcacatagtattacctcacagtaggaaggcttctttcccatttaggctcagagaacacttttacagaaatcaaacctatttacagggtggcaccccttttctgtggcatctgatctgtcatctcccaagctcctgaagttctttatccaggttgtatctttgctgagctgacaactaatttctctcggacaaatgattctaatcaaggaaagatacggtgaaacttcagtcttcttctggaggaatgctgaggcgagattagtgcagctacattctgagttgaaggaaatgcagtgttctgagggcccctttgtgtcctgatggctggaggacgcttcctcctggttagatcctcaagctccttgcctcattgacaaatgtctcctagtcccctttttccctctgactctgaggaactaaatagcttgactatctctaaacagagactggccctgccactgaccctcctgtccctctcatagcataccctgacagatactcaatagaaaacacctgcagaccatgtgcacacttaactttcctgcccaacctgcctccccaacggcccatgctagaatagcttgtgcccagaaaacaaacggtgacacttcatctcttcagcgtcagaaaatgggcatagaatgtacccatgcaattgaatgtatctcattctccactggcatagtagatataaactattcctttgcctaccttttactgccttatcctggaaatattggggaaaataagccatatcagtgagatttacctaaaaacaaaggaaggaaagtcactatggaaaccaagtagatgctttttgtaagtttggtggagcataactggcccagaagtctgggtgcctgagttctagttcgtgctctgtcaactggtagatttgtaattctaggtcttggttttcttacctggtgaataagtcatgatctctaaaacccttcctgcccttaatattgtctgaatttcaaggggaaaaaaaaaatctggttcctttaattatttttttttaacacttaaattcctaactttattagacaagaagtatggcccacttaacagttaaggaacgtaaatttgttattggctcgaaataataatttgacacaatactagtcaaccatttagaggccttggaaaaagaagaggaacagcactgaaaattccaagtatgattggaaattatctgggagcggggaattaaatattcaatgcatgaaagcaattgtactggcttctgggaaaaaggaaacaagaacattgctatggaacttgttacccagagaaaggaagtgaaaagatttacaattataagcacgaaattcattggcagattacctgctttatctacagacagattgttttggggtttggttttgtctaggcagcctctggccaggctccttaattgcttgctctgctaatatttcagcttcctctcttgactccttgaggaaccaaccgctctttggaagacaaacacttagccacctctgtgctccagggtaaccctgagaagctctgctgtctggggcaagctttctttccaaagggaatgagaggaaggcaagcaggcagggtcctgcagcgtcaggccttctggggaaagtttcctcattttgtttgacagggtcctcagtacatcagacacccagatttgaatataagttcagagcctgatctcaagctaaatcagaatgctttggggactaaccatgatcgagaattggccaaatagtatggcatataaacagccatccagccagccgcaagtaaaggaacgtttgatccttggcaccttaaatgattgattgccttcaataggcaaactgctggtctggaaatctcgttgaaggctgaatacttcatgcggagtaggacaagccttagcccaccttcaggttgaaaggaaaggccataggactcaaaagataatgactctgaaactaaactccttccttctgaagctgacagaggtacttagtgcatctcaagactccatctcataaaactcatttgtgagggatttgctctagatttttctaaacattttttcatctattgtccagacttgcaaatccagtgtggacctgatggagatacccttcacacctgcgctcccaccccctcggcagggagacgtctcagtagaggagaacacacccattatgctgggatttgtatttataaatcacttcccttttagggatgagcggtgtggggcgtgtgtgcgtgtgagtgtatgcgcgtgcgtgtgtgaccctcaagtgtactttgctcaatttagacgtgcagtatttccagaaacaatgaaaaaagtaagatgttttcttctttatgattctgctcaaaacaccacgtgccgcctcagagctttttctagagcctcggtcctcaatgacgcgcttgacctgttgatgcctcagcccagcgaagccccttcacctgtgccccgggcgacagttctttcagtgtggcagtgcaggcctgggggtgggactgccagggctttcgctcttgttgccagcaacggcctttcttgttgctcctccatgaacagcgggtacaagccctggcccctcctcgacactaagccccccacagactcagcctccaaggaaccgctgagcacccttgaagcatgtcattgtcagtgatacctttttattctatggaactctaacctattcgtgtcatattgaccttttgctgcatgagtcataaattatgaaatcagtcttacagtttttgaaatgtagccagcatttgtaaggctaaacctttttcatgaactgaatttaagtgaataaccaagccacagttcctcctcaaatggagagtgatgatcgacatttgaatctctttgccctttccaacggctatggcatcaggttctaaaataagctcgtaatttttcctgttattttaataatatggaaatattagcatagtgtttcttttgatagtgatagactataatccatatttaaattttatagagaagaaattttattgtactgtgatgtagatatttattatccaggtaaggatttgcccggtgtgtattttttacaattgagacattttactttaatctttaaaaaaaatgcattaaaaacacactc

SEQ ID NO: 98216 - DNA, 5854 bp, Homo sapiens
  misc_feature (5706)..(5706): n is a, c, g, or t
  misc_feature (5709)..(5709): n is a, c, g, or t
  misc_feature (5711)..(5711): n is a, c, g, or t
cggccgcctctcttcgcccaaggagttgacattttgcaggactcgcgcgacgcccagtcgccggcgctccccgggaccccgccgccgggaggagggggcggaggagggtggagactgcggggcttggccaaggaaggcgcacatcctcgggcgggcggccgtgacgcggcggggatcaactttgcatgaataatgtgagtgcgcttggaaaagagacctcctgctccgcgggctcggggcaagagcccgcaggctaccttccccgggcaggggcgctcaacccaaccggctccagggcactggtaatttggctagaggaccgcgcggaggcagcgggatctgcgatttccttctggttggctgtcctgcgtgggtgccaagttccacacatgatttaatgaataagaaggagatgtcagtgaaaaaagggatccagaatgattactaacctatgactcccaacagtatgacagaaaatggccttacagcctgggacaaaccgaagcactgtccagaccgagaacacgactggaagctagtaggaatgtctgaagcctgcctacataggaagagccattcagagaggcgcagcacgttgaaaaatgaacagtcgtcgccacatctcatccagaccacttggactagctcaatattccatctggaccatgatgatgtgaacgaccagagtgtctcaagtgcccagaccttccaaacggaggagaagaaatgtaaagggtacatccccagttacttagacaaggacgagctctgtgtagtgtgtggtgacaaagccaccgggtatcactaccgctgtatcacgtgtgaaggctgcaagggtttctttagaagaaccattcagaaaaatctccatccatcctattcctgtaaatatgaaggaaaatgtgtcatagacaaagtcacgcgaaatcagtgccaggaatgtcgctttaagaaatgcatctatgttggcatggcaacagatttggtgctggatgacagcaagaggctggccaagaggaagctgatagaggagaaccgggagaaaagacggcgggaagagctgcagaagtccatcgggcacaagccagagcccacagacgaggaatgggagctcatcaaaactgtcaccgaagcccatgtggcgaccaacgcccaaggcagccactggaagcaaaaaccgaaatttctgccagaagacattggacaagcaccaatagtcaatgccccagaaggtggaaaggttgacttggaagccttcagccattttacaaaaatcatcacaccagcaattaccagagtggtggattttgccaaaaagttgcctatgttttgtgagctgccatgtgaagaccagatcatcctcctcaaaggctgctgcatggagatcatgtcccttcgcgctgctgtgcgctatgacccggaaagtgagactttaaccttgaatggggaaatggcagtgacacggggccagctgaaaaatgggggtcttggggtggtgtcagacgccatctttgacctgggcatgtctctgtcttctttcaacctggatgacactgaagtagccctccttcaggccgtcctgctgatgtcttcagatcgcccggggcttgcctgtgttgagagaatagaaaagtaccaagatagtttcctgctggcctttgaacactatatcaattaccgaaaacaccacgtgacacacttttggccaaaactcctgatgaaggtgacagatctgcggatgataggagcctgccatgccagccgcttcctgcacatgaaggtggaatgccccacagaactcctcccccctttgttcctggaagtgttcgaggattagactgactggattccttctctataattcctacagcactactgggtgtcatttcattccattgcctagctcttttttgtttgtttctttgtgttgggagggattatttgggagggaaaagggaagtagtccttggcatagacatggatgaaattgccccttgaatgcgggtacttgaaactattgcatttcgttctccggtcctgtgatgtgaatgctctgaaggttttatggttgtggaggtggggtgggggacaatcattaactcaccagcaccaagcatcaccagctcccacccgtccctggtccaagacttgagtcagcaaaatggcgccacaggacactaaagaagccttaaaaccaagataatacgaccacctccacccaatcctgatgttcgcagggctgaagttaacagagcacagaccacctttagttagatgtggctttcagctttttagggaaagactcgaacaaattttcatctattcaagagcatgctgtttgcagcactctttatggtctcctaggagcataacttggaatgtacaggaatatttgtgtcctaaaaaaatcagctgcccttccaatatcatttttataacgttatggtttaattcaagttatacaaaggtgtgactcaaggatgtgcaggtattgactgatggaggccgacaaggaaaatattttttttcagtgagccgagagaaattagaaatcttcaccaatgtcagtgactgcatggtttccaaaaattcacatagtattacctcacagtaggaaggcttctttcccatttaggctcagagaacacttttacagaaatcaaacctatttacagggtggcaccccttttctgtggcatctgatctgtcatctcccaagctcctgaagttctttatccaggttgtatctttgctgagctgacaactaatttctctcggacaaatgattctaatcaaggaaagatacggtgaaacttcagtcttcttctggaggaatgctgaggcgagattagtgcagctacattctgagttgaaggaaatgcagtgttctgagggcccctttgtgtcctgatggctggaggacgcttcctcctggttagatcctcaagctccttgcctcattgacaaatgtctcctagtcccctttttccctctgactctgaggaactaaatagcttgactatctctaaacagagactggccctgccactgaccctcctgtccctctcatagcataccctgacagatactcaatagaaaacacctgcagaccatgtgcacacttaactttcctgcccaacctgcctccccaacggcccatgctagaatagcttgtgcccagaaaacaaacggtgacacttcatctcttcagcgtcagaaaatgggcatagaatgtacccatgcaattgaatgtatctcattctccactggcatagtagatataaactattcctttgcctaccttttactgccttatcctggaaatattggggaaaataagccatatcagtgagatttacctaaaaacaaaggaaggaaagtcactatggaaaccaagtagatgctttttgtaagtttggtggagcataactggcccagaagtctgggtgcctgagttctagttcgtgctctgtcaactggtagatttgtaattctaggtcttggttttcttacctggtgaataagtcatgatctctaaaacccttcctgcccttaatattgtctgaatttcaaggggaaaaaaaaaatctggttcctttaattatttttttttaacacttaaattcctaactttattagacaagaagtatggcccacttaacagttaaggaacgtaaatttgttattggctcgaaataataatttgacacaatactagtcaaccatttagaggccttggaaaaagaagaggaacagcactgaaaattccaagtatgattggaaattatctgggagcggggaattaaatattcaatgcatgaaagcaattgtactggcttctgggaaaaaggaaacaagaacattgctatggaacttgttacccagagaaaggaagtgaaagacagattgttttggggtttggttttgtctaggcagcctctggccaggctccttaattgcttgctctgctaatatttcagcttcctctcttgactccttgaggaaccaaccgctctttggaagacaaacacttagccacctctgtgctccagggtaaccctgagaagctctgctgtctggggcaagctttctttccaaagggaatgagaggaaggcaagcaggcagggtcctgcagcgtcaggccttctggggaaagtttcctcattttgtttgacagggtcctcagtacatcagacacccagatttgaatataagttcagagcctgatctcaagctaaatcagaatgctttggggactaaccatgatcgagaattggccaaatagtatggcatataaacagccatccagccagccgcaagtaaaggaacgtttgatccttggcaccttaaatgattgattgccttcaataggcaaactgctggtctggaaatctcgttgaaggctgaatacttcatgcggagtaggacaagccttagcccaccttcaggttgaaaggaaaggccataggactcaaaagataatgactctgaaactaaactccttccttctgaagctgacagaggtacttagtgcatctcaagactccatctcataaaactcatttgtgagggatttgctctagatttttctaaacattttttcatctattgtccagacttgcaaatccagtgtggacctgatggagatacccttcacacctgcgctcccaccccctcggcagggagacgtctcagtagaggagaacacacccattatgctgggatttgtatttataaatcacttcccttttagggatgagcggtgtggggcgtgtgtgcgtgtgagtgtatgcgcgtgcgtgtgtgaccctcaagtgtactttgctcaatttagacgtgcagtatttccagaaacaatgaaaaaagtaagatgttttcttctttatgattctgctcaaaacaccacgtgccgcctcagagctttttctagagcctcggtcctcaatgacgcgcttgacctgttgatgcctcagcccagcgaagccccttcacctgtgccccgggcgacagttctttcagtgtggcagtgcaggcctgggggtgggactgccagggctttcgctcttgttgccagcaacggcctttcttgttgctcctccatgaacagcgggtacaagccctggcccctcctcgacactaagccccccacagactcagcctccaaggaaccgctgagcacccttgaagcatgtcattgtcagtgatacctttttattctatggaactctaacctattcgtgtcatattgaccttttgctgcatgagtcataaattatgaaatcagtcttacagtttttgaaatgtagccagcatttgtaaggctaaacctttttcatgaactgaatttaagtgaataaccaagccacagttcctcctcaaatggagagtgatgatcgacatttgaatctctttgccctttccaacggctatggcatcaggttctaaaataagctcgtaatttttcctgttattttaataatatggaaatattagcatagtgtttcttttgatagtgatagactataatccatatttaaattttatagagaagaaattttattgtactgtgatgtagatatttattatccaggtaaggatttgcccggtgtgtattttttacaattgagacattttactttaatctttaaaaaaaatgcattaaaaacacactcaaaaaaaaaaaaaaaaaaaaaaaaaaaaacccnatngnggggggaaaaagggttggggcctttttcacaagaattttaaaaggggcgggacaaaagttgtttggacattgggaaaagtgggggatcttaaaggggtgtgtcccactttatataaaaggggcggctttaaggaggacatttt

SEQ ID NO: 98217 - DNA, 5765 bp, Homo sapiens
  misc_feature (5617)..(5617): n is a, c, g, or t
  misc_feature (5620)..(5620): n is a, c, g, or t
  misc_feature (5622)..(5622): n is a, c, g, or t
cggccgcctctcttcgcccaaggagttgacattttgcaggactcgcgcgacgcccagtcgccggcgctccccgggaccccgccgccgggaggagggggcggaggagggtggagactgcggggcttggccaaggaaggcgcacatcctcgggcgggcggccgtgacgcggcggggatcaactttgcatgaataatatctgcgatttccttctggttggctgtcctgcgtgggtgccaagttccacacatgatttaatgaataagaaggagatgtcagtgaaaaaagggatccagaatgattactaacctatgactcccaacagtatgacagaaaatggccttacagcctgggacaaaccgaagcactgtccagaccgagaacacgactggaagctagtaggaatgtctgaagcctgcctacataggaagagccattcagagaggcgcagcacgttgaaaaatgaacagtcgtcgccacatctcatccagaccacttggactagctcaatattccatctggaccatgatgatgtgaacgaccagagtgtctcaagtgcccagaccttccaaacggaggagaagaaatgtaaagggtacatccccagttacttagacaaggacgagctctgtgtagtgtgtggtgacaaagccaccgggtatcactaccgctgtatcacgtgtgaaggctgcaagggtttctttagaagaaccattcagaaaaatctccatccatcctattcctgtaaatatgaaggaaaatgtgtcatagacaaagtcacgcgaaatcagtgccaggaatgtcgctttaagaaatgcatctatgttggcatggcaacagatttggtgctggatgacagcaagaggctggccaagaggaagctgatagaggagaaccgggagaaaagacggcgggaagagctgcagaagtccatcgggcacaagccagagcccacagacgaggaatgggagctcatcaaaactgtcaccgaagcccatgtggcgaccaacgcccaaggcagccactggaagcaaaaaccgaaatttctgccagaagacattggacaagcaccaatagtcaatgccccagaaggtggaaaggttgacttggaagccttcagccattttacaaaaatcatcacaccagcaattaccagagtggtggattttgccaaaaagttgcctatgttttgtgagctgccatgtgaagaccagatcatcctcctcaaaggctgctgcatggagatcatgtcccttcgcgctgctgtgcgctatgacccggaaagtgagactttaaccttgaatggggaaatggcagtgacacggggccagctgaaaaatgggggtcttggggtggtgtcagacgccatctttgacctgggcatgtctctgtcttctttcaacctggatgacactgaagtagccctccttcaggccgtcctgctgatgtcttcagatcgcccggggcttgcctgtgttgagagaatagaaaagtaccaagatagtttcctgctggcctttgaacactatatcaattaccgaaaacaccacgtgacacacttttggccaaaactcctgatgaaggtgacagatctgcggatgataggagcctgccatgccagccgcttcctgcacatgaaggtggaatgccccacagaactcctcccccctttgttcctggaagtgttcgaggattagactgactggattccttctctataattcctacagcactactgggtgtcatttcattccattgcctagctcttttttgtttgtttctttgtgttgggagggattatttgggagggaaaagggaagtagtccttggcatagacatggatgaaattgccccttgaatgcgggtacttgaaactattgcatttcgttctccggtcctgtgatgtgaatgctctgaaggttttatggttgtggaggtggggtgggggacaatcattaactcaccagcaccaagcatcaccagctcccacccgtccctggtccaagacttgagtcagcaaaatggcgccacaggacactaaagaagccttaaaaccaagataatacgaccacctccacccaatcctgatgttcgcagggctgaagttaacagagcacagaccacctttagttagatgtggctttcagctttttagggaaagactcgaacaaattttcatctattcaagagcatgctgtttgcagcactctttatggtctcctaggagcataacttggaatgtacaggaatatttgtgtcctaaaaaaatcagctgcccttccaatatcatttttataacgttatggtttaattcaagttatacaaaggtgtgactcaaggatgtgcaggtattgactgatggaggccgacaaggaaaatattttttttcagtgagccgagagaaattagaaatcttcaccaatgtcagtgactgcatggtttccaaaaattcacatagtattacctcacagtaggaaggcttctttcccatttaggctcagagaacacttttacagaaatcaaacctatttacagggtggcaccccttttctgtggcatctgatctgtcatctcccaagctcctgaagttctttatccaggttgtatctttgctgagctgacaactaatttctctcggacaaatgattctaatcaaggaaagatacggtgaaacttcagtcttcttctggaggaatgctgaggcgagattagtgcagctacattctgagttgaaggaaatgcagtgttctgagggcccctttgtgtcctgatggctggaggacgcttcctcctggttagatcctcaagctccttgcctcattgacaaatgtctcctagtcccctttttccctctgactctgaggaactaaatagcttgactatctctaaacagagactggccctgccactgaccctcctgtccctctcatagcataccctgacagatactcaatagaaaacacctgcagaccatgtgcacacttaactttcctgcccaacctgcctccccaacggcccatgctagaatagcttgtgcccagaaaacaaacggtgacacttcatctcttcagcgtcagaaaatgggcatagaatgtacccatgcaattgaatgtatctcattctccactggcatagtagatataaactattcctttgcctaccttttactgccttatcctggaaatattggggaaaataagccatatcagtgagatttacctaaaaacaaaggaaggaaagtcactatggaaaccaagtagatgctttttgtaagtttggtggagcataactggcccagaagtctgggtgcctgagttctagttcgtgctctgtcaactggtagatttgtaattctaggtcttggttttcttacctggtgaataagtcatgatctctaaaacccttcctgcccttaatattgtctgaatttcaaggggaaaaaaaaaatctggttcctttaattatttttttttaacacttaaattcctaactttattagacaagaagtatggcccacttaacagttaaggaacgtaaatttgttattggctcgaaataataatttgacacaatactagtcaaccatttagaggccttggaaaaagaagaggaacagcactgaaaattccaagtatgattggaaattatctgggagcggggaattaaatattcaatgcatgaaagcaattgtactggcttctgggaaaaaggaaacaagaacattgctatggaacttgttacccagagaaaggaagtgaaaagatttacaattataagcacgaaattcattggcagattacctgctttatctacagacagattgttttggggtttggttttgtctaggcagcctctggccaggctccttaattgcttgctctgctaatatttcagcttcctctcttgactccttgaggaaccaaccgctctttggaagacaaacacttagccacctctgtgctccagggtaaccctgagaagctctgctgtctggggcaagctttctttccaaagggaatgagaggaaggcaagcaggcagggtcctgcagcgtcaggccttctggggaaagtttcctcattttgtttgacagggtcctcagtacatcagacacccagatttgaatataagttcagagcctgatctcaagctaaatcagaatgctttggggactaaccatgatcgagaattggccaaatagtatggcatataaacagccatccagccagccgcaagtaaaggaacgtttgatccttggcaccttaaatgattgattgccttcaataggcaaactgctggtctggaaatctcgttgaaggctgaatacttcatgcggagtaggacaagccttagcccaccttcaggttgaaaggaaaggccataggactcaaaagataatgactctgaaactaaactccttccttctgaagctgacagaggtacttagtgcatctcaagactccatctcataaaactcatttgtgagggatttgctctagatttttctaaacattttttcatctattgtccagacttgcaaatccagtgtggacctgatggagatacccttcacacctgcgctcccaccccctcggcagggagacgtctcagtagaggagaacacacccattatgctgggatttgtatttataaatcacttcccttttagggatgagcggtgtggggcgtgtgtgcgtgtgagtgtatgcgcgtgcgtgtgtgaccctcaagtgtactttgctcaatttagacgtgcagtatttccagaaacaatgaaaaaagtaagatgttttcttctttatgattctgctcaaaacaccacgtgccgcctcagagctttttctagagcctcggtcctcaatgacgcgcttgacctgttgatgcctcagcccagcgaagccccttcacctgtgccccgggcgacagttctttcagtgtggcagtgcaggcctgggggtgggactgccagggctttcgctcttgttgccagcaacggcctttcttgttgctcctccatgaacagcgggtacaagccctggcccctcctcgacactaagccccccacagactcagcctccaaggaaccgctgagcacccttgaagcatgtcattgtcagtgatacctttttattctatggaactctaacctattcgtgtcatattgaccttttgctgcatgagtcataaattatgaaatcagtcttacagtttttgaaatgtagccagcatttgtaaggctaaacctttttcatgaactgaatttaagtgaataaccaagccacagttcctcctcaaatggagagtgatgatcgacatttgaatctctttgccctttccaacggctatggcatcaggttctaaaataagctcgtaatttttcctgttattttaataatatggaaatattagcatagtgtttcttttgatagtgatagactataatccatatttaaattttatagagaagaaattttattgtactgtgatgtagatatttattatccaggtaaggatttgcccggtgtgtattttttacaattgagacattttactttaatctttaaaaaaaatgcattaaaaacacactcaaaaaaaaaaaaaaaaaaaaaaaaaaaaacccnatngnggggggaaaaagggttggggcctttttcacaagaattttaaaaggggcgggacaaaagttgtttggacattgggaaaagtgggggatcttaaaggggtgtgtcccactttatataaaaggggcggctttaaggaggacatttt

SEQ ID NO: 98218 - DNA, 790 bp, Homo sapiens
cggccgcctctcttcgcccaaggagttgacattttgcaggactcgcgcgacgcccagtcgccggcgctccccgggaccccgccgccgggaggagggggcggaggagggtggagactgcggggcttggccaaggaaggcgcacatcctcgggcgggcggccgtgacgcggcggggatcaactttgcatgaataatatctgcgatttccttctggttggctgtcctgcgtgggtgccaagttccacacatgatttaatgaataagaaggagatgtcagtgaaaaaagggatccagaatgattactaacctatgactcccaacagtatgacagaaaatggccttacagcctgggacaaaccgaagcactgtccagaccgagaacacgactggaagctagtaggaatgtctgaagcctgcctacataggaagagccattcagagaggcgcagcacgttgaaaaatgaacagtcgtcgccacatctcatccagaccacttggactagctcaatattccatctggaccatgatgatgtgaacgaccagagtgtctcaagtgcccagaccttccaaacggaggagaagaaatgtaaaggtaaccagatttttattagcccattatcatgtgtttcaacaagaaaaaaaatatccctgttgtagctgtgtacttcatctacatttctcttccaatgtatggtgtcccatgttttctccaactgttcttttactaggcgtccttttcttcaaatattcttttaaacataaataaataagtggaatccaaagaaaggcag

SEQ ID NO: 98219 - DNA, 736 bp, Homo sapiens
cggccgcctctcttcgcccaaggagttgacattttgcaggactcgcgcgacgcccagtcgccggcgctccccgggaccccgccgccgggaggagggggcggaggagggtggagactgcggggcttggccaaggaaggcgcacatcctcgggcgggcggccgtgacgcggcggggatcaactttgcatgaataatatctgcgatttccttctggttggctgtcctgcgtgggtgccaagttccacacatgatttaatgaataagaaggagatgtcagtgaaaaaagggatccagaatgattactaacctatgactcccaacagtatgacagaaaatggccttacagcctgggacaaaccgaagcactgtccagaccgagaacacgactggaagctagtaggaatgtctgaagcctgcctacataggaagagccattcagagaggcgcagcacgttgaaaaatgaacagtcgtcgccacatctcatccagaccacttggactagctcaatattccatctggaccatgatgatgtgaacgaccagagtgtctcaagtgcccagaccttccaaacggaggagaagaaatgtaaaggtaaccagatttttattagcccattatcatgtgtttcaacaagaaaaaaaatatccctgttgtagctgtgtacttcatctacatttctcttccaatgtatggtgtcccatgttttctccaactaccacggggccggggatcctca

SEQ ID NO: 98220 - DNA, 408 bp, Homo sapiens
cggccgcctctcttcgcccaaggagttgacattttgcaggactcgcgcgacgcccagtcgccggcgctccccgggaccccgccgccgggaggagggggcggaggagggtggagactgcggggcttggccaaggaaggcgcacatcctcgggcgggcggccgtgacgcggcggggatcaactttgcatgaataatgtgagtgcgcttggaaaagagacctcctgctccgcgggctcggggcaagagcccgcaggctaccttccccgggcaggggcgctcaacccaaccggctccagggcactgatctgcgatttccttctggttggctgtcctgcgtgggtgccaagttccacacatgatttaatgaataagaagctcgccagagacgcaaactccagcatttatattt

SEQ ID NO: 98221 - DNA, 583 bp, Homo sapiens
ggtagaaggtggtaaaaacagagttgccactctcggtgtggccacgtgagcacgtcccacttaagtaacagggtgtccctcaggtcagcttgtgataaaacccaagtcaaacaaggctgaatcctgggtgttttatgtcctaaggatctgaaaagtgttcacggccagccctgaccctcaagacctcaaatggtcatctaagcagtaacgtaaattggtgtgtaaacttgctcctgggccattgctgtggaagtgggactggcgaaagtacagccttgccatgcaggaactaatgtctttctaggcatttaaaataagggggaatgtgttgattactccgacaggcaacccaactgcagtggctaaatgcccaaggctgacaaattctgcatcttatcactcccgtcaagtggcatgtgaatactgtcagcccaaaagaattgagaaacaacttgccttccaaaactctgcatctcagcaaaatcttgacaatgccaacagctcgtcatctcgtgtttttcaaccctttagaaaatggccttacagcctgggacaaaccgaagcactgtccagaccgagaaca

SEQ ID NO: 98222 - DNA, 180 bp, Homo sapiens
gtaacgggttaggtgcagtggctcatgcctataatcccagcactttaggaggccaaggcgggaggatcctttgagctccggagttcaagaccagtctgcgtaacatagtgggaccccatctctacaaaaaatttaaatatttttaaaatgtcttaaaaagaaccagtcgtggctacccat

SEQ ID NO: 98223 - DNA, 142 bp, Homo sapiens
agataggaggattgcttcagtccaggtgtgcaaaactggtctgggtaacatggggaaaccccatttctacaaaaaaatgcaaaattagctgggcatggtggtgctcacctatgatctcagctactcaggcagctgaggtgga

SEQ ID NO: 98224 - DNA, 719 bp, Homo sapiens
agaactaaatctagatcttttgtcttcttggtaactgataatgacatatttattccattgattctatgacatggacgaataaaagctgcttaaggccaggcgaggtggctcacacctgtaatcccagcactttgagaggcctaggcaggtggatcacttgaggtcaggagttcgagaccagcctggccaaccaatatggtaaaacctcgtctccactgaaaatatgaaaattagctgggctttgttgtaggcatctataatcccagctactcgtgaggctgagagaagagaatcacttgagcccgggaggcggagtttgcagtgagctgagattgtgccactgtacacactgtacactgtaccactgtacagcctgggtgacagagtgaaactctgtctcaaaaaaaaaaaaaaacagaagctgcttaagactccttatgcttttgagctgtggtccttgataatccttgataatggatagtaactttgaagttaaaacattttataatgtatttttggcactggtattggttctagctgttttagaagaaagttagcattttcttattacatatatgaaccaggcagtacattttaaactatataatagagtcattgtgagttaataggttatcattttttaacatgaggataagatctgagagatacccacaagctagtaaataagtgagttttaaactatataatagagtcattgt

SEQ ID NO: 98225 - DNA, 513 bp, Homo sapiens
gtgaattagaaacttcctctgtaaactagcagagtagaaataagaggccaggattcagcaccaggtaggctggattccttcttaggtggctcaagctggctatggggctggtctcatcatatctaaagaactgcccagcttttacgcattttgaatgtggtggaaccagctgcatatttttatatgagagcggcaaatagtcattgtgttccagtttgcttctcgggtcatctaaacatcagaggccatgccacaagcaccgtaactgagggatatagtgtgactgtggtccaggccagtgacctctggagctgaatcatgacttcccagatgactcccagagcctgagaggggactggtgcgtggctccaaatgattttcacctgggcctctttgaagtcgggagagatacgtgcagtatggtagatgtggagagggagaggcatggtgtgtccaaaaattagcaggacctgatccatatacgtggattctgaagcagtgcacttactagat

SEQ ID NO: 98226 - DNA, 1431 bp, Homo sapiens
taagaataactcaggtgactgataccaaaaataaatctctaatacagctgagaatccagaaacacaaataatatgttgagtaagtaataaaagtgacatttcaaattagtaaggaaaaaatggattattcaacaaatagtatgggatagcataacaatttagaagaaatataaagttagatctttcacaaaaattaattctagctagactagcagttagtcttctactttttggttactcccttttagaaattggaagctatgaagctatataccctgtccatttgaaaatgcacataagcaaagaactttacaaataggttataaagagaagctcaatctcagcaaaataagggaagtgcacattaaaacacaagaaaccatctcagatccaactaatatttagcgtgcatacaaatcaaaagctggaaagggtgtggaaaaacaggaatacattgctagtgagcatacaaattggcacagcctcttttaaagacaattgtgtatcacccattaaattttaaaagtcacataccctgtgacctaacaattccaacttttaatgtcctaaagaaacatacatgtgttcacaagatagcctgtacaatgatgtcaattgcacctttgcttgtacagtagacccccttatctgcattttcactttttgaggtttcagtcatccaaggtcaaccacaatacaaaaatattaaatggaaaattccagaaacgaacataagttttaaacttcaaacctttctgcatagtataataaaaatctctcactatccctctccatcctgcctgggacaggaatcatccctttgtccagtgtatccacaatgtatacactcattatatacccattttataatgcccattagtcatttctattatcagatcataaaaaaacatagtacatagagggtttggtattattcatggtttcaggcattcagtgagggtcttggaaaatatcctccatgatgggggagctactgtaatactatgaaattggaaaaaccaaaatactcatcaagaggatggactatggtacacatgatgaagtattaagtatcaatgaaaaagagagagtcctacatgtccggcatggaaggatctccaggagacaatgttaaaagtttgggggaaaaattgaaagacaatacctgtaatacatatgatactagtgatgttaaatcacatcacacacacacacacacacacacacacacacacacaaatactgtatagtgtacttctacaagtacatatttgtgtattatatagagagaaggtctggaaggatactaaccaaactgtcaacagtagtttggtagcgtgcattagctttaactgtaatgtttgatgtttttgaatatgcatttatgtattgtttgtgtaatgacaaattaataaattagaaataaaataa

SEQ ID NO: 98227 - DNA, 1229 bp, Homo sapiens
aagcagtggtatcaacgcagagtcgccattacggccgggcttttagaaattggaagctatgaagctatataccctgtccatttgaaaatgcacataagcaaagaactttacaaataggttataaagagaagctcaatctcagcaaaataagggaagtgcacattaaaacacaagaaaccatctcagatccaactaatatttagcgtgcatacaaatcaaaagctggaaagggtgtggaaaaacaggaatacattgctagtgagcatacaaattggcacagcctcttttaaagacaattgtgtatcacccattaaattttaaaagtcacataccctgtgacctaacaattccaacttttaatgtcctaaagaaacatacatgtgttcacaagatagcctgtacaatgatgtcaattgcacctttgcttgtacagtagacccccttatctgcattttcactttttgaggtttcagtcatccaaggtcaaccacaatacaaaaatattaaatggaaaattccagaaacgaacataagttttaaacttcaaacctttctgcatagtataataaaaatctctcactatccctctccatcctgcctgggacaggaatcatccctttgtccagtgtatccacaatgtatacactcattatatacccattttataatgcccattagtcatttctattatcagatcataaaaaaacatagtacatagagggtttggtattattcatggtttcaggcattcagtgagggtcttggaaaatatcctccatgatgggggagctactgtaatactatgaaattggaaaaaccaaaatactcatcaagaggatggactatggtacacatgatgaagtattaagtatcaatgaaaaagagagagtcctacatgtccggcatggaaggatctccaggagacaatgttaaaagtttgggggaaaaattgaaagacaatacctgtaatacatatgatactagtgatgttaaatcacatcacacacacacacacacacacacacacacacacacaaatactgtatagtgtacttctacaagtacatatttgtgtattatatagagagaaggtctggaaggatactaaccaaactgtcaacagtagtttggtagcgtgcattagctttaactgtaatgtttgatgtttttgaatatgcatttatgtattgtttgtgtaatgacaaattaataaattagaaataaaataa

SEQ ID NO: 98228 - DNA, 438 bp, Homo sapiens
tagaggatcgcctcaatcgacggtttctcgtgtgaatgagggtttatgttggttaatgtggtgggtgagtgagcctagtatgaggagcgttatggagtggagatgaaatcacttggcaatgaggaaaagaggcaacagggctccttgtagacatatacatgatacaaaactactaaatatacatagaaatgatacaaaactactgatacaacatatgaatgatacaaacctactaaatatacctaggaatgatacaaaattactaatgatacaaacataaatgatacaaaactactaatgatacaaacatatgaatgatacaaaactactaatgatacaaacatatgaatgatacaaaaactactaatgatacagacctgctactgatacaaacatgaatgatacaaaactactaatgatacaaacatacgaatgata

SEQ ID NO: 98229 - DNA, 263 bp, Homo sapiens
accgggaggtccgcaacggctgcggggacaagtccgttgaggctgccaggcgagtcaggtctctctggacctcgcctgactcggctgggctgtgcctgaaattgacccagctccaccatactccttgattatgagaaaacaaggagtaagctcaaagcggctgcaatcttccggccgcagccagtctaaggggcggcgcggggcctccctcgcccgggagccggaggtagaggaggagatggaaaagtcggccctaggcggcg

SEQ ID NO: 98230 - DNA, 493 bp, Homo sapiens
aaacaatgactggcagtagagcagagactacaagttgtttaccaaaaaataaattctcttcctttcaataatggaagtgctatgtatatccatgtccaactatactgcatgtgtcccttgaggttagatgtagccatttaaataaattgtttcaatagtatgcatacaaaaggatgtatcctacttccaatctgggctctcaagatcactttctctttcaccttcctgtgaaattaagcaatttaatatattgttaatataagtattgttatattattatatataacgatatattgtatatagttagtataagtattaacatatatacttcagacttagaaaaataaaatactattttgtcttaaccattattgttttggcctctttgtcatagccactagcattcctgaatactaatatagcaaagaaagtgtctcatcttagtcccagtgcactttcaaactggctcaggtaaagatatgacatcattcct

SEQ ID NO: 98231 - DNA, 749 bp, Homo sapiens
attctgggctggagcccaaccttattttccacaactaattatctttttaatcagcctgagccctgtatgtttcctttatctcttgacttgtcactgaactctgccctacatcatttagattcatttctaatggcttgctgactaatctaacattcaggtgagtatcgttgggctgctctttatgtacgtgtatgcacaaggtgaatgcgttttccttcttttaatttcagaggtgaccgcgccatgttggggcctttgacccaatagatggacacctcatggagacagtgagcaggaaagcaaatgtaggatgatcagtatttgggataatgagttgggagaaccagaagctttgacctccggatgagaacaggaacttgaatgttgttgactgatgggatctttatgctgctgagccattagcaagatgatccctccccctctgtaaatcctatagttgctggagtagaaagtggcatctggaatactgtttggtcttgatttctgcagctctaggaaaaaaagaattttagacttgagggaattcagtgcaagcaactgaaatgattaaggagttgaaggggatcaactccaggggagaaatgttacgaagataaaatatgtgtaactctagtttggggatgtagctccaatacctgcagtttacagatctcacaggagttctaaacatttgccagcttgtcttgcacagctcccattcattccaattgtatagcttgggaagatag

SEQ ID NO: 98232 - DNA, 175 bp, Homo sapiens
caggtggctcccaggagcagagaaattcaagcaggctgttgtgtaggctgaattcccacctactgcatggagaaactggaacatggacatggaatagcatttctgcatggaatctgttttttttttcttctctggctttgaaatttgcatttcttttagtaaaataagctggttc

SEQ ID NO: 98233 - DNA, 1047 bp, Homo sapiens
ccttgccagagcagcgcatagcaggcccctgcagaggattaacacggtggctgaacaccggaaagaactggcacttggagtcgcgacatctgaaacttgctatatggaggaagcagcagagaagggcaaattttaaaaagtggaagaaaactggtatgcatattttcaaccaagtgaaaacgtcaaggaggttaaagtaatcaactgggtcaaatgctgctgagaggtcaaataagtcctcaagaataactgtagaatgtgctgggagtgcaacatcctaaaataaggaggaagtggctgaaacagcctgggctgtattcctgtctccatctagcacaagatgtccttcaaccctttagcccagcgtgcaaggtaagctgcttattggggtccctcagctgtggtgcaagaagagcatgtgcagttaagacaccatctaccgtaggcagctttctgagttacaagggaccaacacacaatgaaccctagtcttgctatcccttgctgcctgtctgtaagtacaaatttgcttcatatagcttgcttatgaatatcttatgtctcagctgattcaaagaagttggtaagcagtgcacagttaacctgcttcacacttacaattttctgatctttcacaaattactgggcattggtcttacatcactgctctttttgaacctcgggatatggtagatacaaccattcagtttatatatttttttatttttgggacggagacttgctctgtcacccaggctggagttcagtggcctgatctcgactcactgcaacctccgcctcccgggttcaagcgattctgctgcctcggcctcccaagtagctgagactacgcgcaccaccacacctggctactttttgtattttttaatagagacagggtttcaccatgttagccaggctggtctcagactcctgacctggctcacgcctgtaatcccaacactttgggaattaatctttagaactgggccattttccctaaccacctccaagctccctcccaaataatcctttgagcttccctcc

SEQ ID NO: 98234 - DNA, 764 bp, Homo sapiens
agtgtctgaaaggttttgtctgcagctcgtcctgctacatttcttggttccctgaccaggaaacgaggtaactgatagacatagacggcagagctaacccgttaggcggcttaggcctgtcctgtggagcgtccctgcaggggactccagtcagcctgagtgacgcgatccaaagaacgctcccgggtaggaaattgccccggtggaatgccttgccagagcagcgcatagcaggcccctgcagaggattaacacggtggctgaacaccggaaagaactggcacttggagtcgcgacatctgaaacttgctatatggaggaagcagcagagaagggcaaattttaaaaagtggaagaaaactggtatgcatattttcaaccaagtgaaaacgtcaaggaggttaaagtaatcaactgggtcaaatgctgctgagaggtcaaataagtcctcaagaataactgtagaatgtgctgggagtgcaacatcctaaaataaggaggaagtggctgaaacagcctgggctgtattcctgtctccatctagcacaagatgtccttcaaccctttagcccagcgtgcaagccctggttctcggtctctcctgtagtactaccagaacgtttggggtcagaaatcggatatctacacttccccgtctcccaaaagagcttccctccttaggcgtccggaggtctcttggatttttcactgctaatcccatctgtcttcactagactcacttcccacaacttgctccaggaggg

SEQ ID NO: 98235 - DNA, 326 bp, Homo sapiens
gttcaagctgttctcgtgtctcagcctcccaaatagctgggactacaggtgcgtgctaccacacccagctaatttttgtatttttagtagagacagggttttgccatgttggccaggctggtatcgaactcctgagctcaagcaatatgtccacctaggcctcccaaagtgctaggattacaggtgtgaaccactgcgaccagtccttatcacttttagaataaaactaaaaatcctcactttggccacacagcctcacagaatttggcctctggctagctatctgatttcacatttgatcattgtttgcccacctggctatactg

SEQ ID NO: 98236 - DNA, 697 bp, Homo sapiens
agcgggtgtatggaaaataaacctcattttaaatataatttatatattaaatatactttgtttcaaactgaaaaataaataagacatttgtggcctggatcttaccaaaaagattaacaatggttatgtctttttccacataaggaaagtaagaacttattttatgttttaagctcataactcttattaaatattggtaattaatacactaatgaaaaattatgtctggtttctaaggttataatattggaagacaaccaccttcaaagagaatttgaacctattctaactgattttaccttgaaataactatgcactaaaaagaaatcagaatcttacttgaacttgagctactcaggtcaaacttgagctactcagatactgtttaaattgtactctgagactcacaactcattgtggagaaaaaaatctaaccaccacacagccaagccatggctcaaaaaaagaaaagccattaataaagaagtcattaatattatcatctgtcacaccaaaggaagagggtacttaggccatgaatatattctgatacggaaaactaggttggaaaactgaggattgataattgatgataacctatcctctgttcaccatattcaataaataggtttaatttttttaatagggtacacaatttgtctaattcatgtgggcagctaaggagattgattataag

SEQ ID NO: 98237 - DNA, 349 bp, Homo sapiens
tctccaggtcctggaggcaaccgcagaaacagaacagtgcaaatgccagcatttccgcagataagcgtggcccgccagctgcaaacacccctgacatgcagccgtctgtttaaaatctggttgcccgctgcagccagtggagctcagagggctgcctggcgggtaaggactccaggcacacagcaacaagtggctgccacctcaaatcccacgtggaatatgatggggtccgagccagccagtaactccaggagggctgtagtgtgtaagttcggccagagtttgcagatataataacattggccccacgacgtagacctgtggcggctcagggttaagagacggaagc

SEQ ID NO: 98238 - DNA, 419 bp, Homo sapiens
gggcaacaatttattctatctgtgtactctgctagggatgcagtggtgagcaaacaggcaaggtctctgcccttggagaatgtaatctaactgggatgccagaatctaactgggatggtagctattaggcaagtaattctataaataaataaatcattaacaaatcatttaaagttacaataaggtccaggaaggaaaagtatgaaatttgagattgcacaggacctggggtctagacctggtcagggtggggcagggggtccgggcaagcttcctgaggaagtgttacctgggctgaaagctgaagggagaggaatgaggaagagcattccaggtaggggaaagcatgtgtgaagaggccgtgtgcaggtgaggtctattaaagaacatcgatgaagtccacgtggcttcacatggag

SEQ ID NO: 98239 - DNA, 372 bp, Homo sapiens
tttttctttcgcttgtttctttctttggcttttaattatggaggaatttaacaaaaacatgtagacaaaagtacacatggatctgttcatgtatccatcactgagatgcagaaagatgcagaatcataattgtttgccaactttgtttcatctcttttttcctacttctttccctacttgcaaaggattattttaagcaaactttagacataatatcatttcgtcataataaacttgtctttgcataaccaatatttttttccttttttctctttctttctctttcttctttctttcatctcttttttctttcttcttcttttctttttttttttttttgagagtgtctcattctgttgctcaggctggagt

SEQ ID NO: 98240 - DNA, 673 bp, Homo sapiens
aattatttcccttttaatcttctctactttctgagttaagagctgtttctattccccttttgcaaaggaggaaaccagtgtagggagattcagcttcttccctgatgtctcaccagattcagcagagcctggcagagttggtgccagtgcccctacgtgatgtgctgtggtgtctactaggctagggctatgaaagtgggctgtggactcctttttgaaatgtggccagccacaatgtcccttccctcccaggactgccttcgtgttttttttttcctggccccttttaaaaatctcatccaacattacactttggatgtgcttattgttttctagtctcctccccactaagacctccaatttctcccctgattacaactgaatttcttcatttagaaagtcagaaaccagtctggggaatactgtggaaggtggagcactagcatgactggatatgtgaaacaaaggacaagtggattctctgggggaaaaaaaccctagaaaacacataaatgcatcatgacaggacagtgactagaatgtgttcatcctaaccatgggaacagagcaaagaattaatttctaaattcgctaccaggatttaaaactgggacgatttcacattaatactgcatttctgacttttgggggaaaaaaaaaaacagttcaaaga

SEQ ID NO: 98241 - DNA, 157 bp, Homo sapiens
ggtctaatattaaccccacattcatagccgggttattgccaccaccacacaaaactctgggggccctggatccaggctaagtataattcagtgcacttctgtggggcacctactgtgttgcaagcatgatactcagataggacagcaaagacaaaag

SEQ ID NO: 98242 - DNA, 410 bp, Homo sapiens
tactaaattaaaaacaccagctaggagaacagtagttacggattagttagtctccatcataaacacagggatgtgagagcattttagcattttcatattgtaccatctgagtctgatgcaatatatgcatttacctctgaaatctttaaatattataaaacaaagtgacctagaattgaaatttgttatggcacttgatatttgatttgccccaatggcacatactccatcaaggccaaaactgtaatgaaagatgcgatttctagccaacttctagttctggatcaacagaaggaacacaggagttcaaaggtttaaatttgtgtttgagggttatggggagatatgtcatacaataattaaataccttttgtcttttataaaggaactacacaaatatttgccctaca

SEQ ID NO: 98243 - DNA, 691 bp, Homo sapiens
agcgggtgagcagtgctgaccctaccctgcgtcacagcacagtggcctcatcagaaccaagacgaccaaccttctccagagaatggacttctgttgggagactctcctctttctacaaacaaaatggccagcttgttgagaatttttagtaccatttgcagagctctccataatgtgatacagactctggcctgaagaaagcacaaaataaacatgaacaaatcataactgtgcttcagtaggatcaccgagagccaagatacagatttgtgagataactacaagttttggtatcaggatgatgctggactcataaaatgaattagggaggagtccctccttttcaattgtttttccatctatccatctgacaaaggtctaatatccagaatctacaaggaactcaaacaaatttacaagaaaaaaaaccattaaaaagtggtcaaaaatatgaacagacacttctcaaaataagacatttatacaaccaccaaacatatgaaggaaaagctcaacatcattgatcattagagaaatgcaaatcaaaaccacaatgagatacatcacatcagtcagaatggcccttattaaaaagtcaagaaacatcagatgctggcaagattgtgcagaaataggaatgcttttacactgttggttggaatgtaaatcacttcaatcattgtggaagatg

SEQ ID NO: 98244 - DNA, 593 bp, Homo sapiens
tctttaggagtatatttcaagagaatatgagatcagcctactcattcgatccggctaatttttttgtatttttagtagagatgggatttcactgtgttagccaggatggtctcgatctcctgacctcgtgatccgcccgccttggcctcccaaagtgctgggattacaggtgtgagccaccacacccagccagatccaatattttaaaaggataatcaacataaatgaatttaggttttttgtttgtttgtttgagttggagtctttctctgtcaccaggctggagtgctatggcgcgatcttggctcactgcaacctccgactccctggttcaagagattctcctgcctcagcctctcaagtagctgggattacaggcacgtgccaccacgcccagataatttttgtatttttagtagagacagggttttcactatgttggccaggatggtctcgaactcctgaccttgtgatccgcctgcctcggcctcccaaagtgctagtattacaggtctgagccaccgcgcctagccgagtttaggtttatttgaggaatgcaagatagtattacatgataatctaacgatgtaatt

SEQ ID NO: 98245 - DNA, 552 bp, Homo sapiens
ctccatgtctaatgattaccagggacacagactcatttcggaatctaaagcccaagatgccatgtgaccccgatttgtctagcctgacagactgctgctgtcttggctggctctgacctctggggaaatggcccaacctagcaccttaggtcctctcgtccttggcaaggggtgggcggacaactgacaggtgagctgccccttggataacaagaacagcggcttgaattcagaggtccctgcctgatctcttcttgcacccagtctagctgctcctccacatggttctggaagtttccatatccctggccttggaatgtaggttgttatcccagatctcttggctccaggtgagaacttcagagcttgcagcctgggttcaaatccttcctctacctctttcttttctttttattcttttttctttgaaaccgagtctacctctgtcacccaggctggagtgcagtggcacgatcttggctcactgcagcctttgcctcctgggttcaagcaattctcctgcctcagcctcctgagtagctgggattacag

SEQ ID NO: 98246 - DNA, 424 bp, Homo sapiens
cctgtgtgcattttctggggttcatctgggggacatctggctttcacaggattctataaggcacctgtgacccttcccctccccattaagaaatacttccctaagacagaatgaaaaggtacaacacagtcttgcctgaagcccgggcactcaactagtaggaccagctggtcagggaccaaagctagcacctgcaggagccccctgagagaaaacatccaggtccaagcaaaaaacagcctgactgcagtgtgctggccatggaagcaagagaaaaacagccacgctgctcatcctgcccatcctggggcgagcacagacctgggagacagctggtgcacagcagtctgcgggcggcaatataccacagggtgctcctgtctctggatccccctgccctatgtggccttacagccatcactgt

SEQ ID NO: 98247 - DNA, 473 bp, Homo sapiens
atgccaagatacattatgcaggagataccccctgcagaaatgcactaggctctccctaatcagagctgtacctcaagtcagatcctaatttgttgctgggggagagggggaagaacagggctattaataaacagcgcaaataattaggctttatgggaatttggttgttttcttacatactagatttgctctcaatcctttctcaaacgtgtcctgctcgattgccccgcagccagcggcttactgcattgattgcccactgggaagctttctggatctggaatgggagaagggctggacaacatgcttgtttgtaataacggctcttgttcactgagcatcccctaaggccaggctctgagccaggcagtgagctgacatgatttcaccgaatcaccaaagcagctggtagggtagctattgtcagttccactttaaagataaggaaactgaggatcagagaggtttcatag

SEQ ID NO: 98248 - DNA, 418 bp, Homo sapiens
gcacctcctcctctatctagtctcttagctcttctattataatttcagcactccattaaatcacttgttatttgtctaccttctctgctggattcgaaattgagaataaggtcagaaggatgacatttcttcttatctctgtacccgtggtgcctatcacagggcctggtaaacactggttttcaaatacgtttggtgaattgaatagaacttttcagagaaaatcaacttacagaagtctccaagttcacataattggaaagaaaaaggaacagattccaatcccctatcagccaccaactgattaacccaggacagcagacataggtaaactgataagaggagggactcaaagtgaagcagcttcattgtctggggaaatacctgcagttcatcatcttgcaccaagaagattaag

SEQ ID NO: 98249 - DNA, 352 bp, Homo sapiens
aaaaaactttttgaacccatgtctcattgtaggtctcctaaaggaaagtggcccaaagtccaaatacttcaataccgttcgtctctgcctgataacaaagtgttttgtttttgtttttaccctcggacaagccagtcagctgatctttgtcctaatttgttcctggtagaattgaacaagatgtttgcagaagcttcctctagtttgaaaattgtattgattttttttccccatagtaactcacagatggcttctcaggttggaaataatggtgtccatgtttaggtaccacgtgttagatcagatttgtactcatggatctgtgattattttaactttttcttgttattta

SEQ ID NO: 98250 - DNA, 526 bp, Homo sapiens
ggtttggccatgttggtcttgaactcctgacctcagatgatccatccgcctcagcctcccaaagtactgggattacaggcatgagccacagtgcccagccctaaggtgatctttctgagatgccatctgcttcaaatcttgaaaagcattgccaagcctaagtaatcagagagtgaccttgggaccacgtctcaacaatcaactggggtgcttgttatctctctaggtccttggcctctccagatccactgcagttctctagtcctggggaactgaattttaaaaggtcccctgtgacttttatgtatattaaattttaatttattcatttctaaaataattataatatctacttccccagggttcatgtatgacttgtttttatttttcatttagatgaaaaacagtgacaccaatgctatgattcctgtccgggactcctccttcctctgggcctctaacgtttagatgcttaacactgtacggtggtacattcattcattcgcttaataaaaatggatggctg

SEQ ID NO: 98251 - DNA, 405 bp, Homo sapiens
agtagagacggggtttcaccatgttagccaggatggtctcgatctcctgacctcgtgatccgtctgcatactcggacctcccaaaatgctgggattacaggtgtgagccaccgcacccggcctggtaagcatctttagacatttttatagcaatttgaaacagtaatttttgggctgtcaaaaaagtctggcttatatttttatgtctttttctagtcaatgattttgaaattttattttacaagagtattggtctgcaacggtttagaaagaaagatacaaactggcccttccatgcagtctgagaagccctgtattggaagtttccttggcctaacaggagagaaagacttctgacacacagcttcaacaatgacctgattaacctaaaagtaggtgcagcgg

SEQ ID NO: 98252 - DNA, 254 bp, Homo sapiens
agtagagacggggtttcaccatgttagccaggatggtctcgatctcctgacctcgtgatccgtctgcatactcggacctcccaaaatgctgggattacaggtgtgagccaccgcacccggcctgatgaaaaacagtgacaccaatgctatgattcctgtccgggactcctccttcctctgggcctctaacgtttagatgcttaacactgtacggtggtacattcattcattcgcttaataaaaatggatggctg

SEQ ID NO: 98253 - DNA, 513 bp, Homo sapiens
tctccccagaagcatcaatatttactgaattagagtatttcattacctgttataaaaaacaaacaaaaaaaccttccattatactaatttataaaggaatcaaaacaaaatgggttggcgggtccaggcacggtgtctcacttctgtaatcccagcactttgagaagccaaggtgggaactcgaggtcaggagttcgagaccagcctggccaacatggcgaaaccctgtctctaatacaaaaattagacgggcctggtgacatgcgcctgtagtcccagctactcgggaggcagaggcacatgaatcacttgaacccaggaggtggaggttgtactgagccaagattgtgccactgcactccaccctgggagacagagtgaaactatgtctttaaaaaaaaaggcggggtgcagtggcacacacctgtaatcccagcactttgggaggccgaggcaggtggatcacctgaggtcaggagttcacgaccagcctaacatggtgaaaccccatct

SEQ ID NO: 98254 - DNA, 911 bp, Homo sapiens
gtttccagggactccagatgatggcacgtggtagaaccatctccttttaaaggtatatagactgctcacttctgggagatggaaggcttaaaattggctataagaaaggaaggatacacttattatctcaggggataaagaattaatagacaaagccttgttctatctccttggggtcatggctccaatgagcttctgaggaccacaaccatctatgttccatgtgtgacatcaggaagaaggggtccccttcaagctctggctcctttgtacttacaggatgggctatcacgatcccagagaaaacagttgacattataaaactgcctttcgaaccacatgattcagcataagaacatgagagatccagctttcggtgtcactatcactgccggcttttctggccttgaaactggccagaagtccttctgcttattaccggcttggattgctagaacttcaaaacaaagtttcaagtgctagaaattcttagtttctctctcatacatactattttgaattttatatgaattagcttttagattcaggttacaaattaatccaggctcattatgtaattaaatgtttgattaggagcattaattaacatattacacagaggcatataattttatgagacaaactctttaattccaatgaagagattcaccatggtaacaaattatctgacccacccaattcaatatgtaattccaaatgatttttcaaattaactaaaaatgctgtcattattaaataggtatattacaatgtatgcactgcactgtagagattttttttaaatacttaggcgaaagatgagagaattctaaatatgctttcataaatacacaaagtaaagatcaaggctgaaattttgaaaaaggataaaaatgttgacaattttgttg

SEQ ID NO: 98255 - DNA, 883 bp, Homo sapiens
gtttccagggactccagatgatggcacgtggtagaaccatctccttttaaaggtatatagactgctcacttctgggagatggaaggcttaaaattggctataagaaaggaaggatacacttattatctcaggggataaagaattaatagacaaagccttgttctatctccttggggtcatggctccaatgagcttctgaggaccacaaccatctatgttccatgtgtgacatcaggaagaaggggtccccttcaagctctggctcctttgtacttacaggatgggctatcacgatcccagagaaaacagttgacattataaaactgcctttcgaaccacatgattcagcataagaacatgagagatccagctttcggtgtcactatcactgccggcttttctgcttattaccggcttggattgctagaacttcaaaacaaagtttcaagtgctagaaattcttagtttctctctcatacatactattttgaattttatatgaattagcttttagattcaggttacaaattaatccaggctcattatgtaattaaatgtttgattaggagcattaattaacatattacacagaggcatataattttatgagacaaactctttaattccaatgaagagattcaccatggtaacaaattatctgacccacccaattcaatatgtaattccaaatgatttttcaaattaactaaaaatgctgtcattattaaataggtatattacaatgtatgcactgcactgtagagattttttttaaatacttaggcgaaagatgagagaattctaaatatgctttcataaatacacaaagtaaagatcaaggctgaaattttgaaaaaggataaaaatgttgacaattttgttg

SEQ ID NO: 98256 - DNA, 424 bp, Homo sapiens
aaataaggctacataattaataaatatagtgcctataaagtttgactttgtttttcctatattgagtccttttatgttttatcatcttaatatctatataatacaaaacaaagttatctgatttacttaatcaataccccattagtggatggtttcattttttctagacattgctattataaaatatgttgccataaatagaatatgtgagtttctaaagattggggctgaatttccaaataataaatctaaaaaaaaaaactactaaatttttcagaaaccaaaattaaataattcattgatttaaaaaagtattcattgagcactactatgtgcgtgtactgttctagacacatgagattcattggtgaaaatagaccccaaaaaggcaaatattccagcccctgtgctgtttctgtgctat

SEQ ID NO: 98257 - DNA, 431 bp, Homo sapiens
ctctgactttctctattcccttaacaattattcctgagttttaaataaatgcatatataatacatatataacaacggcagaacaaaattaatgagttttttttagagtactttaggaaattaattgtaattttatagtcttttaaaacttttaacagtttattagtttcaaatattagtatgtagtggaaaaaatgctgaattggaatagatgacctggctttgctgctatctgattatgtgacacttggcaaggcatttatcctttctgtgtctaagttttttcatatgtaaaatgagaattttaaagtagataaatccttgtgataccttctacctctaatattctattattttctttggagaaaattatgttgtggctttaatttcataaaattcaaattctttattgttaactcttctttgttatta

SEQ ID NO: 98258 - DNA, 268 bp, Homo sapiens
agctgggaagacatacatgagcatgcagcaataaagtgcacaaaccgtcacacaggtacaaggtgcttagggccatggcagaagtagtatctacttaccctggaaccctggaggaggcttttgagctgaatctcagatgagtcagactggagcaggtggagcctgggcggacggtctcagcagagggagtcatctagcaaaggggtgtgctctgggaagggcaggaggattctgtggctggagctcaggcttcaggttcagtgtggag

SEQ ID NO: 98259 - DNA, 320 bp, Homo sapiens
cacatcccctcagcttcatgggtacaatatatactatttgtatacatagttaatagttatacaatgtaataatttctcatccctcacatcccctcagcctcatgggtacaatatatcctattgtacccacgtacagtacagtagtatatattgtacccatgaggctgagcgggtatgagggatgagaaattactacattggtacaatatatactactgtacccatgagttgtacccattaagtaatttctcatcccttacaccccctcagccttgcgagtcttcactattactccatcctctatgtccatgtgtacatat

SEQ ID NO: 98260 - DNA, 297 bp, Homo sapiens
tttaagtattatgctttcagctctgtttcaaacttagtctttatatctctggttaaatatttgggttggcatttaccagggtggtctgtcaatgctgtactttcatgcaaggccactttaataaatgatcttttaaaatttcaaaatattactggatttatgcctaaaatatggtggtggtttgataaatgtttactgaatttgtgcatacatactatatgtcttcctacaatttttgtatttcctctgtgtttctattagccaatgtatgtaccaataaatagcacaagaatccta

SEQ ID NO: 98261 - DNA, 205 bp, Homo sapiens
caaatgtctgcaaaaaatatccatattgatggatcctggctcctcagaatctgaggtgacagcagcttgcagaggacactgctcccccaacactgccttccaagggagacatgccctaccccaaggcctcccttgtcccctccctcctctgacagtcaggtccagggggtcctggagagggcactggcccaccctccacacatgt

SEQ ID NO: 98262 - DNA, 223 bp, Homo sapiens
cctgtaccgtggttcataggccaaaatgagtccgcaggggcgcctcttccaaaagtggacagaggcgtgcctgggggagcaccatctctccccgcatcctaggtcatccactgccttccaagggagacatgccctaccccaaggcctcccttgtcccctccctcctctgacagtcaggtccagggggtcctggagagggcactggcccaccctccacacatgt

SEQ ID NO: 98263 - DNA, 338 bp, Homo sapiens
gtgttaattgagaggtgttgattgagaactgaggatttatattttcttaggggactcccagaactcaaaagcctttgtgaccctgcagtggaaaggagatgacaggtggtgatattgatcattctgggatgggaatccctacccctttcaaggcatgtgacccagaaagctgcccacttttactgttgatgacactggctctgcaccagactcacagagaaaacccagcggcaccacaaaaagctcctgcaaactgcacccaagtgcctgtgagtccagctcttcacccttctggagttggcatgccatgccaaggtccatgcccttgccagctttag

SEQ ID NO: 98264 - DNA, 758 bp, Homo sapiens
ttgagcaccatacgagcccctggttgctgtgagtatgttggaaaaagccagggggatgcctgtgggtgctgttaaggtggtagtgacactcaggctttgcttcccagaagtccctgggcagtgcggagcttctccccagatgacatagagtgggcagttccctgtgaccgtaaccccaaaagaactgatcttccaggaggaatcatcactcactaccacccccactgatacacatcactcatatgcaaaacacacctggggatgtgccctcaggtaccttgttcttatcaacacttgttaccagtctaagggaacttgcttttcctccctcaagacccacgcagagaaaattgaagctgccagaaggtagaaatgatgagggatagatacagattcaaggaggggaggaaggataatgtccaaccgtatgctcgcttgtgtattaccaaacagcattcttagaaaaaacagattgtggccgggcgcagtggctcacgcctgtaatcccaacattttgggaggccaaggtaggcagatcacttgaggtcggcagtttgagaccagcctggccaacatggtgaaaccctgtttctactaaaaagacaaaaattagctgggcatagtggcaagcgcctgtaatcccagctactcgggaggctgaggcaggagaatcgcccgcacccaggaagcagagtgagctgagatcatgccactgcactccagcctgggcaacagagcgaggctgtctcaaaaaaaaa

SEQ ID NO: 98265 - DNA, 2128 bp, Homo sapiens
ggcacgagggtagtgagcggtgtttcaggatgtgagggcccgcaggagccgagtcaggctctctccactgcctgcccgccaccgtgcaagctctggccggcgctgcccacagtccccatggtgggcagcccccgcggcggggacccctgatcggcagcggcatgccagggaagcccaagcacctgggcgtccccaacgggcgcatggttctggctgtgtcagatggagagctgagcagcacgacggggccccagggccagggcgagggccgcggcagctctctcagcatccacagcctccccagtggtcccagcagccccttcccaaccgaggagcagcctgtggccagctgggccctgtccttcgagcggctgttgcaggacccgctgggcctggcttacttcactgagttcctgaagaaggagttcagcgcggaaaacgtgactttctggaaggcctgcgagcgcttccagcagatcccggccagcgatacccagcagctagctcaggaggcccgcaacatctaccaggagttcctgtccagccaggcgctgagcccagtgaacatcgaccgtcaggcctggcttggcgaggaggtgctggccgagccccggccggacatgtttcgggcacagcagcttcagatcttcaacttgatgaagttcgacagctatgcgcgcttcgtcaagtccccgctgtaccgcgagtgcctgctagccgaagccgagggacgccctctgcgggaacctggctcctcgcgcctcggcagccctgacgccacgaggaagaagccgaagctgaagcccgggaagtcgctgccgctgggtgtggaggagttggggcagctgccacccgttgagggtcctgggggccgccctctccgcaagtccttccgccgggagctgggcgggactgcaaacgccgccttgcgccgagagtctcagggctccctcaactcctccgccagcctggaccttggcttcctagccttcgtcagcagcaaatctgagagccaccggaagagccttgggagcacggagggtgaaagtgaaagccggccagggaagtactgctgtgtgtacctgcccgatggcacagcctccttggccctggccagacctggcctcaccatccgagacatgctggcagggatctgtgagaaacgaggcctctctctacctgacatcaaggtctacctggtgggcaatgaacaggccctggtcctggatcaggactgcaccgtgctggcggatcaggaagtgcggctggaaaacaggatcaccttcgagctggagctgacggcgctggagcgcgtggtacgaatctcagccaagcccaccaagcggctgcaggaggcgctgcagcccattctggagaagcacggcttgagcccgctagaggtggtgctgcaccggccaggcgagaaacagcctctggatctggggaagctagtgagctcggtggcggcccagagactggttttggacactcttccaggtgtgaagatctccaaagcccgtgacaaatctccctgccgcagccagggctgcccacctagaactcaggataaggccacccatccccctccagcgtcccccagttctctggtgaaggtgcccagtagtgccactggaaagcggcagacctgtgacatcgaaggcctggtggagctgctgaaccgggtgcagagcagcggggcccacgaccagaggggccttctgaggaaagaggacctggtacttccagaatttctgcagctgcccgcccaagggcccagctccgaggagaccccaccacagaccaaatcagcagcccagcccatcgggggatccttgaactccaccaccgactcagccctctgacagctacccaacatggagggatggcgttggcagtgccagcctccccagcctgtgccaagcttcaacaggggcaagaggaggggccggcccctcctcaggaagctggtatgagtaaggccttgagggtgcaggcaggcagccctgtaccccacccacatagactatactgtacatacagattttgcagtaggcttggggcagctgggtttgtccttgatgtatgatactgttattataataattattattattctgccaaaaaaaaa

SEQ ID NO: 98266 - DNA, 390 bp, Homo sapiens
  misc_feature (14)..(14): n is a, c, g, or t
  misc_feature (70)..(70): n is a, c, g, or t
  misc_feature (78)..(78): n is a, c, g, or t
  misc_feature (102)..(102): n is a, c, g, or t
  misc_feature (107)..(107): n is a, c, g, or t
  misc_feature (113)..(113): n is a, c, g, or t
  misc_feature (373)..(373): n is a, c, g, or t
cccgggtaaggggngttgggaaaaaggggggaccttcaaggattgaagaacaacaaccccccaacaaggntggcaaanccgccctttggtcccccttcaaanaaagncttcancccccccaatcccttgcagccaggccacaatgggggaggtgagtccagccccttggaacaggcttgcccaacatggagggatggcgttggcagtgccagcctccccagcctgtgccaagcttcaacaggggcaagaggaggggccggcccctcctcaggaagctggtatgagtaaggccttgagggtgcaggcaggcagccctgtacccaccaaagcatctgtaataagttttgagtgctggtagctggttgcctatttntcgttttatatcatacg

SEQ ID NO: 98267 - DNA, 2393 bp, Homo sapiens
ggcacgagggtagtgagcggtgtttcaggatgtgagggcccgcaggagccgagtcaggctctctccactgcctgcccgccaccgtgcaagctctggccggcgctgcccacagtccccatggtgggcagcccccgcggcggggacccctgatcggcagcggcatgccagggaagcccaagcacctgggcgtccccaacgggcgcatggttctggctgtgtcagatggagagctgagcagcacgacggggccccagggccagggcgagggccgcggcagctctctcagcatccacagcctccccagtggtcccagcagccccttcccaaccgaggagcagcctgtggccagctgggccctgtccttcgagcggctgttgcaggacccgctgggcctggcttacttcactgagttcctgaagaaggagttcagcgcggaaaacgtgactttctggaaggcctgcgagcgcttccagcagatcccggccagcgatacccagcagctagctcaggaggcccgcaacatctaccaggagttcctgtccagccaggcgctgagcccagtgaacatcgaccgtcaggcctggcttggcgaggaggtgctggccgagccccggccggacatgtttcgggcacagcagcttcagatcttcaacttgatgaagttcgacagctatgcgcgcttcgtcaagtccccgctgtaccgcgagtgcctgctagccgaagccgagggacgccctctgcgggaacctggctcctcgcgcctcggcagccctgacgccacgaggaagaagccgaagctgaagcccgggaagtcgctgccgctgggtgtggaggagttggggcagctgccacccgttgagggtcctgggggccgccctctccgcaagtccttccgccgggagctgggcgggactgcaaacgccgccttgcgccgagagtctcagggctccctcaactcctccgccagcctggaccttggcttcctagccttcgtcagcagcaaatctgagagccaccggaagagccttgggagcacggagggtgaaagtgaaagccggccagggaagtactgctgtgtgtacctgcccgatggcacagcctccttggccctggccagacctggcctcaccatccgagacatgctggcagggatctgtgagaaacgaggcctctctctacctgacatcaaggtctacctggtgggcaatgaacaggccctggtcctggatcaggactgcaccgtgctggcggatcaggaagtgcggctggaaaacaggatcaccttcgagctggagctgacggcgctggagcgcgtggtacgaatctcagccaagcccaccaagcggctgcaggaggcgctgcagcccattctggagaagcacggcttgagcccgctagaggtggtgctgcaccggccaggcgagaaacagcctctggatctggggaagctagtgagctcggtggcggcccagagactggttttggacactcttccaggtgtgaagatctccaaagcccgtgacaaatctccctgccgcagccagggctgcccacctagaactcaggataaggccacccatccccctccagcgtcccccagttctctggtgaaggtgcccagtagtgccactggaaagcggcagacctgtgacatcgaaggcctggtggagctgctgaaccgggtgcagagcagcggggcccacgaccagaggggccttctgaggaaagaggacctggtacttccagaatttctgcagctgcccgcccaagggcccagctccgaggagaccccaccacagaccaaatcagcagcccagcccatcgggggatccttgaactccaccaccgactcagccctctgacagctacccaacagtccaggacagctgcatggcacccggcgggccgagcatgccatgggtccgctctgcatgccctgtctgtgccatgagtgtccctggccccttcctgccatgggcaggcccgcaggaagagccggtaggggtggaaaggggactcagatgagacacaccccacagctgccaccgccttgtccctcaacaagctcacccccaatcccttgcagccaggccacaatgggggaggtgagtccagccccttggaacaggcttgcccaacatggagggatggcgttggcagtgccagcctccccagcctgtgccaagcttcaacaggggcaagaggaggggccggcccctcctcaggaagctggtatgagtaaggccttgagggtgcaggcaggcagccctgtaccccacccacatagactatactgtacatacagattttgcagtaggcttggggcagctgggtttgtccttgatgtatgatactgttattataataattattattattctgccaaaaaaaaa

SEQ ID NO: 98268 - DNA, 369 bp, Homo sapiens
tgggcaacatgagtgagaccctatctcttaaaaaaaaaaaaaattgaagaggagataatactttcaaccttattctatgaggccaggattaccctgataccaaaacagataaggacccaagaaaagaagaaaagtacaggccagtattattggcgaacatagatgcagaaatcctcaacaaaataccaggaaaccaaattcaacaacacattaaaaagatcattcaccatgatcaagtgaaattcattccagtgatataagagaatgattcaacacatgcaaatcaataaacatgatatatcacattaacagagttaacaaaaaccacatcattgtttcaacagatgctgaaaaatcatttgataaaat

SEQ ID NO: 98269 - DNA, 814 bp, Homo sapiens
aaactctgccaatgtgtcagtggtggacctgacctgccgtctggaaaaacctgccaattatgatgacgtcaagaaggtggtgaaccaggcatcggagggccccctcaaggaattctgggctacactgagcaccaggttgtctcctccgacttcaacagtgacacccactcttccatcttcagtgagggggctggcattgctctcaacgaccactttgtcaagctcatttccttgtatgacaatgaatttggctacaccaacagggtggtggatcatggtccacatggcctccagaaagtaagacccctggaccaccagccccagcaagagcacgagaggaagagagaggacctcattgctggggagtccctgccacactcagtcccccaccacactaagaatctcccctcttcacagtttccatgcagaccccctgaagacggaggggcctagggagcctgacctcgtcatgtaccatcaacaaagtcccttgtgctcagccaataataataatacaggtataaagtattattgaaaaatgctaagagagtggatgttgtttgtagcacaaaatgcaactctactaggtaacgcatatattaattggatagacttagtcatttcacaatctatagataaatcaaaaccttatgttgtacatgataaatgtgtataattttatctgtcaattaaaaataacaaatttactaatggtaatctaataaagtaatgtttaagcaggacattcagcacttataatttctgtgtgtaaatatctaaaatttttcatcttgaatgatacagagttaccacg

SEQ ID NO: 98270 - DNA, 229 bp, Homo sapiens
ctcactctgttgcccaggctggagtacagtggtgtgatcaaggctcactgtagccaactaccaggtttaagcaatcctctcacatcagcctcctgaatagctgagaatataggtgggtactaccacgcttagctgtttttaaagtttttttagagatgatggtcgggcgcagtggctcatgcctgtaatcttagcactctgggaggctgaggcaggcagatcacctgag

SEQ ID NO: 98271 - DNA, 307 bp, Homo sapiens
tgtgcccggccacaccaacaccttttggatgtggagcctctccgtgaggctagtgctccttcccttgtctctctctggaaagtgaggcagtggtcaccttctgagctctttctttctccaattatgttcagctcttctaggctctagatcttgaaaatcacaatttactttctcttttagaaagctaagcttttcctaggagctttaagatcacatttagttgttcaaaagataatctgtctctttctcagccgttccttgaatgaaactgagggcaggagctgcctcagggcttgtggtgggacag

SEQ ID NO: 98272 - DNA, 265 bp, Homo sapiens
gagaaagacagccaaaagttttgacaaaggttttggccatcaggccctttcgagatgatttccccacatgagctttgctgacagctcaaacccaactgtgggtcatgggtgcaaaggagccctttgccgggttgagttcatcttacacccttgcagacggttccttccatttgacctgcaatgagaagaccacaaacagctatagccacactagaatagagccccttgttgggggatacatagttctctgttaagaaaacatcac

SEQ ID NO: 98273 - DNA, 331 bp, Homo sapiens
tttcattatgcaaatgatttccctacctggccggtgccatgttgcctgcttctttactgcacacatggttgacaaagacaagggaagaggggctgggcaccgtggctcacacctgtaatccctgccttggcctcccaaagtgctgggattacaagtgatccacctgccttggcctcccaaagtgctgggattacaggagtgagccaccgcacttggcctctgttacacttttaaatgcacacaccctatgttccagcagcccaacccctggcattttcttctaccaaaatactctcatgtgtactatgtagtaagatatttgttgcaatgt

SEQ ID NO: 98274 - DNA, 370 bp, Homo sapiens
tctctagttttgcatgtggctgaatggtggaatgtctgttttcttttctcaggcaaaattagctgcttggtgctttccccagttgttagggttgaatgagcctcataaagtacaagaatatgtcctaacagtcgtaaacaggaatgttgtgggatgtgcaaaaatcctcatgttagtgacaatttttaattacatgctctgcatcccagatttagtgagtctatttctgatggatgtcagctgctgcctgccttacaaaagtctcgaaacctggagggctttaaatgtaggtggaggctgaggtacctaggggtttgccgagtgccaaagactggctttaactccattgccgaggcaggtgctgacatat

SEQ ID NO: 98275 - DNA, 313 bp, Homo sapiens
ggttgaatacagtgtacataacattgaagaatgtttccaattctaaaatttggaaggatggtgtttaaaggcactgtcgttagttatctcaacaggtggtagctggtaattgataattatatttaaagtatgtgtattcattgtggttggtagtaatacagcatttttatctgcagatctcaaagcatgtgtgaataaatatgcattatttccctattttaagtagccagagactcactgaacgttaattagatataagcagacagagaaatttcatgtccgctgcttgcttgatgctactaaaaaaaaaaaa

SEQ ID NO: 98276 - DNA, 393 bp, Homo sapiens
aaccccctctctaccaaaaatacaaaaaaattagctgtgcatgatggctgacacctgtaatcccagctacttgggaggctgaagcagggagaattgcttgaacccaggaggcagaagttgcagtgagctgagatcgcaccaccacactccagcctgagccacagagcaagactccgtctcaaaaaaagaaaaaaagaaagaaaagaaagcaggcattagccacctatgtagcagatggaaataaaccaatgctggcagtttgcctgctagaaatatactgaatgcagctgggcacagtggctcgtgcctgtaaacccagcactctgggagaccaaggcaggagcatcactacctcgagaccagcctcagcaacacagtgagaccttgtctcta

SEQ ID NO: 98277 - DNA, 213 bp, Homo sapiens
tcaaaccaaacacttaagttttgtgcatttattatttggaatatatctcaagagaaagcagttgattatttatcacagtgacagcagagagaaaggacaaaggttatcacaaatgtgattagcaagaagacaagagatgtgaaggatagacaatagaattaaaatgttgaataattgatcttctcaaataaggtaacaggagaagtacaacag

SEQ ID NO: 98278 - DNA, 488 bp, Homo sapiens
ccgaggccccgccctcattctctcccagctttgcaaaccgtcagcacaggaaagaggatgaacatggatgtgagtgaggaaaacaagagtgtgtgcttagctttcgtgtgtggctttgcatctcactggccctgcccatacagacccggcttccggtggctcctaaccaagaatgttcccagtggcatcctattttcaaaacaagaaactcttggacaaataaattcaagtttctatgtaaaattctgaattttatgtccagaaaaccccccaaaagacaatatcatagtcatcacagttcaattttttttttttttgagacaagatctcactctggcacccagggtggagcgcagtgatgcaatcatagctcactgcagcctgcaactccttggctcaagtgatcctcctgcctcagccactcaagtagctaggactaaaggcacttgccactgtgcctaggctggtctcaaactcctggcctcaag

SEQ ID NO: 98279 - DNA, 338 bp, Homo sapiens
tgttatgtatatgtgcatatacatgtttttgtatatgtgtgtgcgtatgtgtgtatccccacaaaaataaagagaatgccataaggtccattagcagacaaatattttgcgtaaatgtttggaaggctaacagaacaatagtgggtgaagctgggcagaaaatttgcagactagggaatcagtgttgcagctcagtagaaaacttatcttctcatcacaatcctaggatgtgtcatgatttggacatatcatatggcagaaaactggaatgagacatgagggtgaactagaataaagtagaatggaagtctgtagctccctttcccatgctgtgtttg

SEQ ID NO: 98280 - DNA, 288 bp, Homo sapiens
aaaataaaaattatgcaattctgcagggctttttctccacctatgagcagcttattttactatctaaactgctgtccaatagagtagccactagctacatgtagctaattataattaaataaaaaactcagtttctcagtggaataaaccacatttcaggtactcagtaaccacagtagccacaaattggacagcacagatatggaacacttccatcactgccaggagtgttattgggcagtgatgatatagaactcttttgcagaaaattttttttcttgtgccaat

SEQ ID NO: 98281 - DNA, 406 bp, Homo sapiens
agaccatctgcatagagggcttagcatagtgactggtacttagcaaatgctccataagttatgattgctggcactgacatgctctccagagtggccctcgggacaggggccctcagccaccaaatcctagacagggctgcctctgacagaggtgcaggctatgactgcatggctccagggcatgccactcaccctgcagtacccctggccttgggtggttgttaccacgcttctccaggaggtggcggtaaagctcttttttttttttagttatctttgttttctaggcaaaagagcagagtgaaagcatctgtctgctgatttctccaccagtctctccctgtcgacctgcacagggacacaagtgcaatccaatactgagacaaggactactgtggctctctag

SEQ ID NO: 98282 - DNA, 774 bp, Homo sapiens
tggggtgggcctggctttagaacccttaacccataaggaccacctgtaaagctgctctgtggggggtggggaagatgtcctcagcgagacgccgagataggagggctggttgtctgggccacagcagtggcgtcgatttttagggacctgatctcagggacaagaaattgtctcagaacccccgggaggaggttcagatgagggtcaggtcgtggctcaagagagctggacccaggcctgctgtgcaggaaggtgggaaagaagacaaagggcccattgtttccgcctctcaggacactgggcctcgagtctgctctcccgtttcatgggcatgaccctgggaaggatgcccagcaggaggagtggcccagactggccccaactcttgtttccagcacagtgtgctcagtgggacagcggacccagcccagtctgtgacccggagccgctggcggctgggctgggcagggagagtgcagcccaaagccgagaagccagacctgctcaccccattcagaagagctgcctctcccacccccagcccactgcccccagagggctactgggaacccggagggtcacctgggctttccaggggtagacaaaaagtagaatttcccagtgctgttatgtgaataattggggatgattgaattcttagggcttttcttactgcccttcacccacctcctcttaccccatgatgggccctgggagcaaaaaggagataaccacagtgtcccttgcccctctgccacgccccacaccaccacg

SEQ ID NO: 98283 - DNA, 100 bp, Homo sapiens
aaatcagacacaaagagcatatattctgttctcttcctccatttgcaagtttccaggcatggggtccactcatgtgtgatacagccctgcctgtgacaga

SEQ ID NO: 98284 - DNA, 335 bp, Homo sapiens
ctgcccattctttcactttaaaacccatagtaaatctggcatatcttttcatcttgatgatatagacataagtagttgagctgcttctttagttgacagttataagggttataaaactgatatttacttcatatagccgtgttaaattactttcaacttttctggtccataatctaccaagttgtgaaattttgacatgttagccctcttgtgtactgatagtatacctttaattcataagtctagaatcactactgagtggcagagtaacattcttctgtctcatcatattttctaaaatggagtcattaactgccacatattcagggagatac

SEQ ID NO: 98285 - DNA, 335 bp, Homo sapiens
gccgtggaggcagagagagcagctgcaggagcttggctccacagaattcacctccacaacaaacagggccatgcctgtggctcacttgggactggcaggaggaccctgatcctatgtaggtcctatgtgcagcagggggaccgcaacaccccagcacagtggctgctgcctccacactgtgtctgcaaacagatactccaggatctcaagtgtttcattttttttttttaatccaaaaacaacttaccatccaacccatttcagataagttggggagcagtggcgattccagctttaatggttgagttgaaaagggacacctaagccgggtgcgg

SEQ ID NO: 98286 - DNA, 368 bp, Homo sapiens
ttgttattatcctaacagggccaggaccagctacgttatttgaggtgcccagagcaaaataaaaatacaggaccctttgttctaaaagtattaagaaatccagtatggctactatagagcattaaaccaaaaacagggctctgtgtgactgtgcaggtgacatgcccatgaagccagtactggacaaagctaaggtgaagacctatttaaaaaactggataatagattccatccttcaaagaactgaccataactaagaacatgggcaaatattcagacagttttattcgcctaaaaacaacactgatgctctgtttgcattattttttatttatttattttttgtttgtttgtttgtttgtttgttt

SEQ ID NO: 98287 - DNA, 248 bp, Homo sapiens
cttgggacatatgcccagtggataaaggagaatgtgtaagtgcactaatagttgtaaaagccaccaggatatcatggctctagaatccccctcagtgcctaccagcctccccaggcaccatccaacaccagaaccacaaccacagcactggggggacagagccctctgggatttctgattcatctctattagtttttaagatccaaggaacaccttttaggtttccttggtcttgttcccgtcaatgt

SEQ ID NO: 98288 - DNA, 292 bp, Homo sapiens
tgcatgcctgtaatcccagctactcgggagactgaggcgggagaatggcttggacctgggaggtggaggttgcggtgagctgagatcgtgccattgcactccagcctagacaacaagagcgaaactccatctcaaaaaaaaaagaaaagaaaatagctgatttactgtgttaataatatagcccagcctgggcaacatagggagaccccgtctctacaaaaaattttaaaaatgagccatgtgtggtggtgcacacctgtaatcccagttactctggacagggctaagttgg

SEQ ID NO: 98289 - DNA, 392 bp, Homo sapiens
tttatatgtgtgaaatacaagtactttcttttttttttttttttttttttgagacggagtcttgctctgtcacccaggctggagggcagtggcgcaatctcggctcactgcaagctccgcctcccgggttcacgccattctcctgcctcagcctcccgagtagctgggactacaagcgcccacccccacgcccggctaattttttgtgtatttttagtagagacggggtttcaccgtgttagccaggatggtctcaatctcctgacctcgtgatccacccgcctcggcctcccaaagtgctgggatgacaggcgtgagccaccgcgccaggccacaggtactttcttgtatctctggtttgtacctctatggttacacattgcaaatatttc

SEQ ID NO: 98290 - DNA, 509 bp, Homo sapiens
cgtaggtactttgaagatgtttccacttcccttcgaagatgttcaatgtccgtacatagaatgaaaggtgccaccttctccagcatgagacatatccccatgtgatcccttaccacgcagactcctggctgagttaggaagaaagaatagaagtcaatgcattccatttgttttcaaggcacacccaaaaagtatgaacttagatatatcacagagcttccaatttacctgcctgtatttacaaaataagtgtatgatttctcccgaaacattattttttgcaagttacatgccaataaccaccactgaacataagctgatatttttgctgaatgaaggattgtgaattatccttgtagctttctttgacttcattacacatttcaattacttctctaaacactgactgccgccataaaatatctttagttcttttcccctatgaaatgtgctgccaataataatattttactagaaaataatgcaataaattagcatgatcacaacct

SEQ ID NO: 98291 - DNA, 741 bp, Homo sapiens
cggctgtcgaaagaggagcacgacgtgaacttccaccgacaatcgtttaaatactgcaggcgaaggacgggttcttattgttccttcaggcaaaccggcagctgagtccagcttgtgaacttgaacttgaacttgctgaagaagctcccggcggccctctgctggccgccgcctttgccagagggagaggctggagtcaccctgttggaacccatttctggggctggcacctgttgggctgcccggccgcgcgtacctggtcccatcgggggctctgcccactccgctgatgacgcgggtagaagggaggccgcagggacactctggggggactgtgccgggcgggcaccccccagctgctcactgtggggtgcggcaccgaggcctggttgggctgcaaggagaccgactgggattcccgggctggtggccggggagacggggtagaggtgagaagcaagagctcaggaggcctcaggccccagcgctgtggggctgccgttgtcgttctgggtggaggtctggccaaaccggcttttgccccgagtgaggaattcctgctcattttggtgttagtggagaggtcgctgttcacagcgggggtggggttcgtcccctccaggctagtagggagctggctggtgcattgctgtgttgctgcccttctgccctgtctcctgatcctgttcagactctgggtggctcctttgagtcttctcaggccgtgaaagatgggaaagg

SEQ ID NO: 98292 - DNA, 244 bp, Homo sapiens
ccgccccagcctcctgagtagctgggactacaggtatgttccactgtgcctggcattctgagctttctttatttggcttttgaaaatgactcaggtcccacctaaagttatcactcactacaagaagaattaaaggaaagcaaatgtctaaaacatctaattcacataagagatcagtggtttgccagtgcagaggaagcttaatagaatgaattaagactctaaaggtaattctaaacaaact

SEQ ID NO: 98293 - DNA, 756 bp, Homo sapiens
gatttatgtgtaggatttactttgtaatttggggctgagaagagaaacctataaatttctttttctcttttttgatgaacatttttttatctgacattattctctttaaaaattgtgggccttcttgtttaatgttttaaattgtttttactacctcctcacatgtatagtagatatattacaatattatattgcaatatttatatatagtgggaaggcaaaataaaattgataattcaaaactgcaaaaatggtcactgctggatggactgcttgttttaggaactgttttgatgaatgtgtcatttagttgggtgatttaaaaaaatttggaggcaatgcaaccttacagtttatgttttactgggaaagaaggagcattctagcaccattgacttgtaaatgcagtttatcaatatttcataatttgcatgactttcttttacaattacctagcaacagttcttctctgcagtgttccttcaaaaaaccccgcagggacagacacagtagagtgaccaccaaaatagcagcaataacagttatgatcaatattctaaaatatgtaaaggtcccaactcagggagacattaaaacctaaatgccttctggtttccagatctgtataattaaattctgactgatgaattttcagcaatgcaatggagctagtctctcttctttaagagattagggaactagaatttggtttcatctgaaatttcattctgaaactaggtgaattttgctttctta

SEQ ID NO: 98294 - DNA, 382 bp, Homo sapiens
gattaagaggccagctactaaaacatttccagtgcagaaactgcgaagtggaggagcagaactggacgggagctctgagaccatttcactaagtcccctttattttacggaggagaacttgaggttctgcagccaggtgccccacctctcagactaggcttcctaagaggttctaacatgcttaggagctcaaccatccctgaaatggctacaaaatcccactctcctgggactgactttatggaaatattctgaagttagaaacaagatggtaactctccccacagtcacagccccggaaggcgggcagctgagacctggctgggggccaggaaggggtggttccagcttcagtcattcatgctgacccagctgcccccga

SEQ ID NO: 98295 - DNA, 266 bp, Homo sapiens
ctggcctgctgggctacgcatccaccccccaccccccagctgggattcttgtgttctctgtgtttgaatgaggctgtgcatacaggagttgtgaatgcaggtcaccccaggaccctccattcattaaggagagactccctgcgatggcaaggaaagagcgggaactttgcatttactgaacttcagtttactcccagctccacccccagcctgtagtgtggcttcagagatttacttcataacctctctgtgcctctgtttcccta

SEQ ID NO: 98296 - DNA, 811 bp, Homo sapiens
agcggagaatgtcttctgctcagtgcccggcactagtgtgtgtcatgtcccggctgcgtttctggggcccatggcccctccttatgtggcaactattgtggctactagttaaggaggctcagcctctggagtgggtcaaggacccgctccagctcacctctaatcccctggggccgcctgactcctggtcttcccactcctcccatttcccacgggaatctccccatgcgcctactctcccagcagacccgtgggactttgatcacctggggccctctgcttcctcagagatgccagccccatcccaggaatcgactgaaaatttggttccattcctggacacctgggattcagctggagagcagcccctggagccagagcagttcttggcttcacagcaggatttaacaggacaagctgagtccacaggaaagactccctgtttcgcccaagaagctgaagaaagatccagctcagcgttggagccttgctgagattattggaattacacgccaattatccacacctcagagtcagaaacagactttgcagaatgaatattccagtacagatacaccgtatcccggtagcctgcctccagaactccgggtgaagtcagatgagcctccagggccctctgagcaagttggaccttctcaattccatctagagcccgaaactcaaaatccagagacccttgaagacatccagtcctcttcactccagcaagaagccccagcacagcttccacagctccttgaggaagaaccttcttcaatgcagcaggaggccccagctctgcctccagagt

SEQ ID NO: 98297 - DNA, 377 bp, Homo sapiens
actggaagagagcggaaaatgttgctttccaaatccttgggggatttaatctgtgctctcccagtttcaggagcttatgttgtgagggtgagatgactcctcattaagcagtatacaaatagattattggtagtcttctgtcatctcccacgaaacacaacctccccctcatcacctgacagccctccactaaccaccctataaacaagagggaactgagtctccttttcaaacacctctcctaagctagactgcagaagctgggagggctgagtcatcttcctcttgaaagaaaacccgtgtaacaaagccacagaagtatgctttctgtgcatatcatttgtttcaacacatggctgcttttataggatgccaac

SEQ ID NO: 98298 - DNA, 785 bp, Homo sapiens
agcgtggggtcaggtggcctggagtgggggtgggtagtcagtcaggaatgagaggtggctttttattcatgaagaagaaaattcccagggaacaggatggcaaacgagaaggaaggctattgtgtatgagtgtacaggttgtactctgcacactggggtttggaagaggagacacaccatatatattccccaagtcatgaaagaaataaagaaaagacaaagataacctaggtcaaacaatgaaagaaccaaaaatggaaagaggaagaaagtacatgaagtcgtgaaacaaaatcctgaagagttttctgagactcgaatgagattaaaaggcatgaagaactccagaaatgcaggctgcaataattattactctgatcgtcaatagaatccagaatgcaaccatccagaagggcaggctttggctgcagtgttgcagggagcgccagattgcaagccaaaagaaatggagatgtaggaaggatgctaccacggggaggcgggtgttctctggatgcagaagatgatatacagtcatcagttacacacaaatgtcagggattcttcactcaaaagaaaggagaaagccaccactttgaaagaaaggaaatagtcaatatatttgacaacctgtatggaatggacctgaccaatgggaacagtgacacgagctgaaattcacttcagcttttggggttgctgccacacttgggtaagagacctaaagatcaacttttctttaacctgcatcattaatcgtataaaccttccagctcacaggtatc

SEQ ID NO: 98299 - DNA, 519 bp, Homo sapiens
gcggccgctactactactactactactactaaattcgcggccgcgtcgatcattatcattcttttttttttttctttttttgagacagagtctcaccgtgtcacccaggctggagtggagtggcacaatcttggctcattgcaatctctgcctccagggttcaagcgattctcctgcctcagcctcctgagtagctgggattacaggcacacaccaccatgtccggctaatttttgtatttttagtagagatgggatttcatcatgttggtcaggctggtctcgaactcctgacctcgtgatctgcccgcctcagcctcccaaagtgctgggattacaggcatgagccactgagcccagccacattatcattcttaataaacccactttaagtaaaacttcctcattctttttcctaagagtctttgtaaagatgaaaatcaaatattaactaattcttctgagcaacaatattcaagcatcttggagctaaagggtaaaggagacacagtgagagggc

SEQ ID NO: 98300 - DNA, 465 bp, Homo sapiens
ggtttcagcgagagagtgagtgacagtgaatggcagccacgtgagagtcacagctgggcagcttggccaccccagactgacggggtcaagagggggacccccccccaccgcacttgacacaaaagagcccagagccccggcgaagatgaagggggtggagccgggggtatctggttccccagacactcttctctccgctccccaatccgaatggactgctgtccctgcacaggctgggggagcgaggggacgagctcctgccttattccaggaagtggtctgcgtggactgtggccaccacctgcccctactcatcagcagcccacaaacattcacaagacccctccctcgcgtgccaccgcatgcccctcagttggcgggcacctaagtctccgcgggtggaggggggtccgatggacaccgtcctcactctgcctgtccaagtcctgagcggagggggcaggc

SEQ ID NO: 98301 - DNA, 419 bp, Homo sapiens
ctgaagttatatttacaggtatcatcttgtaaccagacctaggtttggctgctcatcactgaaagccaaacacaggaagcaagggttggcaggaggaaaaacaggtttagtttgagaaccagcaaactgaaaagatggtgaactagcatcctaaagaaccatcttaaattttaaaacttaccgtaaggttttttaaagggaaacttggtatgggagagtgggaagggtgcagggtgcagggtctgtgtgtcttgtttgatggttatcttaggtagtcacaactcccgaggtctgattggcattattttgacttgagcagatggtggtggactacttattcccagtaactccccctaagcaggaggattccacaatgggggctctgagactggtttgtttcaagattagcctctgggatt

SEQ ID NO: 98302 - DNA, 567 bp, Homo sapiens
tgtctacagtatcccatatattcatgttctaaaaatgcaaattcatataaaccaaagtaatacttgtttttttgaaacaaataaacctaacattttaaaataattccatgaaaatctaaaatttaaatctaaatgtaaaatgcaatgtatttttagaagttatttatatattcttgattttagttctttgccagttatatggtaataaatatcttctcccaatttgtaagttatcttttcactttctttcaggtacctgttgaagataaattcttaattttaatacagtaaacttattggtcttttatcattagcgttttaagtctttcttaagaaatactttcctactctaatatcagaaacatacttatgtatattttctactgaaaggtttaaagttttacttttgacatttaagtcacgaatctttctgactgggataggggcaagagggaaggtaagaaaaaatgatatatacacgtattataactaacatgtacacatacatgcacatgcacacaaacactagttaagcccccaacctcattatgatcttaaccttcacta

SEQ ID NO: 98303 - DNA, 766 bp, Homo sapiens
ctcagactgaaataatgcacataagctgcatggtatgaaatttctgaaggggcattcttccacagcccaagaggtgtatcaggaagctggcccttcagggacaggaacacctgtgcaccacatctctgcgatgatgcgacctggtgcctgtgacacatccctgcacattgctgtgggggtaaccaaaaatggagctgtgggagccagtggagggcatgctggcgtatcaggggcagcagcacccggggcggcggttgggggaatggaatccaatatgaagatggttctttctttctctaacactttactgcatgccctggtgtcacttttctcagcatggcttctccctgcactccttgcttccaaatgctcagtacttcctgtccacccaggtgggtcacagcacaggccttggaggaagccgactaagctgggtttgaatgattgcttctgcaagctaacagccatgtggccttaggtgagttatgggacctccccatgcctcagtttcctcatggacaaagtgggggctgacaataccatcctccttacttcaccgtgggggtctagagtgtgctgcagaagtgcctgggtgagacctgcttccggttcctctttaagccatacgaaggggtgttccggatctaacagattctcccttctcaggagtacttgcattttaaaagatgaccctggggctgcttcatacagcacaataaattgactagagcgaagctccggtgggaagcagtggggtaaagatatt

SEQ ID NO: 98304 - DNA, 263 bp, Homo sapiens
catgtttgtcgtcttttctggggccaggggcaaatatctttagaacaattagttcttcaaccataacattttggactgaaatatcctcattctccaaagaactgtgtatacatatatatatatggttacacagacatagaactgtgtgtgtgtattactacatatcctggatccaatgagatggcacttttttgttaatttttgttcccacttcattttactgaaactctaaaatacattaattttaaaaccttttttaaacg

SEQ ID NO: 98305 - DNA, 256 bp, Homo sapiens
tgtatttttagtagagacggggttttaccatgttggccaggctggtctcgaactcctgacctcaaatgattcacctgcctcggcctcccaaagtgctgggattacaggcgtgagccaccgtgcccggccagattaaacaaagattttaaaataaaacacaaaagcacaagcaacaacaaaacacataaactggacatcatcaaaatttttaaaaactgtgtgtcaaaggacagtatcaaataaatgaaacaaaccc

SEQ ID NO: 98306 - DNA, 412 bp, Homo sapiens
gctacatgatgtctcatggttcttttcagactctttgattacaccactcacttgacttcacactctgaatattcctgatcctagtgacaaaagttatagtatatttaagtccccaaaagttcatcatcattcctaagttcaaactaagtaattccctagtaaggaatttcccaatgtgagaatgttatagcctccaagcctttcagaacctgttaagtaaaatccccagagtttaaaaaaaaaaaaaaatcagaatttttaacaagggtgccagttcaaagctggaaactaaaatttcatgaatataaatgtgcaccctcccacagaaaaaaatacgactgtcactgaaaaatattatctatgtaacgagaattgttcattaattttcaaatgtagatgacaggttatccct

SEQ ID NO: 98307 - DNA, 351 bp, Homo sapiens
tatagtttttatttttattccagaatttcctaatatctttaattagatattattcacacaaagattctcacaaaagaagttccatgtcacatacattttgaaatccctacatattatctttctttttaagcttcctagtgcatattaacataaaaagactccataaagtcttgaaataaaagaatgctggtgagcaaggattagtcagggttttcaaaagatattatcactgtatacgtgcttcttcattaatatacagttcaggagaagaacagttggaaagactcctgttagtgagttgatgatccttatagtgcatagcacaatgcctggcactcaatggacgtatgt

SEQ ID NO: 98308 - DNA, 1138 bp, Homo sapiens
cttattatacgcatgtgcagctagacatttaacactgcttcagcttcattccataaattttgatatgttgtgtcttcattttcatttatgtcagggtatttttttatttcccttttgttttcctctgatccattggttatttagtagagtgctgctcaatttccatatgcttgggagttttccaaattttttcctgttgatttctgtcttattccaatttgtcctgctataacaaaatacttaagactgggtatttaataatgaacagaaatttatttagcacagctctggaggctgggaaatcgaagaatgagggggcagcatctggcaggacccttgtgctgcatcatcccatggtgggaggtggaaaggcaagagagagcaaggggaggccagacctgcccttttataacagtactcctcctgtgataatgaacacatttctgtgataatggcattaacccattaatgagcacataaccctcatgacccaaacacctcttaaagttcccacctcccgacaccttcaaaatggggaattaacttttagtatgagttttggagtgaacaaaaattcaaactatatcaattcctaatttcattctattgtgtagggagaacataatttatgtattatatccttttaaatttagagaggtttgctttatagcctagcatatggtggtgtgttctagagaatgttctatgtgcagttgagaagaatgtatactttcttgttgtgtggagtgttttatagatgtttgttaggtctagttgtttataatgttatatcttttatttcctagttgattttctgcttggttattcattatagaaagtgagacattgaagtctccaactcttatttctgtcagttgtgtgctttgtgtattgtagtgttttgttgttgggtgcatacatatttgtaattgttagcttttcctgatagattgacccttctatagttataaaatgtctctaggaattttttgttatgtctattttgtatgagattagtatagccactccagctttcttgtggctgctgtttgaatgatgtaccttttctcatccttttactgtcagtctatttgtatctttgaataaaaggtgtatctcctgtggacagcaaaaagtt

SEQ ID NO: 98309 - DNA, 342 bp, Homo sapiens
ggccttccccaagttccctcagttgggctaggggaacgttatggatctagtttgattttgtcatgtgtcctgctagccactgtgtttttaaattagaatctctgcgagatcacactgttggaacaacacacaaattgtagttttaaatcagtaatatgatctaattagaaatgatgttttcatttcctgtattattaaattgagtcacctgactatcttaaaatgctttttaaatctattacactatataatcagtacatgctgtgtgaatgtggttatgcttaataaaggaggctgacttggaacctcataagaatttcaccaaagaaactaccattaaga

SEQ ID NO: 98310 - DNA, 565 bp, Homo sapiens
agtatgtatgttgcttcagcccttaatttgcaaggtggtgaaaccactatgggcctggccaaatcagcaagaagggggctggaggaagggcagctgtcttggggtacactgggactggaaggagctgccttcctgaagtcctccttgcttctctgaagttgtcccagcacagctgtggcttccgggagaggaatgtcagggccctgataaggaaatgaagtggagcccgcacctgcccagaatgtgaaatttcttcagcagcctctgaccgggctccagatgggcaagtgcagcccctcccacacctgctgagtttgatctccctcctcctggatgctgtgaggcttggcacctgcccagccaggcactcaggaaacctgctgggggtctctgagcgcccaccagggtaaaccaaggtccctttcttgtgttaaagagaagaactgggatggaagcgtgcccagggctctttggaagcacccaggaggggcaatggaaggcttcctgggaagagggtttctgggttgcattttaaaatacacacaggagttagctaaaaaaaaaa

SEQ ID NO: 98311 - DNA, 261 bp, Homo sapiens
gaatcaggtgacaagcagttgtgaggaaactagcaaagtatctagttatagagctattatttcctaaatcaagagtgaaaaataaaagattttttccctagaaattaacatgcatgctccattcatttgccagagtctctgctccaacaacatcctggccttcaaaatgctcaaagggatgaatcaaggacaattcacatttaagggactacggaagagaaagttgcattacatgacccaggtctttccccaaccattcca

SEQ ID NO: 98312 - DNA, 745 bp, Homo sapiens
acagaatcaggaatgcctaattataaaatcttctagctagttaggaagcattatgtgggggttaatatgtagttaacaatgaagaaaattttagaagttattatatttttacactcttaatagtttaaaaaatactggccagacgcagtggctcacacctgtaatcccaggattttgggaggccgaggtgggcggatcacttgaggtcaggagtttgagaccagcctagacaacatggtgaaatcccgtctctactaaaaatacaaaaattagccaggtgtggtagcgcatgcctgtagttccagctacttgggaggctgaggcacgcaaatcgcttgaaacctggaggtggaggttgcggtgagccaagatcttgccactgcactccagcctgggtaacagagcgagactccatctcagaaacaaaacaaaacaaaacatgttctgtatgatactacagttgtggatacgagtcattatacatttgtcaaaacctacagaatgtacaccaagagtgaactctaatgtaaactatagacttgaggtgacagtggcgtgtcagtgttggttcaccagtcatagtaaacacatcactgtggtttgggaagttgacagtgggggaggttgtgtgtgtgtggtggcagggatatatgggaactctctgtatttctgctcaactttgatgtgaacctaaaactgctgtgaaaaataaagtttattaatttaaataaatgcagcacatgcc

SEQ ID NO: 98313 - DNA, 204 bp, Homo sapiens
ctctacaagaagattcttaaaggctgggtatagtgtctcaaacctataattccaacactttgggaggctgagttgtgaaaattggtcacttaagcccacaagttcaagaccagcctgggcaacgtagtgagatgctatgtctataaaaaaatttttttttttaaaattaggcatggtgggccaggcgcggtgactcatgcctgt

SEQ ID NO: 98314 - DNA, 134 bp, Homo sapiens
gtctgtctccaccttagtgctgcttttccctgcatgccttcaatcttcagtaggaaggagatagccacaagctgctttgggctgacatcctatcagcttagcaagaagtaaagtcaggtggtatagaagacatc

SEQ ID NO: 98315 - DNA, 296 bp, Homo sapiens
caccctgctgaggtcaatttcgtcactgatgcctcgggtcacataggccctgatgacccagatttcacacagaggtcagtacatcggtcaactttcctcccaggaggggccggggctggtgggccatgcccactccgtgccacatgcctagcattcagagctttgtaaggaagccctgttctaaatgctcaggtcccacccttccttgtcaagagaagccatgggcttcctgctcctgtgtcacagtgtgccacttgaagggtggctcttccccattcttcttccatgggggccag

SEQ ID NO: 98316 - DNA, 678 bp, Homo sapiens
agtacaacttccgggtcgccaggcaagggggtgtggctagggaaggggagaggcgagctatgatgtaagcggcgcgcgccgaagtggggccagctagcaggcgtcgtggcggggccgcgcttttgggccgcgagcttgaggtcccgcttctcgacggattccttctggctccgcgaaggaacttgcgtcccttctctaagtcttcggataaaaccaagacctaggcctacagatgtatgggagcagggccagggagagagagacttcgtttttcccattcattcatgcatccgaccaacactgactgagcctgcgtcgggcgcggtgcctggctggcggtcccagggtcactaagacgcaacccggcgctggaggtgcttgcgtcgagcagggccggcacaggattgccagtcgtggctgtcctgtgcggtggagccacagggctgtcgcgtcgtccctgtgcgtgggtggcccagtgtgttggatatgacctgagagatgacagatgtgagatgacacgacagggagatctgaggaggtccccagagaactgggaactgcgtgtcaccagtctagagattcggagacagttggatctatggacccatgtcttcctttttcttgtcgaactcccttctttcacaggagcacaccatttttagtggtttcttaagatga

SEQ ID NO: 98317 - DNA, 418 bp, Homo sapiens
agaactcttaaaggtcatgcaattctgcctgaattacttttatctattatatggttcttggggataagattgttctatatatctgtgttgcagaaatggaaggttctctggaagtatttgtaaattaaacagaaattacaaatattttaattgtcaactaactaaatattattttacaattcctaaaccttcagtatattgataaggtacacattattttacacaagtatgtccctatattcaaataaaatttcaatatatttacaaaaaaaatgcccccaaaattgatcaaaactgtaacatcctatttcaaaataagctaggacacttttaaaaatgatgaaaaacataaaagagccatgtaagtcagaattagaaaaattctgaaaggcgacagagctccagaaaaaatttaaaa

SEQ ID NO: 98318 - DNA, 263 bp, Homo sapiens
cttccaggcatgaggctctcccttcaaaaaaaaagaaaaaaataactccctaccactagtttaactcataggcaggcaattatgatatgcttctgagtctttcttcagaggaaaaaaaaatgaaaacaaagtatggttctgtaaaagataattaagtcagccatatatttttataggcaaatatgaatagctctcaattaccagttgtaatggaagtcagagatatcaaaattcataagtaattcataaactgtatttcagct

SEQ ID NO: 98319 - DNA, 716 bp, Homo sapiens
cccctagcctttgggtcatccctggcttgaaggtggggtttcactggggacccagctcttcccgcccggaaacctcttagcctcccaccgccatcaatataccggctgcggtgcccaggctgtccacgctaaggggtgcccacaggcccatgccgagccaccctcagccccgcagcctccctcacgttctcgttagtgcccagagtctggagggggctgaggcggctggaggctggtgtgtcagcagccctatatcacgcacatgtctgtctgggtcgcaacagttccccgggctcagccacaactttgcttcacaccaaagcaagccctgggagcagggagaggccagggaacatgagcaagcacttcctagcctgcaaggtcagggtgtttcccaggcccccaagagcacagggctgcccaggtccagagccacagctgggccgctgcaactgcacctgggagcatggtgggagcatggtgctcgcgtcccgccagctctgtaaggtgcagggttcttgcctgtttctggccccggctggttctgtgaagcatgcaggccggactgcacctcccccactgcagctggcgctctcgcagtggccactccagagggggcaccactgccatcaaaagttagctgtatcagccaggctggaatgcagtggtgcaattaaagctcaccatggacttgaacgcctgagatcaacagactt

SEQ ID NO: 98320 - DNA, 434 bp, Homo sapiens
accttaaccctcaaagccctggactggacagggagcagctgtactggcagctgagccagatgaccaatggcatcaaagagctgggcccctacaccctggaccggaacagtctctacgtcaatggtttcacccatcggagctctgggctcaccaccagcactccttggacttccacagttgaccttggaacctcagggactccatcccccgtccccagccccacaagtaagtaccagtcaatggcatctctccctcaacttcaccatcaccaacctgcagtatgaggaggacatgcatcgccctggatctaggaagttcaacaccacagagagggtcctgcaggcttagtcccattttcaagaactccagtgttggccctctgtactctggctgcagactgacctctctcaggcccgagaaggatggggcagcaa

SEQ ID NO: 98321 - DNA, 126 bp, Homo sapiens
agggagggagaggtcaactttagaggactgatctacttcatgtcaaaatacacagcaacttcttgtgtctctccagtgccttccacaagaccctgcccctcctgcggtatccccattccctgctct

SEQ ID NO: 98322 - DNA, 369 bp, Homo sapiens
ttttgagatggagcctcgctctgtcacccaggctggagtgcggtggcatgatcttggctcactgaaacctccatctctcaggttcaagcaattctcctgcctcagcctcccgagtaactgggattacaggcacctgccaccatgcccggcttatttttgtatttttagtagagacggggtttcaccatgttggccaggctggtcttgaactcctgacctcaggtgatctgcctgccttggcctcccaaagtgctggcattaaaggcatgagccatggctcctggccgtaagtgattcttgaagcttcaaatttttaatttagggacatggctggaaacccatgttgatcattcgagaataactattatc

SEQ ID NO: 98323 - DNA, 226 bp, Homo sapiens
gagcaaggaactgaggcctccccagggcagaacatgtgtcagagtggaaaaggctttggaacttggcattagagatgggactctggagaacttaattaagctcttcgaacctcaattttcttacattgtaaagtaggtcataatacccaccttagagattctgtttgggagttagatgagagagcagatgtcaagtaccttgcacggtgccgggtgcatggtagta

SEQ ID NO: 98324 - DNA, 668 bp, Homo sapiens
tgttgaaacgtggaaaaagggaggaggaagaagactggtaagaggcatgaaaagcttgtatgggcgtttttgagactgctaagagcagcatcggggtgtagcaggcagtaggtatgcagaccttgtatatactgggagttgggtacttagtagttgtaagtgtttgggatgaatatggatggaggcgtgtggtgatgggtatagtatagaatacatttcagttccaggagtattgtgcttggacagcgttgtatttgattgagcaaacttttaaccaaaatactttatagaaacaggataaacagcgttcaactttctcttaagaacagaatctacaggtctggggaacagaggaagaaacaacccaaaattaaaactgtaaacgtttgttttaatacagcttatgtttttaagtaaaaatagcattaattattcacacatttgtagatactgttacctagatctaaagttttagtgctaccccataatcattttaattatttttttcagagaatttatctgatttttgtcctttctgtgaagtttgtttcatttttttaaacgtaaattatttcatgattccatttccacattctcagcacatttttaaaaaattgataacactgtatgttttttattatgtacaatatagtttttgaagtatatat

SEQ ID NO: 98325 - DNA, 265 bp, Homo sapiens
aaaaggttcatcttttattcctccaaacactttcatttaaatcaagaggatgggatgtggttattgctgtgtttttaggcagaatcaacggtttctgggtctgagatggtgcatacaccctctcagtccctgtatcctgagatggagtcacctaagaatccacagcaagtcctaaccagggatgggtctgggtgattaaggaaggttggcttcagaactgggccaggggcactgctttgcttttgctgttttgatcagctctctg

SEQ ID NO: 98326 - DNA, 527 bp, Homo sapiens
cacaatgcctctccctcctcccctgggagtggagccaggctgacctctctctggctccatactggaaatgtgtgtggcaatggcagcattgccctttaccccatgcccaatactgcaatggcaccttaggctgtgtgtgtgtcagacagaaaaataaaacatcagatttttgttaattttgggtgatgagtgaggtcagggatagttattattttgagactgctatttttttttctcttttttaaaaacagatggggctgggcacaatggctcatacctgtaatcccagcactttgggaggctgagggaggtggattatttgaggccaggagttcaagaccaccctggccaacacggtgaaaccccgtctctactaaaaatacaaaaattagccaggcgccgtggtgcatgccagtaatcccagctactcaggaggctgaggcacaagaatcacctgaacccaggagacgaggctgcagtgagccaagatcacactattgcacatcagcctgggtgatagagtgaga

SEQ ID NO: 98327 - DNA, 166 bp, Homo sapiens
cctctcactccagccttctctctcaaactgggtagtatcctggtccttccatttactagctgtgtgaccacgggaaagttactcaacttgccttagtttcctcatgtgcaaaatagaaaattgcctatcttataggcttactgtgaggataaaacacatttaaaga

SEQ ID NO: 98328 - DNA, 439 bp, Homo sapiens
tatcgtagccaagagaaaatggagtttctttgaacagcatctgtctcccttcactgctggtaatttgtgtgttattattaatcactgtttttggaatctctgggtaaataggcactaaataagcccaaaaatatgagcaaaagttgtctgttaattcattggccactgcagaaaggagtactaaagcccagaaaagagttctgagcttccttctatctctcactagcgtgttctctctaatttgcattccttaaaaatgagttgcacttgctttagtggcatgtatattttttaaaaatacagataagtttagtgtggctcctgtataaaaatgactctcaaaaaatagtaataaaaggaacatgctctccaagggagctatgtgcagctcttggcccttggatgcctgtggctgggagtctgaatctgtctgcccatg

SEQ ID NO: 98329 - DNA, 222 bp, Homo sapiens
aggttatacacattgcacaaatcctacagataataagtagtagaccttagccgggtgcagtggctcatgcctgtaatcccagcactttgggaagccaaggtggaagaatcacctgagaagtttgagactagcctagtcaacctagtgagacccaatgtttagaaaatcatagacctagagttgaacccaaacaggttggctccgagctggtgctgtaatgta

SEQ ID NO: 98330 - DNA, 458 bp, Homo sapiens
tacatttaatattcatttaatccaagaacttcattttacaaattgggaaattaataaccaaagacataaatcaggtaagacttgattaatgaaatactgaatagaatactaggtagatcttatgcagtggttactggggaccaggcccttatccatgtgagctgcagactcattcaatcctctcagcagccggcatggtaggtgtgacttctgccatagtgtttgttctgtttccaaatatattaacagagatgtacagaagcagcagtacagactttagagctgatgaagaactcattgatcacctttctcaatgtccacttttatgagtaaggaaacagaggacgatgcatatttgatgacttgcccaaagtcactagcttctaagactaaaattccagcatcctggctgttttccaggtgttctttcatcacattatgttcccctcatctgtgaa

SEQ ID NO: 98331 - DNA, 391 bp, Homo sapiens
tcgagctcggaccgcccgatagccgaaggtaagatcacagcctctcctgatttacgacgggattagcaccttggctaagcgttctggaagccttccgttggctatagagcgtgccgagtacagtagcagtggtagtgccacccccagcttcccctcatgttaacatctcatataataaattattgttggtacaagactacagaactgggcacagtggctcacacctgtaatcaagaactttgggaggccaaggcaagcaaatctcttgaggtctggagttcgagaccagtctggacgacatggtgaaaccgtgtctctattaaaaatacgataattagccaggcgtagtggtgcgtgtctgtagtctcagctacttgggaagctgaggtgg

SEQ ID NO: 98332 - DNA, 430 bp, Homo sapiens
gttagatgtcctgtcacttgttttcttggattgaatgtaatagaaataagaactgtggctacctatttttctaactagatgttagaggaatttaatacattttctccagaatgtcttagtatgattttctgctaattaattttgccaataaaatatgctctttagggctgggcgtggtggctcatgcctataatcccagcacttcgggaggccgaggcagaaggatcacctgaagtcaggagttcgagaccagccaggcctacatggcaaaactcttctctctactgaaaataaaatagctaggtttggtggcgcatgcctgtatactcaggaggctgaggcacgagaatcgcttgaacccagggagcggaggttgcagtgagccaagatcgtgccactgcattccagcctgagctacgaagcaaaactc

SEQ ID NO: 98333 - DNA, 713 bp, Homo sapiens
  misc_feature (35)..(37): n is a, c, g, or t
tcaaggaaggaaggcacgttagcaaggaaagaggnnngaattcggggttacccacagttcaaagatcaaaacaaaatggtaactgccaagtactccgtatcataaagaagatgctatatcatccatgcggccagtgtcaaaccactgtgaaaataattctgcctgcgttacccagtatgcctgcctccagactgtatacgggagttgatgaacttggagtgtggggaatatttcagagacagttttcagtgttttgtgaatggaacatacacacgcacacatacatgcatacacacacaggtgtacacacatacacacaaaaagcgcggtagttttttttctatcaccacaggcaaagagaacacgctttagaagtacttcttagagagcttttaaatgttctctggaatttgggagacagaaagactagtatatatctgtattatatatggcatataggataacatatgtagcaaaaatagatatagatacatagatatacgagagagcaaataaattagaaagttatttatctagaaattgtagattgagtaaataataactattctacactcatataaggacactgttcagctattaatattaaaattatggtacatttatatttattaatagataaatactcgtaaaatatttgtaactaaaaacatcagctatttgtgcttcatattcataatgtatgtatacaaata

SEQ ID NO: 98334 - DNA, 393 bp, Homo sapiens
tgagacagagtctcactctgtctcccaggctggagtgcagtggtgcaatctcggtttactgcaagctccgcctcctgggttcatgccattctcctgcctcagcctcccaagaagctgggactgcaggcgcccgccacctcacctggctaattttttatatttgtagtagagacagggtttcaccatattagccaggatggtcttgatcttctgacctcatgatccgcccacctcagcctcccaaagtgctgggattacaggcgtgagccaccgcacccggccaacactcagtgtctttatctgggccaaacagatcaggcttgttgaacactggaagtggatcaagatttcatggggaccccagcacacccaggcccaggcagaggactcttc

SEQ ID NO: 98335 - DNA, 253 bp, Homo sapiens
gggttggggggagcacaggccctcgggagccagaaggggactggggctgtggctcaggccatggacagagcagaggcgcagggacctgaagaagcagagggagaagcctggccaacatagcgagaccccatctctactcaaaagacaaaaattagctgggtgtggtggcgtgtacctataatcccagctactcaggaggctgaggcaggagaatcacttgaacctgggagggggatgttgcagtgagttgaga

SEQ ID NO: 98336 - DNA, 463 bp, Homo sapiens
ataagcaaaacacacagaatgtcaggtggtgagagagaactacggagcaagagtgagaaggagagggagtgtgggcacagcatggggaaggctgcattttcagtaatgacgtcaggaaaggccttgctgagaaggggagaattgcgagaaaccaggaggagaggggtaagttgtgattatttgccatcaaggattctgagttgagatcaacaaatgtgaaggcgcaggggcaagagtctaccggcatgtttgaggaccagcaagactccagtgtgatggggcagagccagtgaagggagaagcagcaggagctgaagtcagagaaataataagcaacacattacacgggcccagcaagccactggggctttgactttcatgatgagtgagataggaagtcattcaagggctccgaaaagagtgtcaggattgacttagaatctaaaacttgctttggctgctg

SEQ ID NO: 98337 - DNA, 522 bp, Homo sapiens
attaaaatcttcggttctctgaaagacattgttcatagaatgaagaaacaagctacaaactggaagaaaatatttgcaaatcacaaatccaacaaaagacttatatccacttaaccaaagatgatatataatgtaaataaacccataaaaaacagatgctcaaaatcattacccattaacgaaatgcaaatttaaatcatgatgcaataccactacacacctagaatgacaaaaattaaaaatactaacaataccaagtgctggtcaggatgtggaactactagaattttcatacactgccagtaaaactgcaaaatggcataaacactctggaaaacagtggcaatttcttataaagttaaacatacacttaacaaatgacccagcaatcccactctcaggtattacactagaggaataaaaactaatgttcacacaaaaacttgtacgtgaatgtttacagcagttctattcctaatcaacacaactagaaaaaaaaaacctaaatattcttcaaagaat

SEQ ID NO: 98338 - DNA, 329 bp, Homo sapiens
gaagaactaccagaccgttttcacagtggctgcaccattttacgtttgtatcagcagtgtacgggagttccagtttctccatatcctcaacacttgttatgatctgttttattacagccgtcctagtgggtgtgaagtgtacctcattgtggttttgatgtgcatttctcgacaaccagttgtgttgagcatctccttgtgtgttgtgtatttttatacatcatagacttcagacctagaaattaatggaaacgtcctgatcatctagcttgacccttttcttttccagataaaaaggcttattgggttcagagagatgcgggtggtga

SEQ ID NO: 98339 - DNA, 225 bp, Homo sapiens
aagcatgtgtgcatcagataggagctgcgagggagcctggagaattcaaaacagacttcacgagagggacagtccgcctttgattttattagcattactgtcatgctgatcatgcagttatgaaagagagaaaaaagggaaaattttgacctaactactaggaaaattccacaaaattggcacaatctcaatcagttcacacagaaccacagctgccacaaccca

SEQ ID NO: 98340 - DNA, 292 bp, Homo sapiens
tcaaggacagagtgatttcatgacatctttctttttctaataaaatttagtgatgattttgtcaacagaattaaccgttccaggatgcgagatgccatttaactacttaactatttcactatttagaatcctgaattcttcagatttcccttgactatacctcattctatgtcctataactttaaaataaagtaatttattaaataaatgaccttttaaaaacaaatgcagtggatttacctggaaaaagttaaagaacattataatattacttttccttacacaaaaggta

SEQ ID NO: 98341 - DNA, 148 bp, Homo sapiens
cgggaggtagaggcatgatcatgccacttcactgcggcctgagctacagggactctgtctcaaaggaaagaaaacaaacaaacaaaaagccatgtagagctgggctatccaatacttgaaggtagccagtggacacgtggggccattt

SEQ ID NO: 98342 - DNA, 622 bp, Homo sapiens
agacgatgcagtgaacccactgggtgaatctgacaattatgtgtctgggggttactcttctcgaggagtatcttggtggtgttctccgtgtttcctgaattgaatgttagcctgcctggctaggtgggggaagttctcctggataatatccggaagaatgttttccaactgggttccattctccccgtcactttcaggtacactaatcaaatgtagattgggtcttttcacatagtcccatatttctgggaggcttggttcgtttctttttactcttttttctctaaacttctcttctcgcttcatttcatttattggatcttcagtcactgatacactttcttccacttgatcgaatcggctactgaagcttgggcatgtgtcacgtagctctcgtgccatggttttcagctccatcaggttgttttcggcttttggctattatgcagaatactgctatgaatgctcatgtacaaggtttttgtgaacatacgtttttaattcccttaggtatacacctaggagcggtattcataagtaattcattatttcttgtattcactggtatgctggtaaatatttaacaccagttttcacttggtagggttggggatctctgatt

SEQ ID NO: 98343 - DNA, 831 bp, Homo sapiens
accgaggcggggctccccaggatcccacggtcccgctcaggccagacgcagaggcagtcccagcccgcgatgaggacgtggggtcgtgaccgctgggccacggtgaagggggcagccctgctggacccgctagctgggccgacgctttcccacccctaggggtttgctgggccctggccgcaaacttgtggggcgccgtcctcggggccactgcccggccaccctcacacccttgggccctcagctctggtgcattggtccgggctccgggaggcactgagacgtccccctagggcgctgcagggaagcgagggccaggcccttccaggtccccggtcctcccgggcaggatggaggctgctgaacgctcctcaagcttccaagtcagccgtggctgggcgggcggcagcagggaaggtttgggctccgccatgcttgcgagccagcagcctggcctcgcctgtccgcagcagggggcaggtcagctgcccgccctgaaagggaggaccagggcccagattctccctgcgacaagccgcgtcttccttggccactgggccctagatggttggcaccttgtgccccttctcagctgggagagttcctgccccacacactcaaggattctgagttctccttggctgctagacctctggtccctctgaaaggctcgagagagaactcccccagggcctgctgtcctggcatccgctgggaaataggattcaaggacctgctgtggctcagcctagaaaaaaggaggggaagcaggacccactcctcggcccccggtctgctgtgcgcctttgggattccttatttcttaaactg

SEQ ID NO: 98344 - DNA, 873 bp, Homo sapiens
gcacatccccaggatagtgttaaccgtcacctttacgcatggcactcagaatgcgcagagtggtgtgtgcatgcagcaacgtgtatacaccctgtgcatctgggaggtcctccagtcatctctggccgcgtcctgcggagggtgctgcagcctctacctggcctctggctctttctttcctttcctttctttctttccttctttctcttcctttctcttcctttcctttctttcctttctttcctttctctttcctttctttccttcctttcttccttccttccttccctttcttctttcttttctttccttcctttccttcttccttcctttctttctttttcttctttctttctctctctctttctttctttctctctctctttctagagtcttgctctgtcaccacgctggagtgcagtggagtgatctcggctcattgcaacctctgcgacccagcttcaagcgattctcctgcctcagtctcccaagtagctgggactataggcatgcaccaccacaaacagttaattttttttgtatttttagtagagatggggtttcaccatgttggccaggctggtcttgaactcctgacctcaggtgatcccccccaccttggcctcccaaagtgctgggattacagaggtggctcttttaattgactcctctccaggcatctctccttccagccacagagcctggcctgatggtcccagggccccagggccccaggtgaaggcctctctcctcccccactcaggtctgaccagctctgtttccatcctggtgtgggcacaaggtctcttgctgcagctgggccagtttgctgaccttctcagctccttctcttagactggagaggcctggaag

SEQ ID NO: 98345 - DNA, 222 bp, Homo sapiens
tttagtgggtctggggtgggcgcggcccccggctaacggggcgggtctcctcctctaggcgcaggagtgcgccgggctctccaggcctccccggctaggtggagcgtgacaccgcaaagcacaccgtcctcccgaggcggggcccaggcggcaccagcccctccccagatggaagtgcccggcagacagctgcccaagacctcacagaacaaagatggacat

SEQ ID NO: 98346 - DNA, 599 bp, Homo sapiens
aaaaataaggatgtttattaaggacatttctagcccacagctagggctcatactcggctctatgagcactgtccgacctcatccccattcaatgtgaatgacattagggaggccgggccacaggtagatcccactgcctggctaaaggggccatagcaaggggtccctcccatgcaaggggtctctcccatagccaggtatagaatagatacactgctgcggatgaagagggaaatctcactggactaatacattcccctacaccctgcctggaccctctcattcctccccacctcccaagatgatgggtcaaaggtacctagcactattatgtggggtaccaaaggaagcccctttattttgtcccagaactgtgggaaaaggatacccttcccttctcagccatctcaggcctgggggctactgaggtagagggggaggggccaggccactctaatcccccttgtgggccctgctctggacctgccccttagggaagcagggggcattttgctggtatgggaggctgggacatcagcccagactggaatgctgcagttcttcccgaagccacgagggcactggctgtccaagccggc

SEQ ID NO: 98347 - DNA, 383 bp, Homo sapiens
tacatcctggtagagggggaacgtccggacctaatcattttctatgtgtgattttatatatatatatttaattttagtctaggtgcagtggctcagacctgtaatctcagaactattgtaggccatggggaggatcgctttgagcccaggagttcaaaaccaccctaggcaatgtagagggatcctatctctacaaacataaaaataaaaatgaaaacattatctaggcatggtgacgtgtgcctgtacgctcagctacttgagaggctgagatgagaggatcacttgagcccagaaactccaggctgcagtgggctacgattacaccattgcacttcagcctgagtgacacagcaagatgctatccctttaaaaaataaaaa

SEQ ID NO: 98348 - DNA, 590 bp, Homo sapiens
tattttattactaaaatgatctttagtataaacatctttaaagctaccttgatttttaaaataatccttcctcaatttagaaaaattctaaaatggcggagcatgttggctcaagcctgtaatcccagcacttggggaggcctaggcggtggatcacctgaggtcaggagttcaagaccagcctgaggcatggagaaaccccgtctctactaaaaatacaaaattagctgggcttgatggtacacgcctgtaatcccagctactctggaagctgaggcaggagaattgcttgaacctgggaggcggaggttgtggtgagctgagattgcaccatcacactccagcgtggacaacaagagcacaactctgtctcaaaaaaaaaaaaaaaattctaaaatacagattaaaagataaaaccacacaaatccagtttcctggagatcaccattgtcagcatttggtttacgcaaaaacattattattttctctgtaaatggatacatgtaaataattgcatgtgtaatatctgtttgccacaggtctgtacacactattccaaaccctgaacctttcattgacaaacatgactg

SEQ ID NO: 98349 - DNA, 226 bp, Homo sapiens
gtgggctgaggctgaagcccctgcttttccacaggtgtctggcaggaaaagggtggggaaggagagtgggatccaggcaaggcagagagagcacactaagactagaaggttgcctcctcacccacggcccccaccacccaccgcctgcctttgggccataaagcaatgaggggccctcatagctgggcagaccctggaccccagcaaaggggagtgggcaggcagt

SEQ ID NO: 98350 - DNA, 367 bp, Homo sapiens
tgctcccattttatttgcatttccctctcaattttcagttagttcaattacttatttattgagtccttttctttgtctagttttgtgcttctttgtcaattggtactgttcttcacatttggtatgcaggccgcctgggctctgccttcatgactaactcatgcactcttttaataaaaataaaaattttcatggtgaaaccccatctctactaaaaatgcaataattagctgggcgtggtggcaggcgcctgtaatcccagtgggaggctgaggcaggagaatctcaaactcaggaggtggaggttgcagtgagccgagattgcaccattgcactccagcctgggcaagaagagcgaaactccatc

SEQ ID NO: 98351 - DNA, 454 bp, Homo sapiens
ctatccaaatatctgcattcctttaaaatgtgaactatttgctgtgattaaccaaaggtagattatgtcatcagtggacattttagctttatggaaacaaattattaagaaatgaatagaaaggtgtctttttctttgtgtagtgcaaaagcctaaagctatcagtcaaaggcctaagaaatccacatttgaaaaacgtaaatcatgattggtaagaatacattcatctgatagtattgagaaaagttgaaaaactgttagccttccataacacattaaacattttatgtatggatggctgaaagtattgagaaaagctgaaaaactgttagccttccataacacattaaacgttttgtgtatggatggcttaggacaataaacaacatcattaaagtaaaattatgtcagtctgttcatattaacttatttaaatcaatgaaaattttgatga

SEQ ID NO: 98352 - DNA, 149 bp, Homo sapiens
ccatcgtctttgtctgcatcagcaaactttggatgaaccattgagtgccgaattccactgggcactggggacacagaaaggataagactgggtccttgagtttatgtgggggtatcaggggatgctcagtaaatgaaacccactcaagt

SEQ ID NO: 98353 - DNA, 460 bp, Homo sapiens
ttagtagatttgggttttcaccatgttggccagaatggtctcgatctcttgacctcgtgatctgcctgcctcagcctcccaaagtgctgggattacaggcgtgagccaatgcacccagccaatgcatatgttttttaataagtgtttctcatacttttccttaatctcctttatcgtactagcatcttattatttactgttgatacaacattctgatttcccctctaagcccaaggtaagctgcttcttactaaaaaccaatcattttagaaacaattaaacatgaccaagcaaagactgagctttatggtcacactctgttatgtaaatgaggtaatttaaaacaaacttagtgtttttttcttttatatttaagcttatattgttttacctagatgtttaagcaactctgccaaatgtacagttcacactgtatcataaatactattacaaatttatt

SEQ ID NO: 98354 - DNA, 375 bp, Homo sapiens
gtgaggggatccttacagacgtaggcagagaggggctgatgacaggtggaggagagggacgagcaccctttcaaagggagctgtccgggatgacatgggggtgctgtgtgtgagataaggaacactgacggagggccagctttggtgggcgcagggaggaggggctgggcacatcgagtctgaggtctttaaggtatgccaagtggagaacgtcaagaacaagagagctggatgttcatgttcagaaatccaaggtgggtgcggagagaatatggagtgagggcaggaggatacaggttagagactccacaaacctttactggtggtccagaagaggcagtactaggaaggagacagagaaggaacagccagaag

SEQ ID NO: 98355 - DNA, 207 bp, Homo sapiens
ttcttttgctcaagggttcacaagggcagcagactgatctgcacaagagggactgagcctggctgcggccgcacctgatgcctgtgcacacctgtccctggtggtctctcctgtggtgacttcttttgctcaagggttcacaagggcagcagactgatctgcacaagagggactgagcctggctgcggccgcacctgatgcctgtgc

SEQ ID NO: 98356 - DNA, 566 bp, Homo sapiens
atatctatcccccgctccctgtccttgctcaggactcagcatttaacagtggagagaaaagtaagactgaaagccaaaaactatgatgattctgagcatggtttgatactcccaagattttcagaaatgtagttgacatccagtcttaacaaacattcctgagaacaaggcattttcccacagggtgtttaggggtacttaaatacataaaacagggagtggtcagtcactaggattaagatcaaaatgacaattctgagaagaaagtctcagtagtcattagatttttctctttaatcagaaacaaagcactgaaatggatttaagatgtcccaattaaaactgttaagaataccaaatatgagatcaccaaaagattaatgtctcatctcagtttatgccttcttgcttcaaatgccagaaaggtgttcgaattccaagaactagatcctatatgtggatatctttttgaatccatgagcgacaaaaagagaagattccaagttctctcttcatactgcttaacctatctggtggatctgacattactggccattcacaccttg

SEQ ID NO: 98357 - DNA, 437 bp, Homo sapiens
caagaggccaggagatggaggctacgataagcgatgatggcgccactgcgctccagcctgggtgacagagtgagaccctgtctctaaaaaaaaattaaaagtatctgttcagatgtttaccaatgctattcatccgagcagacttttctcccagaaccaccagtgtgtaagaatcctcttttttttttttcttttctttttctttttttgttgcatgtttcccctatgaccctgagtccaaaagaatgttcagggggacagccaaggcttcaaagtggttactgtttcacctgttacaaacaaaatgttggctaggcacagtggctcactcgtgtaatcccagcactttgggaggccgaagtgggagaatcagttgaggccaaaggtggagaccagcctgagcaacagagtgagaccctatctctactaaaaaagga

SEQ ID NO: 98358 - DNA, 372 bp, Homo sapiens
aagatcagcaccactgcaatccagcctgggtgatagagcgagactccatttcaaaaaaaaaaaggaaacggacagacacacacacagcccatcccagggcggacccagggaccaggatagaagaggccaggtcccagccttgtaaggcacagcggctcaacccagaaggcagacagtgagcgaagacagaccagatcttgcagaaggtgggctacccgggccccaagtccaagccgaggaaggacagaggccactcaccaggatgtaggcttccagctgtaatgaagacacagatgcagtgagcaaatcttccagcaaaccccaaaccctttcaacatgctcatgcatggcctcggtccccgggacaggcag

SEQ ID NO: 98359 - DNA, 300 bp, Homo sapiens
ccaccttgtcaggaactcagttgtcaataatttctttatttgtgatacaagcagggatggggaaagagaaatgagcagacttggaagcttctccgaggccctagagaatacctctgggctccgaacaccagacgccaggagaaaggagggtggttgatgactccccactctttctccagcccctgctcctctgtttctccccttcacccactgcagcttcctcaggtcctgggtcccgtgccatcatctcttcgaatgacctcctttctatccctgttaataaaggagcatcagctaagt

SEQ ID NO: 98360 - DNA, 421 bp, Homo sapiens
ttttgtatttttggtaggggcggggtttcgccatgttggccaggctggtcttgaacttctgacctcaggtgatccacccacctcggcgtcccagagtgctgggattgcaggcgtgacaccacgccgggtcaacacctgttagttttgagacaccttgaaagctagacgttgtcccacaaagagaagatactgtgtaagaaaactcttaaaccaaacaacagcttatagacctccagctccttaacagtttctagacattccatttcaggacaatgaagtcttcctacatcagatgcggctctaggttgcccacaagcacttggcaccagggacactgcactttaggaacaaagtccccaccactagttcttgcagctttgttgctgaacctcatagtaatccttgctaaggcctacccagt

SEQ ID NO: 98361 - DNA, 400 bp, Homo sapiens
tgaccggagccctggcctgctagagagagatccactggcctcctttcattatgtcttgggctttggtcaatacatttacagagagactggagaacatccaattagatgattagaaatgggtaaagaggccggacacagtgacccaaacctgtaatctcagcactttgggaggctgagacaggtggaccacttgagcctattagttcaagaccagcctaggcaacatagcaagaccctgtctctacaacaaacacaaaaaatcagccaggtgtggtgatgtgcacctacagtcccagctactccggagactgaggtgggaggaatgcttgagcccaggcgaccaaggctgctgtgagctgagattgtgccactgcacggcagcctgggcaaaagaacaaga

SEQ ID NO: 98362 - DNA, 443 bp, Homo sapiens
tttgaagacccccagagaagaacagaatcaatatgagaatacagtttcttcacctgcctgtcttatggctccaacctgcactctttgaccaatcaacaatctccacactttggcacactccaaaacccttaaagacactatccccaaactcctcagagagtcggatttgaggtttcctcctgtctccttgtttggtggccctacaattaaacctctttctctgctgcagtctggtgtcttgggcatatttaaaattgcctttgcaaagattatgacagtgagagaagtctagcaaggctgactccctcttgcttctagccccccaggctggctgtcctcactcattcctgggcataggccaagctaaccatgggaggaatttagtttacagtttaactttgaagaaaggatgataatagtccctctctaaaactgatcccctc

SEQ ID NO: 98363 - DNA, 348 bp, Homo sapiens
cagatggaggcagtggctggagtgaatgaacggcaacacttgctggcaaccggcagaagctgagagacagggaacaggctctcctccagagcctccaggagccaggcctttggacaccttgaatgtgggcttctgggagaccatgcgtttctgttataagcagcccagtctctggcagtttttacggctgccccggaacactcatctatacctgtctgacaaggtcaagctccaaggaagggattctttacatatctacattgtttgcagattttacaataatcatttattcttgcatggctgatcattgttaaccaatacaaataaaataataaagaaatgacccac

SEQ ID NO: 98364 - DNA, 384 bp, Homo sapiens
cctccagctaaattttgtatttttcatagagataggctttcaccaggttggtcaggctggtctcgaactcctgacctcgtaatctgcccccatcagtgtcccaaagtgctgggattacaggcatgagccaccacacccagcccctccaactatttttatataacatttgttatgtctacaaagcaatttatgaagaggagctaaaagaggagaataaggtcagttcatttatatctaatctactgactttccacctccctccatctctttcatcatgattaaagaatagcaaacattaacaagtacttcaaaggagcagtgcactatgattgcacctgtgaatagccactgcactccagcctgagcaacacagcgagagctctt

SEQ ID NO: 98365 - DNA, 435 bp, Homo sapiens
taaaagctttgatgaagtcttggtttgcttgggctgtgtaggttggaggctcagcctttgtttctccctcctctggtgcccagtggtggtgtttgtgtccgtgaattttcaacctctgtagtttgtttgtagttatgaccactgttgcaccgaacccttaccgagggccaggccctgtgctaagcacttgccagtgtggatttattaagtcttcatgacagcaccatgtagggggagctgcgtccctgtgttgtacttgggacgcgatctgacctcaggcacttcaggctcctgaagggtctgcagtctcgtctctgcctgggaaaccacgatttgcagcatattccacagacctcatgctcatcaccaggatgcttcccgggactgctgcctgagatttctaagttcctaatgtggttcatgcttctggtgagt

SEQ ID NO: 98366 - DNA, 346 bp, Homo sapiens
catcatagcaacaaagggctatgtactatactcaggaaaaccatttatttgcactggaggcaactgttcttgagagaggaaaagtaaattgtccaagatgtaacatcttataaatagcaaagcaaggatgaaaattattatattttactaaatcagtatgagaatcctgattcttcattattatatccccaacactctatcagtttgttgaacaaatcaacaaataagcttgaataaaggatccacatctcaattctcctccaccattctatattgcccttcatccctacattaaaatgattatttctgctttttttctttaacaatttatccctaaagtaactag

SEQ ID NO: 98367 - DNA, 291 bp, Homo sapiens
ttgagacagttgcaccgtttaacaataattcctgaattttatttttcttcctttccttctttctttttagtggcttgtacctgatcaattgctaatactgtttaaaattgataggcactttttggtctggtaatctgatttttttgtggaacatcattaaaagaacaattgagagatttatagccatagaaaattgaggcttctattactcaagatagaagttagcgtaagtctgatctgagttttccactgtttttttttgttgttgttgttataagccttggtgtgggt

SEQ ID NO: 98368 - DNA, 289 bp, Homo sapiens
cttcaggcggaaactcttgtcacacttgggacactgaaaaggcttctctcccgtgtgcgttctgatgtgctcgatgagctttgagtgtttcacaaagcccttgccgcactcacaggagaaaggcatctccccgctgtgcagcagctggtgggccttcatgtcggccttcacgcgatagcgcttgtcgcactccggacactggaagggcctctctcccgtgtgcaggcgctgatggctgagcagctgccccttcaggcggaagctcctgttgcactctgggcactggaag

SEQ ID NO: 98369 - DNA, 430 bp, Homo sapiens
ggatttaattattagtaatagaactgtaatggaagaaagttaaatttatttgattaggtatctgcattataaatgtttgaacttggaagtcatatttcttcttcaaaagcagacatctttcatgctgttaatgtttatacattttagtgcttggataaagctattctgacacactcaattagttctttcaaaaatgcatctctttgctgtccctccccctccccctcaaaagttctagaagctgtgggaaaagttcagttgtctatctactgaacgtagtccaaggaatacccgtgggtttgttcactgctcggggagctggacgtgtgccgctctgacttcctttgcacatccttgcttccctgaatttgcatttattgcctaactagcatcccgcaaaaaggcctttcctggctgcctgcgaattggc

SEQ ID NO: 98370 - DNA, 343 bp, Homo sapiens
  misc_feature (174)..(174): n is a, c, g, or t
  misc_feature (188)..(188): n is a, c, g, or t
  misc_feature (228)..(228): n is a, c, g, or t
gcgtatatacacttatcaattattatgccaatggactagtacagctggaggtgctcatggtgacaccgcacaggacttcctgcctgctagaaatcatctacccgcgtgtcctttcccctttctggggcaaaagccactgcgggcatgtacccaaataaacctcttaatgcgttngttaaaattagttnggacatctgagtttccctctgaagaaatggaaaaagtgtnggggtggtatagctgataccacccacctacacgttggatgaacatatccaaacaaacattttcttctctcccaaatgccgctcccctttctcatctccgttaataaaattatcat

SEQ ID NO: 98371 - DNA, 706 bp, Homo sapiens
actgcactccagcctgggcggcgggagagactctgtctcaaaaaaaaaaaagaaaaagaaaaaatgtcaacgtcactcatatcaaaataagataccatttttcttctgtcagattgttaagtgtcaagaaatttgataaaagtgttactaagcacctatgtggagaaataggcgctctcatacatggcttgtaatttaaacctctgaggagggcactttagaaatatttattccaaatcatcagtgaacatttcatttgctgctacaattccacttctaagaatttatcccatatattatgtgaatcttaggtgtaatgacaattattagaatttcataattctttgagcagccaatgtgtgttctaagagtgtcctacaccaactgctttagtcctgacagcaaccccatggggagagtcctggcactttgtattttgcagacatgactggaggcacaagagtagttagagcaagtcacaagctaacaaatggcagaggagtcagacctggctgtcccagaatcctcagttctgacactgcaataccttgcttcctggtgcagcagcatctgttctagaaaaagctggagacagtcttgtggtccctcagtagaggctgggttaggtatattatggcacacccatctagtggcatgccccatggcccttcatgaaagggaggccctttctgtattgctgcatttc

SEQ ID NO: 98372 - DNA, 467 bp, Homo sapiens
tctccaaccggtgtttcaagtacctgcagccttgaccgtacccaatacagtgctaactgagatctgtggtctaacagtgacataagtgacaggtttacctgagatctgacatttttaattcttggaaaatgcattcaaacgttgtacacaaataaccttgtacacccatggttggaggaaacacttggtgacattaggacttactgtgatagccaacaaatcagtgtgtgaacgcaggccaaccggagggtcccatgagatgcaccagcagaggtggcatgcaaggtctgagggacctggcactttttttttttttttgagacggagtctcgctctgttgcccaggccggagtacagtggcgcgatctcagcccactgcaacctctgcctcccgggttcaagcgattcttctgcctcagcctcctgagtagctgagattacaggcacctgccacgccacctgactga

SEQ ID NO: 98373 - DNA, 310 bp, Homo sapiens
ttccagaaagaaagaaacagtttttggacctcatctttttcagttgctcatccctagagcttagcaaaatgcttaatacatggtcggtacctaatatatgtttggtttttttttttttttgaatgtacaaatgaggcttttatgaaactttttttaattgggaagtcgtttgaatgccaaatttctgatttttataatttgctttccaaagttttaatgttgtcttgcctagccctaaatcagcagtcaatattatattagagattcacttttattgattctttccaaattattcatcttaattttcatg

SEQ ID NO: 98374 - DNA, 336 bp, Homo sapiens
tagagagatacagaaatcccataatcttacacaaacataaaattgccagactgtgagaatagattagacataggtggtgacttaaaaaagggtgttcaaattagtctcaagtgtgagatttgtcaactgcattggaattgggtccatttactgaggtaaataagagtgaataaataacatgtttggcaggattgatatggggttattcttgagatgttgcccttgaggtatctttaagacatcggagtaggaatgtgaagtatgcaattggatatatgaggcagaaagcgtctgggctggaggtttaacattgagtcaagtgggaagatgctatta

SEQ ID NO: 98375 - DNA, 375 bp, Homo sapiens
agagaccaacaaacttcacaagggaagtgtttatcctacctcaagagtttgagcacatgtcctctgaacccaaggcagcccctgatccacagagaataggagagacagtgccttaggtccagtgggagcaggtacgggctgctatgctggggagtctaggacaacatgagaactagtgcagctgggaggcaggcaggcagtggggctctgcctggcaccgatccacaggtcaccaaaggctttccaagtcctcacttctgccctggaagcagatggctgcgacagccaggtgtgcagaagcccgctgaggcctacaatgagcacatcagcacctcatgatggctctgaccctgagaacagaagcaacccatggcc

SEQ ID NO: 98376 - DNA, 881 bp, Homo sapiens
cccggggaggaaggcgccccaggcttttggacaagcccgggtttattggatgtggtaaaacggtgtgtacccgcccggacctttatgggaattgttcaagggagctttccccgcctgtcttaggcccgatagtttatagcttcacttgaaggagtaactttcaaccttgccagcatcactggtatgatgtatatttaattaaagcacacttttccccgaccgtatacttaaaatgacaaagccattcttttaaatatttgtgactctttcctaaagccaaagtttctgttgaattatgttttgacacacccctaagtacaaggtggtatggttgtatacacatgctgccttcttggggattcaaaaacaggtttttgattttgaatagcaattagtgatatagtgctgtttaagctactaacgataaaaggtaataacattttatacaatttccatatagtctattcattaagtaatctttttacagttgcatcaggcctgaacccgtccattcagaaagcttcaaattatagaaacaatactgttctatacgagtgaccgattatgctttctttggcctacattctttattctgcggtgaagttgaggcttataagttaaaacaaaggaactaacttactgtccaccagtttatacagaactcacagtacctatgacttttttaaactaagatctgttaaaaaagaaatctgtttcaacagatgaccgtgtacaataccgtgtggtgaaaatgaattcagacttattaaatgatgaacttgttaaatcttctcagtgtctatttatcagcacaatacacacaggagaactgttgatggcatattgaatagattttcctgaataaattgctctggaaacca

SEQ ID NO: 98377 - DNA, 820 bp, Homo sapiens
  misc_feature (25)..(25): n is a, c, g, or t
cggcgggccgctgcactccccgcgngcatccgtgcgccgcccgaggctgtctaaggagtcggcggccattttgttcttctcgtggttccagtggggagagaaggaggaagtagggagcggggtggcaggggggggacccgccgcggctgctgccaccgccgccaccaccgcctctgctcgtggcgtgggaaaggaggtgtgagtcccgggcgcgagccggcggcggcgccgctgcgggagggtcggcggtgggaaggcgatggcggatttagataaactcaacatcgacagcattatccaacggctgctggaagtgagagggtccaagcctggtaagaatgtccagcttcaggagaatgaaatcagaggactgtgcttaaagtctcgtgaaatctttctcagtcagcctatcctactagaacttgaagcaccactcaaaatatgtggtgacatccatggacaatactatgatttgctgcgactttttgagtacggtggtttcccaccagaaagcaactacctgtttcttggggactatgtggacaggggaaagcagtcattggagacgatctgcctcttactggcctacaaaataaaatatcctgagaatttttttcttctcagagggaaccatgaatgtgccagcatcaacagaatttatggattttatgatgaatgtaaaagaagatacaacattaaactatggaaaactttcacagactgttttaactgtttaccgatagcagccatcgtggatgagaagatattctgctgtcatggagttacaccgacttatcatggccaatcgggattgcacatg

SEQ ID NO: 98378 - DNA, 480 bp, Homo sapiens
gcaacgggttctctctatctagctacagcctctcggctgcgccccacttccagcgtccatattgctaatcgatcatggactgtcagttgcatcaggcctgaacccgtccattcagaaagcttcaaattatagaaacaatactgttctatacgagtgaccgattatgctttctttggcctacattctttattctgcggtgaagttgaggcttataagttaaaacaaaggaactaacttactgtccaccagtttatacagaactcacagtacctatgacttttttaaactaagatctgttaaaaaagaaatctgtttcaacagatgaccgtgtacaataccgtgtggtgaaaatgaattcagacttattaaatgatgaacttgttaaatcttctcagtgtctatttatcagcacaatacacacaggagaactgttgatggcatattgaatagattttcctgaataaattgctctggaaacca

SEQ ID NO: 98379 - DNA, 1192 bp, Homo sapiens
ggatacatggtttttaactcttacaatatgcatcccatattgtaactcgatacaataagctcttgtagattttaatggtctgtgaacagtgcaggtttcctagagaactacctcacactgagcatccttatcttctcagctcagtcattataagccatcaatcataacatcgctcattattgtcatcaactgggggaagcccatagaagagttttttaaatcactggattttattttacagtgttctgtataatataattgtttccatgtactgtttaaacctactgcaccccatgcattactgcatgtaattctagtgtgtatccagttgtcctttttctgtgtttttttcttttaaccaaaagtaaataaaatataatcatagatttcagtttttatgtcaggattattgaatttctctgtagacaaatggaacttttgaaggggtagtatccttttaaaagttctgctttcttcattttttttttttcctcattgaataggtttatcaccagatcttcaatctatggagcagattcggcgaattatgcgaccaactgatgtaccagatcaaggtcttctttgtgatcttttgtggtctgaccccgataaagatgtcttaggctggggtgaaaatgacagaggagtgtccttcacatttggtgcagaagtggttgcaaaatttctccataagcatgatttggatcttatatgtagagcccatcaggtggttgaagatggatatgaattttttgcaaagaggcagttggtcactctgttttctgcgcccaattattgcggagagtttgacaatgcaggtgccatgatgagtgtggatgaaacactaatgtgttcttttcaggtagagcatgctttcaacatgatttccttttaatatgtttacactttgctgattgaaaaatataattgctactttttgcctagtgttcacttatgctgagtaggctaagtttttattttcccttaaccagtgtgtattatagttgaataatgtgtggatcccttgtaaaagaaaaaattaattatggcaccttttcccagtgttgaattataaatttttgcattgcatattggctccttaatgcttatggctcttttactgtaaatctaaaaccttaatgacaatgtaatgttcagctaaaattaaatccccacttgaatgtgaaaagta

SEQ ID NO: 98380 - DNA, 2496 bp, Homo sapiens
  misc_feature (25)..(25): n is a, c, g, or t
cggcgggccgctgcactccccgcgngcatccgtgcgccgcccgaggctgtctaaggagtcggcggccattttgttcttctcgtggttccagtggggagagaaggaggaagtagggagcggggtggcaggggggggacccgccgcggctgctgccaccgccgccaccaccgcctctgctcgtggcgtgggaaaggaggtgtgagtcccgggcgcgagccggcggcggcgccgctgcgggagggtcggcggtgggaaggcgatggcggatttagataaactcaacatcgacagcattatccaacggctgctggaagtgagagggtccaagcctggtaagaatgtccagcttcaggagaatgaaatcagaggactgtgcttaaagtctcgtgaaatctttctcagtcagcctatcctactagaacttgaagcaccactcaaaatatgtggtgacatccatggacaatactatgatttgctgcgactttttgagtacggtggtttcccaccagaaagcaactacctgtttcttggggactatgtggacaggggaaagcagtcattggagacgatctgcctcttactggcctacaaaataaaatatcctgagaatttttttcttctcagagggaaccatgaatgtgccagcatcaacagaatttatggattttatgatgaatgtaaaagaagatacaacattaaactatggaaaactttcacagactgttttaactgtttaccgatagcagccatcgtggatgagaagatattctgctgtcatggaggtttatcaccagatcttcaatctatggagcagattcggcgaattatgcgaccaactgatgtaccagatcaaggtcttctttgtgatcttttgtggtctgaccccgataaagatgtcttaggctggggtgaaaatgacagaggagtgtccttcacatttggtgcagaagtggttgcaaaatttctccataagcatgatttggatcttatatgtagagcccatcaggtggttgaagatggatatgaattttttgcaaagaggcagttggtcactctgttttctgcgcccaattattgcggagagtttgacaatgcaggtgccatgatgagtgtggatgaaacactaatgtgttcttttcagattttaaagcctgcagagaaaaagaagccaaatgccacgagacctgtaacgcctccaaggggtatgatcacaaagcaagcaaagaaatagatgtcgttttgacactgcctagtcgggacttgtaacatagagtatataaccttcatttttaagactgtaatgtgtactggtcagcttgctcagatagatctgtgtttgtgggggcccttccttccatttttgatttagtgaatggcatttgctggttataacagcaaatgaaagactcttcactccaaaaagaaaagtgttttgttttttaattctctgttccttttgcaaacaattttaatgatggtgttaaagctgtacaccccaggacagtttatcctgtctgaggagtaagtgtacaattgatcttttttaattcagtacaacccataatcatgtaaatgctcattttctttaggacataaagagagccctagggtgctctgaatctgtacatgttcttgtcataaaatgcatactgttgatacaaaccactgtgaacattttttatttgagaattttgtttcaaagggattgctttttcctctcattgtcttgttatgtacaaactagtttttatagctatcaacattaggagtaactttcaaccttgccagcatcactggtatgatgtatatttaattaaagcacacttttccccgaccgtatacttaaaatgacaaagccattcttttaaatatttgtgactctttcctaaagccaaagtttctgttgaattatgttttgacacacccctaagtacaaggtggtatggttgtatacacatgctgccttcttggggattcaaaaacaggtttttgattttgaatagcaattagtgatatagtgctgtttaagctactaacgataaaaggtaataacattttatacaatttccatatagtctattcattaagtaatctttttacagttgcatcaggcctgaacccgtccattcagaaagcttcaaattatagaaacaatactgttctatacgagtgaccgattatgctttctttggcctacattctttattctgcggtgaagttgaggcttataagttaaaacaaaggaactaacttactgtccaccagtttatacagaactcacagtacctatgacttttttaaactaagatctgttaaaaaagaaatctgtttcaacagatgaccgtgtacaataccgtgtggtgaaaatgaattcagacttattaaatgatgaacttgttaaatcttctcagtgtctatttatcagcacaatacacacaggagaactgttgatggcatattgaatagattttcctgaataaattgctctggaaacca

SEQ ID NO: 98381 - DNA, 2400 bp, Homo sapiens
  misc_feature (25)..(25): n is a, c, g, or t
cggcgggccgctgcactccccgcgngcatccgtgcgccgcccgaggctgtctaaggagtcggcggccattttgttcttctcgtggttccagtggggagagaaggaggaagtagggagcggggtggcaggggggggacccgccgcggctgctgccaccgccgccaccaccgcctctgctcgtggcgtgggaaaggaggtgtgagtcccgggcgcgagccggcggcggcgccgctgcgggagggtcggcggtgggaaggcgatggcggatttagataaactcaacatcgacagcattatccaacggctgctggaagtgagagggtccaagcctggtaagaatgtccagcttcaggagaatgaaatcagaggactgtgcttaaagtctcgtgaaatctttctcagtcagcctatcctactagaacttgaagcaccactcaaaatatgtggtgacatccatggacaatactatgatttgctgcgactttttgagtacggtggtttcccaccagaaagcaactacctgtttcttggggactatgtggacaggggaaagcagtcattggagacgatctgcctcttactggcctacaaaataaaatatcctgagaatttttttcttctcagagggaaccatgaatgtgccagcatcaacagaatttatggattttatgatgaatgtaaaagaagatacaacattaaactatggaaaactttcacagactgttttaactgtttaccgatagcagccatcgtggatgagaagatattctgctgtcatggaggtttatcaccagatcttcaatctatggagcagattcggcgaattatgcgaccaactgatgtaccagatcaaggtcttctttgtgatcttttgtggtctgaccccgataaagatgtcttaggctggggtgaaaatgacagaggagtgtccttcacatttggtgcagaagtggttgcaaaatttctccataagcatgatttggatcttatatgtagagcccatcaggtggttgaagatggatatgaattttttgcaaagaggcagttggtcactctgttttctgcgcccaattattgcggagagtttgacaatgcaggtgccatgatgagtgtggatgaaacactaatgtgttcttttcagattttaaagcctgcagagaaaaagaagccaaatgccacgagacctgtaacgcctccaaggggtatgatcacaaagcaagcaaagaaatagatgtcgttttgacactgcctagtcgggacttgtaacatagagtatataaccttcatttttaagactgtaatgtgtactggtcagcttgctcagatagatctgtgtttgtgggggcccttccttccatttttgatttagtgaatggcatttgctggttataacagcaaatgaaagactcttcactccaaaaagaaaagtgttttgttttttaattctctgttccttttgcaaacaattttaatgatggtgttaaagctgtacaccccaggacagtttatcctgtctgaggagtaagtgtacaattgatcttttttaattcagtacaacccataatcatgtaaatgctcattttctttaggacataaagagagccctagggtgctctgaatctgtacatgttcttgtcataaaatgcatactgttgatacaaaccactgtgaacattttttatttgagaattttgtttcaaagggattgctttttcctctcattgtcttgttatgtacaaactagtttttatagctatcaacattaggagtaactttcaaccttgccagcatcactggtatgatgtatatttaattaaagcacacttttccccgaccgtatacttaaaatgacaaagccattcttttaaatatttgtgactctttcctaaagccaaagtttctgttgaattatgttttgacacacccctaagtacaaggtggtatggttgtatacacatgctgccttcttggggattcaaaaacaggtttttgattttgaatagcaattagtgatatagtgctgtttaagctactaacgataaaaggtaataacattttatacaatttccatatagtctattcattaagtaatctttttacagttgcatcaggcctgaacccgtccattcagaaagcttcaaattatagaaacaatactgttctatacgagtgaccgattatgctttctttggcctacattctttattctgcggtgaagttgaggcttataagttaaaacaaaggaactaacttactgtccaccagtttatacagaactcacagtacctatgacttttttaaactaagatctgttaaaaaagaaatctgtttcaacagatgaccgtgtacaataccgtgtggtgaaaatgaattcagacttattaaatgatgaacttgtta

SEQ ID NO: 98382 - DNA, 2926 bp, Homo sapiens
  misc_feature (25)..(25): n is a, c, g, or t
cggcgggccgctgcactccccgcgngcatccgtgcgccgcccgaggctgtctaaggagtcggcggccattttgttcttctcgtggttccagtggggagagaaggaggaagtagggagcggggtggcaggggggggacccgccgcggctgctgccaccgccgccaccaccgcctctgctcgtggcgtgggaaaggaggtgtgagtcccgggcgcgagccggcggcggcgccgctgcgggagggtcggcggtgggaaggcgatggcggatttagataaactcaacatcgacagcattatccaacggctgctggaagtgagagggtccaagcctggtaagaatgtccagcttcaggagaatgaaatcagaggactgtgcttaaagtctcgtgaaatctttctcagtcagcctatcctactagaacttgaagcaccactcaaaatatgtggtgacatccatggacaatactatgatttgctgcgactttttgagtacggtggtttcccaccagaaagcaactacctgtttcttggggactatgtggacaggggaaagcagtcattggagacgatctgcctcttactggcctacaaaataaaatatcctgagaatttttttcttctcagagggaaccatgaatgtgccagcatcaacagaatttatggattttatgatgaatgtaaaagaagatacaacattaaactatggaaaactttcacagactgttttaactgtttaccgatagcagccatcgtggatgagaagatattctgctgtcatggaggtttatcaccagatcttcaatctatggagcagattcggcgaattatgcgaccaactgatgtaccagatcaaggtcttctttgtgatcttttgtggtctgaccccgataaagatgtcttaggctggggtgaaaatgacagaggagtgtccttcacatttggtgcagaagtggttgcaaaatttctccataagcatgatttggatcttatatgtagagcccatcaggtggttgaagatggatatgaattttttgcaaagaggcagttggtcactctgttttctgcgcccaattattgcggagagtttgacaatgcaggtgccatgatgagtgtggatgaaacactaatgtgttcttttcagattttaaagcctgcagagaaaaagaagccaaatgccacgagacctgtaacgcctccaaggggtatgatcacaaagcaagcaaagaaatagatgtcgttttgacactgcctagtcgggacttgtaacatagagtatataaccttcatttttaagactgtaatgtgtactggtcagcttgctcagatagatctgtgtttgtgggggcccttccttccatttttgatttagtgaatggcatttgctggttataacagcaaatgaaagactcttcactccaaaaagaaaagtgttttgttttttaattctctgttccttttgcaaacaattttaatgatggtgttaaagctgtacaccccaggacagtttatcctgtctgaggagtaagtgtacaattgatcttttttaattcagtacaacccataatcatgtaaatgctcattttctttaggacataaagagagccctagggtgctctgaatctgtacatgttcttgtcataaaatgcatactgttgatacaaaccactgtgaacattttttatttgagaattttgtttcaaagggattgctttttcctctcattgtcttgttatgtacaaactagtttttatagctatcaacattaggagtaactttcaaccttgccagcatcactggtatgatgtatatttaattaaagcacacttttccccgaccgtatacttaaaatgacaaagccattcttttaaatatttgtgactctttcctaaagccaaagtttctgttgaattatgttttgacacacccctaagtacaaggtggtatggttgtatacacatgctgccttcttggggattcaaaaacaggtttttgattttgaatagcaattagtgatatagtgctgtttaagctactaacgataaaaggtaataacattttatacaatttccatatagtctattcattaagtaatctttttacagttgcatcaggcctgaacccgtccattcagaaagcttcaaattatagaaacaatactgttctatacgagtgaccgattatgctttctttggcctacattctttattctgcggtgaagttgaggcttataagttaaaacaaaggaactaacttactgtccaccagtttatacagaactcacagtacctatgacttttttaaactaagatctgttaaaaaagaaatctgtttcaacagatgaccgtgtacaataccgtgtggtgaaaatgaattcagacttattaaatgatgaacttgttaaatcttctcagtgtctatttatcagcacaatacacacaggagaactgttgatggcatattgaatagattttcctgaataaattgctctggaaaccaaaaaaaaaaaaaaaaacaaaacaaaacaaaaaaaacaacaaacacacaaacaacaaaaaaaaagggggggagcaacacatagggagcgccccaagggagggcccaaccccagaaggcgcacaccaaatcattatatccgaacccgagggagccccctcagacgaaacacccaccaaaatcaaagaacagcacgcacgcgaacgccgcacacaacacccggcgagccccagtcgaaaaccaacgcagaaccgaacagccccacacacaaaggaccaccagtcgcgaggcgacctgaccaaatgggggaaaaaaaacccaaggaagacaacacccacgagtaaagcacacaagtacaaggatacaacgctcacaacgaccgatctacgagcgaagaaacggccaggtgttacgcaaagaacagaacataaca

SEQ ID NO: 98383 - DNA, 2493 bp, Homo sapiens
  misc_feature (25)..(25): n is a, c, g, or t
  misc_feature (2107)..(2107): n is a, c, g, or t
  misc_feature (2114)..(2114): n is a, c, g, or t
  misc_feature (2127)..(2127): n is a, c, g, or t
  misc_feature (2137)..(2137): n is a, c, g, or t
  misc_feature (2165)..(2165): n is a, c, g, or t
  misc_feature (2172)..(2172): n is a, c, g, or t
  misc_feature (2181)..(2181): n is a, c, g, or t
  misc_feature (2206)..(2206): n is a, c, g, or t
  misc_feature (2215)..(2215): n is a, c, g, or t
cggcgggccgctgcactccccgcgngcatccgtgcgccgcccgaggctgtctaaggagtcggcggccattttgttcttctcgtggttccagtggggagagaaggaggaagtagggagcggggtggcaggggggggacccgccgcggctgctgccaccgccgccaccaccgcctctgctcgtggcgtgggaaaggaggtgtgagtcccgggcgcgagccggcggcggcgccgctgcgggagggtcggcggtgggaaggcgatggcggatttagataaactcaacatcgacagcattatccaacggctgctggaagtgagagggtccaagcctggtaagaatgtccagcttcaggagaatgaaatcagaggactgtgcttaaagtctcgtgaaatctttctcagtcagcctatcctactagaacttgaagcaccactcaaaatatgtggtgacatccatggacaatactatgatttgctgcgactttttgagtacggtggtttcccaccagaaagcaactacctgtttcttggggactatgtggacaggggaaagcagtcattggagacgatctgcctcttactggcctacaaaataaaatatcctgagaatttttttcttctcagagggaaccatgaatgtgccagcatcaacagaatttatggattttatgatgaatgtaaaagaagatacaacattaaactatggaaaactttcacagactgttttaactgtttaccgatagcagccatcgtggatgagaagatattctgctgtcatggaggtttatcaccagatcttcaatctatggagcagattcggcgaattatgcgaccaactgatgtaccagatcaaggtcttctttgtgatcttttgtggtctgaccccgataaagatgtcttaggctggggtgaaaatgacagaggagtgtccttcacatttggtgcagaagtggttgcaaaatttctccataagcatgatttggatcttatatgtagagcccatcaggtggttgaagatggatatgaattttttgcaaagaggcagttggtcactctgttttctgcgcccaattattgcggagagtttgacaatgcaggtgccatgatgagtgtggatgaaacactaatgtgttcttttcagattttaaagcctgcagagaaaaagaagccaaatgccacgagacctgtaacgcctccaaggggtatgatcacaaagcaagcaaagaaatagatgtcgttttgacactgcctagtcgggacttgtaacatagagtatataaccttcatttttaagactgtaatgtgtactggtcagcttgctcagatagatctgtgtttgtgggggcccttccttccatttttgatttagtgaatggcatttgctggttataacagcaaatgaaagactcttcactccaaaaagaaaagtgttttgttttttaattctctgttccttttgcaaacaattttaatgatggtgttaaagctgtacaccccaggacagtttatcctgtctgaggagtaagtgtacaattgatcttttttaattcagtacaacccataatcatgtaaatgctcattttctttaggacataaagagagccctagggtgctctgaatctgtacatgttcttgtcataaaatgcatactgttgatacaaaccactgtgaacattttttatttgagaattttgtttcaaagggattgctttttcctctcattgtcttgttatgtacaaactagtttttatagctatcaacattaggagtaactttcaaccttgccagcatcactggtatgatgtatatttaattaaagcacacttttccccgaccgtatacttaaaatgacaaagccattcttttaaatatttgtgactctttcctaaagccaaagtttctgttgaattatgttttgacacacccctaagtacaaggtggtatggttgtatacacatgctgccttcttggggattcaaaaacaggtttttgattttgaatagcaattagtgatatagtgctgtttaagctactaacgataaaaggtaataacattttatacaatttccatatagtctattcattaagtaatctttttacccccccnccccccnccccccccatccncaaacccccnaaaaaaaaaaacaaaaccaaccaaaacnaaaaacnaaataaacnaacaataaccaacaaacaataaacngcggagaanttgaggcttataagttaaaacaaaggaactaacttactgtccaccagtttatacagaactcacagtacctatgacttttttaaactaagatctgttaaaaaagaaatctgtttcaacagatgaccgtgtacaataccgtgtggtgaaaatgaattcagacttattaaatgatgaacttgttaaatcttctcagtgtctatttatcagcacaatacacacaggagaactgttgatggcatattgaatagattttcctgaataaattgctctggaaacca

SEQ ID NO: 98384 - DNA, 2442 bp, Homo sapiens
  misc_feature (25)..(25): n is a, c, g, or t
cggcgggccgctgcactccccgcgngcatccgtgcgccgcccgaggctgtctaaggagtcggcggccattttgttcttctcgtggttccagtggggagagaaggaggaagtagggagcggggtggcaggggggggacccgccgcggctgctgccaccgccgccaccaccgcctctgctcgtggcgtgggaaaggaggtgtgagtcccgggcgcgagccggcggcggcgccgctgcgggagggtcggcggtgggaaggcgatggcggatttagataaactcaacatcgacagcattatccaacggctgctggaagtgagagggtccaagcctggtaagaatgtccagcttcaggagaatgaaatcagaggactgtgcttaaagtctcgtgaaatctttctcagtcagcctatcctactagaacttgaagcaccactcaaaatatgtggtgacatccatggacaatactatgatttgctgcgactttttgagtacggtggtttcccaccagaaagcaactacctgtttcttggggactatgtggacaggggaaagcagtcattggagacgatctgcctcttactggcctacaaaataaaatatcctgagaatttttttcttctcagagggaaccatgaatgtgccagcatcaacagaatttatggattttatgatgaatgtaaaagaagatacaacattaaactatggaaaactttcacagactgttttaactgtttaccgatagcagccatcgtggatgagaagatattctgctgtcatggaggtttatcaccagatcttcaatctatggagcagattcggcgaattatgcgaccaactgatgtaccagatcaaggtcttctttgtgatcttttgtggtctgaccccgataaagatgtcttaggctggggtgaaaatgacagaggagtgtccttcacatttggtgcagaagtggttgcaaaatttctccataagcatgatttggatcttatatgtagagcccatcaggtggttgaagatggatatgaattttttgcaaagaggcagttggtcactctgttttctgcgcccaattattgcggagagtttgacaatgcaggtgccatgatgagtgtggatgaaacactaatgtgttcttttcagattttaaagcctgcagagaaaaagaagccaaatgccacgagacctgtaacgcctccaaggggtatgatcacaaagcaagcaaagaaatagatgtcgttttgacactgcctagtcgggacttgtaacatagagtatataaccttcatttttaagactgtaatgtgtactggtcagcttgctcagatagatctgtgtttgtgggggcccttccttccatttttgatttagtgaatggcatttgctggttataacagcaaatgaaagactcttcactccaaaaagaaaagtgttttgttttttaattctctgttccttttgcaaacaattttaatgatggtgttaaagctgtacaccccaggacagtttatcctgtctgaggagtaagtgtacaattgatcttttttaattcagtacaacccataatcatgtaaatgctcattttctttaggacataaagagagccctagggtgctctgaatctgtacatgttcttgtcatgtttcaaagggattgctttttcctctcattgtcttgttatgtacaaactagtttttatagctatcaacattaggagtaactttcaaccttgccagcatcactggtatgatgtatatttaattaaagcacacttttccccgaccgtatacttaaaatgacaaagccattcttttaaatatttgtgactctttcctaaagccaaagtttctgttgaattatgttttgacacacccctaagtacaaggtggtatggttgtatacacatgctgccttcttggggattcaaaaacaggtttttgattttgaatagcaattagtgatatagtgctgtttaagctactaacgataaaaggtaataacattttatacaatttccatatagtctattcattaagtaatctttttacagttgcatcaggcctgaacccgtccattcagaaagcttcaaattatagaaacaatactgttctatacgagtgaccgattatgctttctttggcctacattctttattctgcggtgaagttgaggcttataagttaaaacaaaggaactaacttactgtccaccagtttatacagaactcacagtacctatgacttttttaaactaagatctgttaaaaaagaaatctgtttcaacagatgaccgtgtacaataccgtgtggtgaaaatgaattcagacttattaaatgatgaacttgttaaatcttctcagtgtctatttatcagcacaatacacacaggagaactgttgatggcatattgaatagattttcctgaataaattgctctggaaacca

SEQ ID NO: 98385 - DNA, 1801 bp, Homo sapiens
  misc_feature (25)..(25): n is a, c, g, or t
cggcgggccgctgcactccccgcgngcatccgtgcgccgcccgaggctgtctaaggagtcggcggccattttgttcttctcgtggttccagtggggagagaaggaggaagtagggagcggggtggcaggggggggacccgccgcggctgctgccaccgccgccaccaccgcctctgctcgtggcgtgggaaaggaggtgtgagtcccgggcgcgagccggcggcggcgccgctgcgggagggtcggcggtgggaaggcgatggcggatttagataaactcaacatcgacagcattatccaacggctgctggaagtgagagggtccaagcctggtaagaatgtccagcttcaggagaatgaaatcagaggactgtgcttaaagtctcgtgaaatctttctcagtcagcctatcctactagaacttgaagcaccactcaaaatatgtggtgacatccatggacaatactatgatttgctgcgactttttgagtacggtggtttcccaccagaaagcaactacctgtttcttggggactatgtggacaggggaaagcagtcattggagacgatctgcctcttactggcctacaaaataaaatatcctgagaatttttttcttctcagagggaaccatgaatgtgccagcatcaacagaatttatggattttatgatgaatgtaaaagaagatacaacattaaactatggaaaactttcacagactgttttaactgtttaccgatagcagccatcgtggatgagaagatattctgctgtcatggaggtttatcaccagatcttcaatctatggagcagattcggcgaattatgcgaccaactgatgtaccagatcaaggtcttctttgtgatcttttgtggtctgaccccgataaagatgtcttaggctggggtgaaaatgacagaggagtgtccttcacatttggtgcagaagtggttgcaaaatttctccataagcatgatttggatcttatatgtagagcccatcaggtggttgaagatggatatgaattttttgcaaagaggcagttggtcactctgttttctgcgcccaattattgcggagagtttgacaatgcaggtgccatgatgagtgtggatgaaacactaatgtgttcttttcagattttaaagcctgcagagaaaaagaagccaaatgccacgagacctgtaacgcctccaaggggtatgatcacaaagcaagcaaagaaatagatgtcgttttgacactgcctagtcgggacttgtaacatagagtatataaccttcatttttaagactgtaatgtgtactggtcagcttgctcagatagatctgtgtttgtgggggcccttccttccatttttgatttagtgaatggcatttgctggttataacagcaaatgaaagactcttcactccaaaaagaaaagtgttttgttttttaattctctgttccttttgcaaacaattttaatgatggtgttaaagctgtacaccccaggacagtttatcctgtctgaggagtaagtgtacaattgatcttttttaattcagtacaacccataatcatgtaaatgctcattttctttaggacataaagagagccctagggtgctctgaatctgtacatgttcttgtcataaaatgcatactgttgatacaaaccactgtgaacattttttatttgagaattttgtttcaaagggattgctttttcctctcattgtcttgttatgtacaaactagtttttatagctatcaacattcagaatggtaacaccattctgatgttggagcggccgc

SEQ ID NO: 98386 - DNA, 1763 bp, Homo sapiens
  misc_feature (9)..(9): n is a, c, g, or t
  misc_feature (13)..(15): n is a, c, g, or t
ggggggggngggnnnaaaactaacggctaggtagcgaggccgggtgttggtttatcaccagatcttcaatctatggagcagattcggcgaattatgcgaccaactgatgtaccagatcaaggtcttctttgtgatcttttgtggtctgaccccgataaagatgtcttaggctggggtgaaaatgacagaggagtgtccttcacatttggtgcagaagtggttgcaaaatttctccataagcatgatttggatcttatatgtagagcccatcaggtggttgaagatggatatgaattttttgcaaagaggcagttggtcactctgttttctgcgcccaattattgcggagagtttgacaatgcaggtgccatgatgagtgtggatgaaacactaatgtgttcttttcagattttaaagcctgcagagaaaaagaagccaaatgccacgagacctgtaacgcctccaaggggtatgatcacaaagcaagcaaagaaatagatgtcgttttgacactgcctagtcgggacttgtaacatagagtatataaccttcatttttaagactgtaatgtgtactggtcagcttgctcagatagatctgtgtttgtgggggcccttccttccatttttgatttagtgaatggcatttgctggttataacagcaaatgaaagactcttcactccaaaaagaaaagtgttttgttttttaattctctgttccttttgcaaacaattttaatgatggtgttaaagctgtacaccccaggacagtttatcctgtctgaggagtaagtgtacaattgatcttttttaattcagtacaacccataatcatgtaaatgctcattttctttaggacataaagagagccctagggtgctctgaatctgtacatgttcttgtcataaaatgcatactgttgatacaaaccactgtgaacattttttatttgagaattttgtttcaaagggattgctttttcctctcattgtcttgttatgtacaaactagtttttatagctatcaacattaggagtaactttcaaccttgccagcatcactggtatgatgtatatttaattaaagcacacttttccccgaccgtatacttaaaatgacaaagccattcttttaaatatttgtgactctttcctaaagccaaagtttctgttgaattatgttttgacacacccctaagtacaaggtggtatggttgtatacacatgctgccttcttggggattcaaaaacaggtttttgattttgaatagcaattagtgatatagtgctgtttaagctactaacgataaaaggtaataacattttatacaatttccatatagtctattcattaagtaatctttttacagttgcatcaggcctgaacccgtccattcagaaagcttcaaattatagaaacaatactgttctatacgagtgaccgattatgctttctttggcctacattctttattctgcggtgaagttgaggcttataagttaaaacaaaggaactaacttactgtccaccagtttatacagaactcacagtacctatgacttttttaaactaagatctgttaaaaaagaaatctgtttcaacagatgaccgtgtacaataccgtgtggtgaaaatgaattcagacttattaaatgatgaacttgttaaatcttctcagtgtctatttatcagcacaatacacacaggagaactgttgatggcatattgaatagattttcctgaataaattgctctggaaacca

SEQ ID NO: 98387 - DNA, 2217 bp, Homo sapiens
ggatacatggtttttaactcttacaatatgcatcccatattgtaactcgatacaataagctcttgtagattttaatggtctgtgaacagtgcaggtttcctagagaactacctcacactgagcatccttatcttctcagctcagtcattataagccatcaatcataacatcgctcattattgtcatcaactgggggaagcccatagaagagttttttaaatcactggattttattttacagtgttctgtataatataattgtttccatgtactgtttaaacctactgcaccccatgcattactgcatgtaattctagtgtgtatccagttgtcctttttctgtgtttttttcttttaaccaaaagtaaataaaatataatcatagatttcagtttttatgtcaggattattgaatttctctgtagacaaatggaacttttgaaggggtagtatccttttaaaagttctgctttcttcattttttttttttcctcattgaataggtttatcaccagatcttcaatctatggagcagattcggcgaattatgcgaccaactgatgtaccagatcaaggtcttctttgtgatcttttgtggtctgaccccgataaagatgtcttaggctggggtgaaaatgacagaggagtgtccttcacatttggtgcagaagtggttgcaaaatttctccataagcatgatttggatcttatatgtagagcccatcaggtggttgaagatggatatgaattttttgcaaagaggcagttggtcactctgttttctgcgcccaattattgcggagagtttgacaatgcaggtgccatgatgagtgtggatgaaacactaatgtgttcttttcagattttaaagcctgcagagaaaaagaagccaaatgccacgagacctgtaacgcctccaaggggtatgatcacaaagcaagcaaagaaatagatgtcgttttgacactgcctagtcgggacttgtaacatagagtatataaccttcatttttaagactgtaatgtgtactggtcagcttgctcagatagatctgtgtttgtgggggcccttccttccatttttgatttagtgaatggcatttgctggttataacagcaaatgaaagactcttcactccaaaaagaaaagtgttttgttttttaattctctgttccttttgcaaacaattttaatgatggtgttaaagctgtacaccccaggacagtttatcctgtctgaggagtaagtgtacaattgatcttttttaattcagtacaacccataatcatgtaaatgctcattttctttaggacataaagagagccctagggtgctctgaatctgtacatgttcttgtcataaaatgcatactgttgatacaaaccactgtgaacattttttatttgagaattttgtttcaaagggattgctttttcctctcattgtcttgttatgtacaaactagtttttatagctatcaacattaggagtaactttcaaccttgccagcatcactggtatgatgtatatttaattaaagcacacttttccccgaccgtatacttaaaatgacaaagccattcttttaaatatttgtgactctttcctaaagccaaagtttctgttgaattatgttttgacacacccctaagtacaaggtggtatggttgtatacacatgctgccttcttggggattcaaaaacaggtttttgattttgaatagcaattagtgatatagtgctgtttaagctactaacgataaaaggtaataacattttatacaatttccatatagtctattcattaagtaatctttttacagttgcatcaggcctgaacccgtccattcagaaagcttcaaattatagaaacaatactgttctatacgagtgaccgattatgctttctttggcctacattctttattctgcggtgaagttgaggcttataagttaaaacaaaggaactaacttactgtccaccagtttatacagaactcacagtacctatgacttttttaaactaagatctgttaaaaaagaaatctgtttcaacagatgaccgtgtacaataccgtgtggtgaaaatgaattcagacttattaaatgatgaacttgttaaatcttctcagtgtctatttatcagcacaatacacacaggagaactgttgatggcatattgaatagattttcctgaataaattgctctggaaacca

SEQ ID NO: 98388 - DNA, 1471 bp, Homo sapiens
  misc_feature (25)..(25): n is a, c, g, or t
cggcgggccgctgcactccccgcgngcatccgtgcgccgcccgaggctgtctaaggagtcggcggccattttgttcttctcgtggttccagtggggagagaaggaggaagtagggagcggggtggcaggggggggacccgccgcggctgctgccaccgccgccaccaccgcctctgctcgtggcgtgggaaaggaggtgtgagtcccgggcgcgagccggcggcggcgccgctgcgggagggtcggcggtgggaaggcgatggcggatttagataaactcaacatcgacagcattatccaacggctgctggaagtgagagggtccaagcctggtaagaatgtccagcttcaggagaatgaaatcagaggactgtgcttaaagtctcgtgaaatctttctcagtcagcctatcctactagaacttgaagcaccactcaaaatatgtggtgacatccatggacaatactatgatttgctgcgactttttgagtacggtggtttcccaccagaaagcaactacctgtttcttggggactatgtggacaggggaaagcagtcattggagacgatctgcctcttactggcctacaaaataaaatatcctgagaatttttttcttctcagagggaaccatgaatgtgccagcatcaacagaatttatggattttatgatgaatgtaaaagaagatacaacattaaactatggaaaactttcacagactgttttaactgtttaccgatagcagccatcgtggatgagaagatattctgctgtcatggaggtttatcaccagatcttcaatctatggagcagattcggcgaattatgcgaccaactgatgtaccagatcaaggtcttctttgtgatcttttgtggtctgaccccgataaagatgtcttaggctggggtgaaaatgacagaggagtgtccttcacatttggtgcagaagtggttgcaaaatttctccataagcatgatttggatcttatatgtagagcccatcaggtggttgaagatggatatgaattttttgcaaagaggcagttggtcactctgttttctgcgcccaattattgcggagagtttgacaatgcaggtgccatgatgagtgtggatgaaacactaatgtgttcttttcaggtagagcatgctttcaacatgatttccttttaatatgtttacactttgctgattgaaaaatataattgctactttttgcctagtgttcacttatgctgagtaggctaagtttttattttcccttaaccagtgtgtattatagttgaataatgtgtggatcccttgtaaaagaaaaaattaattatggcaccttttcccagtgttgaattataaatttttgcattgcatattggctccttaatgcttatggctcttttactgtaaatctaaaaccttaatgacaatgtaatgttcagctaaaattaaatccccacttgaatgtgaaaagta

SEQ ID NO: 98389 - DNA, 1071 bp, Homo sapiens
  misc_feature (25)..(25): n is a, c, g, or t
cggcgggccgctgcactccccgcgngcatccgtgcgccgcccgaggctgtctaaggagtcggcggccattttgttcttctcgtggttccagtggggagagaaggaggaagtagggagcggggtggcaggggggggacccgccgcggctgctgccaccgccgccaccaccgcctctgctcgtggcgtgggaaaggaggtgtgagtcccgggcgcgagccggcggcggcgccgctgcgggagggtcggcggtgggaaggcgatggcggatttagataaactcaacatcgacagcattatccaacggctgctggaagtgagagggtccaagcctggtaagaatgtccagcttcaggagaatgaaatcagaggactgtgcttaaagtctcgtgaaatctttctcagtcagcctatcctactagaacttgaagcaccactcaaaatatgtggtgacatccatggacaatactatgatttgctgcgactttttgagtacggtggtttcccaccagaaagcaactacctgtttcttggggactatgtggacaggggaaagcagtcattggagacgatctgcctcttactggcctacaaaataaaatatcctgagaatttttttcttctcagagggaaccatgaatgtgccagcatcaacagaatttatggattttatgatgaatgtaaaagaagatacaacattaaactatggaaaactttcacagactgttttaactgtttaccgatagcagccatcgtggatgagaagatattctgctgtcatggaggtttatcaccagatcttcaatctatggagcagattcggcgaattatgcgaccaactgatgtaccagatcaaggtcttctttgtgatcttttgtggtctgaccccgataaagatgtcttaggctggggtgaaaatgacagaggagtgtccttcacatttggtgcagaagtggttgcaaaatttctccataagcatgatttggatcttatatgtagagcccatcaggtattgattttgaattttacatgtacacttaagagcatgtgtgtgagcacaattctccttgttga

SEQ ID NO: 98390 - DNA, 1067 bp, Homo sapiens
cggacgcgtgggtcgacccacgcgtccgtgcaaacaattttaatgatggtgttaaagctgtacaccccaggacagtttatcctgtctgaggagtaagtgtacaattgatcttttttaattcagtacaacccataatcatgtaaatgctcattttctttaggacataaagagagccctagggtgctctgaatctgtacatgttcttgtcataaaatgcatactgttgatacaaaccactgtgaacattttttatttgagaattttgtttcaaagggattgctttttcctctcattgtcttgttatgtacaaactagtttttatagctatcaacattaggagtaactttcaaccttgccagcatcactggtatgatgtatatttaattaaagcacacttttccccgaccgtatacttaaaatgacaaagccattcttttaaatatttgtgactctttcctaaagccaaagtttctgttgaattatgttttgacacacccctaagtacaaggtggtatggttgtatacacatgctgccttcttggggattcaaaaacaggtttttgattttgaatagcaattagtgatatagtgctgtttaagctactaacgataaaaggtaataacattttatacaatttccatatagtctattcattaagtaatctttttacagttgcatcaggcctgaacccgtccattcagaaagcttcaaattatagaaacaatactgttctatacgagtgaccgattatgctttctttggcctacattctttattctgcggtgaagttgaggcttataagttaaaacaaaggaactaacttactgtccaccagtttatacagaactcacagtacctatgacttttttaaactaagatctgttaaaaaagaaatctgtttcaacagatgaccgtgtacaataccgtgtggtgaaaatgaattcagacttattaaatgatgaacttgttaaatcttctcagtgtctatttatcagcacaatacacacaggagaactgttgatggcatattgaatagattttcctgaataaattgctctggaaacca

SEQ ID NO: 98391 - DNA, 361 bp, Homo sapiens
cttgaggatcccggtcattgctatacctatacgagtgaccgattatgctttctttggcctacattctttattctgcggtgaagttgaggcttataagttaaaacaaaggaactaacttactgtccaccagtttatacagaactcacagtacctatgacttttttaaactaagatctgttaaaaaagaaatctgtttcaacagatgaccgtgtacaataccgtgtggtgaaaatgaattcagacttattaaatgatgaacttgttaaatcttctcagtgtctatttatcagcacaatacacacaggagaactgttgatggcatattgaatagattttcctgaataaattgctctggaaacca

SEQ ID NO: 98392 - DNA, 2542 bp, Homo sapiens
  misc_feature (25)..(25): n is a, c, g, or t
cggcgggccgctgcactccccgcgngcatccgtgcgccgcccgaggctgtctaaggagtcggcggccattttgttcttctcgtggttccagtggggagagaaggaggaagtagggagcggggtggcaggggggggacccgccgcggctgctgccaccgccgccaccaccgcctctgctcgtggcgtgggaaaggaggtgtgagtcccgggcgcgagccggcggcggcgccgctgcgggagggtcggcggtgggaaggcgatggcggatttagataaactcaacatcgacagcattatccaacggctgctggaagtgagagggtccaagcctggtaagaatgtccagcttcaggagaatgaaatcagaggactgtgcttaaagtctcgtgaaatctttctcagtcagcctatcctactagaacttgaagcaccactcaaaatatgtggtgacatccatggacaatactatgatttgctgcgactttttgagtacggtggtttcccaccagaaagcaactacctgtttcttggggactatgtggacaggggaaagcagtcattggagacgatctgcctcttactggcctacaaaataaaatatcctgagaatttttttcttctcagagggaaccatgaatgtgccagcatcaacagaatttatggattttatgatgaatgtaaaagaagatacaacattaaactatggaaaactttcacagactgttttaactgtttaccgatagcagccatcgtggatgagaagatattctgctgtcatggaggtttatcaccagatcttcaatctatggagcagattcggcgaattatgcgaccaactgatgtaccagatcaaggtcttctttgtgatcttttgtggtctgaccccgataaagatgtcttaggctggggtgaaaatgacagaggagtgtccttcacatttggtgcagaagtggttgcaaaatttctccataagcatgatttggatcttatatgtagagcccatcaggtggttgaagatggatatgaattttttgcaaagaggcagttggtcactctgttttctgcgcccaattattgcggagagtttgacaatgcaggtgccatgatgagtgtggatgaaacactaatgtgttcttttcagattttaaagcctgcagagaaaaagaagccaaatgccacgagacctgtaacgcctccaaggggtatgatcacaaagcaagcaaagaaatagatgtcgttttgacactgcctagtcgggacttgtaacatagagtatataaccttcatttttaagactgtaatgtgtactggtcagcttgctcagatagatctgtgtttgtgggggcccttccttccatttttgatttagtgaatggcatttgctggttataacagcaaatgaaagactcttcactccaaaaagaaaagtgttttgttttttaattctctgttccttttgcaaacaattttaatgatggtgttaaagctgtacaccccaggacagtttatcctgtctgaggagtaagtgtacaattgatcttttttaattcagtacaacccataatcatgtaaatgctcattttctttaggacataaagagagccctagggtgctctgaatctgtacatgttcttgtcataaaatgcatactgttgatacaaaccactgtgaacattttttatttgagaattttgtttcaaagggattgctttttcctctcattgtcttgttatgtacaaactagtttttatagctatcaacattaggagtaactttcaaccttgccagcatcactggtatgatgtatatttaattaaagcacacttttccccgaccgtatacttaaaatgacaaagccattcttttaaatatttgtgactctttcctaaagccaaagtttctgttgaattatgttttgacacacccctaagtacaaggtggtatggttgtatacacatgctgccttcttggggattcaaaaacaggtttttgattttgaatagcaattagtgatatagtgctgtttaagctactaacgataaaaggtaataacattttatacaatttccatatagtctattcattaagtaatctttttacagttgcatcaggcctgaacccgtccattcagaaagcttcaaattatagaaacaatactgttctatacgagtgaccgattatgctttctttggcctacattctttattctgcggtgaagttgaggcttataagttaaaacaaaggaactaacttactgtccaccagtttatacagaactcacagtacctatgacttttttaaactaagatctgttaaaaaagaaatctgtttcaacagatgaccgtgtacaataccgtgtggtgaaaatgaattcagacttattaaatgatgaacttgttaaatcttctcagtgtctatttatcagcacaatacacacaggagaactgttgatggcatattgaatagattttcctgaataaattgctctggaaaccaaaaaaaaaaataatattcactggctcgccgtttaccgtcgtgctgg

SEQ ID NO: 98393 - DNA, 2427 bp, Homo sapiens
cggacgcgtgggtcgacccacgcgtccggagaaggaggaagtagggagcggggtggcaggggggggacccgccgcggctgctgccaccgccgccaccaccgcctctgctcgtggcgtgggaaaggaggtgtgagtcccgggcgcgagccggcggcggcgccgctgcgggagggtcggcggtgggaaggcgatggcggatttagataaactcaacatcgacagcattatccaacggctgctggaagtgagagggtccaagcctggtaagaatgtccagcttcaggagaatgaaatcagaggactgtgcttaaagtctcgtgaaatctttctcagtcagcctatcctactagaacttgaagcaccactcaaaatatgtggtgacatccatggacaatactatgatttgctgcgactttttgagtacggtggtttcccaccagaaagcaactacctgtttcttggggactatgtggacaggggaaagcagtcattggagacgatctgcctcttactggcctacaaaataaaatatcctgagaatttttttcttctcagagggaaccatgaatgtgccagcatcaacagaatttatggattttatgatgaatgtaaaagaagatacaacattaaactatggaaaactttcacagactgttttaactgtttaccgatagcagccatcgtggatgagaagatattctgctgtcatggaggtttatcaccagatcttcaatctatggagcagattcggcgaattatgcgaccaactgatgtaccagatcaaggtcttctttgtgatcttttgtggtctgaccccgataaagatgtcttaggctggggtgaaaatgacagaggagtgtccttcacatttggtgcagaagtggttgcaaaatttctccataagcatgatttggatcttatatgtagagcccatcaggtggttgaagatggatatgaattttttgcaaagaggcagttggtcactctgttttctgcgcccaattattgcggagagtttgacaatgcaggtgccatgatgagtgtggatgaaacactaatgtgttcttttcagattttaaagcctgcagagaaaaagaagccaaatgccacgagacctgtaacgcctccaaggggtatgatcacaaagcaagcaaagaaatagatgtcgttttgacactgcctagtcgggacttgtaacatagagtatataaccttcatttttaagactgtaatgtgtactggtcagcttgctcagatagatctgtgtttgtgggggcccttccttccatttttgatttagtgaatggcatttgctggttataacagcaaatgaaagactcttcactccaaaaagaaaagtgttttgttttttaattctctgttccttttgcaaacaattttaatgatggtgttaaagctgtacaccccaggacagtttatcctgtctgaggagtaagtgtacaattgatcttttttaattcagtacaacccataatcatgtaaatgctcattttctttaggacataaagagagccctagggtgctctgaatctgtacatgttcttgtcataaaatgcatactgttgatacaaaccactgtgaacattttttatttgagaattttgtttcaaagggattgctttttcctctcattgtcttgttatgtacaaactagtttttatagctatcaacattaggagtaactttcaaccttgccagcatcactggtatgatgtatatttaattaaagcacacttttccccgaccgtatacttaaaatgacaaagccattcttttaaatatttgtgactctttcctaaagccaaagtttctgttgaattatgttttgacacacccctaagtacaaggtggtatggttgtatacacatgctgccttcttggggattcaaaaacaggtttttgattttgaatagcaattagtgatatagtgctgtttaagctactaacgataaaaggtaataacattttatacaatttccatatagtctattcattaagtaatctttttacagttgcatcaggcctgaacccgtccattcagaaagcttcaaattatagaaacaatactgttctatacgagtgaccgattatgctttctttggcctacattctttattctgcggtgaagttgaggcttataagttaaaacaaaggaactaacttactgtccaccagtttatacagaactcacagtacctatgacttttttaaactaagatctgttaaaaaagaaatctgtttcaacagatgaccgtgtacaataccgtgtggtgaaaatgaattcagacttattaaatgatgaacttgttaaatcttctcagtgtctatttatcagcacaatacacacaggagaactgttgatggcatattgaatagattttcctgaataaattgctctggaaacca

SEQ ID NO: 98394 - DNA, 1974 bp, Homo sapiens
ttattcagtcacgggcggggttttcaatgttacattacatgtgccgtgggtctgtacaatttccaataaaataaaatatcctgagaatttttttcttctcagagggaaccatgaatgtgccagcatcaacagaatttatggattttatgatgaatgtaaaagaagatacaacattaaactatggaaaactttcacagactgttttaactgtttaccgatagcagccatcgtggatgagaagatattctgctgtcatggaggtttatcaccagatcttcaatctatggagcagattcggcgaattatgcgaccaactgatgtaccagatcaaggtcttctttgtgatcttttgtggtctgaccccgataaagatgtcttaggctggggtgaaaatgacagaggagtgtccttcacatttggtgcagaagtggttgcaaaatttctccataagcatgatttggatcttatatgtagagcccatcaggtggttgaagatggatatgaattttttgcaaagaggcagttggtcactctgttttctgcgcccaattattgcggagagtttgacaatgcaggtgccatgatgagtgtggatgaaacactaatgtgttcttttcagattttaaagcctgcagagaaaaagaagccaaatgccacgagacctgtaacgcctccaaggggtatgatcacaaagcaagcaaagaaatagatgtcgttttgacactgcctagtcgggacttgtaacatagagtatataaccttcatttttaagactgtaatgtgtactggtcagcttgctcagatagatctgtgtttgtgggggcccttccttccatttttgatttagtgaatggcatttgctggttataacagcaaatgaaagactcttcactccaaaaagaaaagtgttttgttttttaattctctgttccttttgcaaacaattttaatgatggtgttaaagctgtacaccccaggacagtttatcctgtctgaggagtaagtgtacaattgatcttttttaattcagtacaacccataatcatgtaaatgctcattttctttaggacataaagagagccctagggtgctctgaatctgtacatgttcttgtcataaaatgcatactgttgatacaaaccactgtgaacattttttatttgagaattttgtttcaaagggattgctttttcctctcattgtcttgttatgtacaaactagtttttatagctatcaacattaggagtaactttcaaccttgccagcatcactggtatgatgtatatttaattaaagcacacttttccccgaccgtatacttaaaatgacaaagccattcttttaaatatttgtgactctttcctaaagccaaagtttctgttgaattatgttttgacacacccctaagtacaaggtggtatggttgtatacacatgctgccttcttggggattcaaaaacaggtttttgattttgaatagcaattagtgatatagtgctgtttaagctactaacgataaaaggtaataacattttatacaatttccatatagtctattcattaagtaatctttttacagttgcatcaggcctgaacccgtccattcagaaagcttcaaattatagaaacaatactgttctatacgagtgaccgattatgctttctttggcctacattctttattctgcggtgaagttgaggcttataagttaaaacaaaggaactaacttactgtccaccagtttatacagaactcacagtacctatgacttttttaaactaagatctgttaaaaaagaaatctgtttcaacagatgaccgtgtacaataccgtgtggtgaaaatgaattcagacttattaaatgatgaacttgttaaatcttctcagtgtctatttatcagcacaatacacacaggagaactgttgatggcatattgaatagattttcctgaataaattgctctggaaacca

SEQ ID NO: 98395 - DNA, 1598 bp, Homo sapiens
  misc_feature (25)..(25): n is a, c, g, or t
cggcgggccgctgcactccccgcgngcatccgtgcgccgcccgaggctgtctaaggagtcggcggccattttgttcttctcgtggttccagtggggagagaaggaggaagtagggagcggggtggcaggggggggacccgccgcggctgctgccaccgccgccaccaccgcctctgctcgtggcgtgggaaaggaggtgtgagtcccgggcgcgagccggcggcggcgccgctgcgggagggtcggcggtgggaaggcgatggcggatttagataaactcaacatcgacagcattatccaacggctgctggaagtgagagggtccaagcctggtaagaatgtccagcttcaggagaatgaaatcagaggactgtgcttaaagtctcgtgaaatctttctcagtcagcctatcctactagaacttgaagcaccactcaaaatatgtggtgacatccatggacaatactatgatttgctgcgactttttgagtacggtggtttcccaccagaaagcaactacctgtttcttggggactatgtggacaggggaaagcagtcattggagacgatctgcctcttactggcctacaaaataaaatatcctgagaatttttttcttctcagagggaaccatgaatgtgccagcatcaacagaatttatggattttatgatgaatgtaaaagaagatacaacattaaactatggaaaactttcacagactgttttaactgtttaccgatagcagccatcgtggatgagaagatattctgctgtcatggaggtttatcaccagatcttcaatctatggagcagattcggcgaattatgcgaccaactgatgtaccagatcaaggtcttctttgtgatcttttgtggtctgaccccgataaagatgtcttaggctggggtgaaaatgacagaggagtgtccttcacatttggtgcagaagtggttgcaaaatttctccataagcatgatttggatcttatatgtagagcccatcaggtggttgaagatggatatgaattttttgcaaagaggcagttggtcactctgttttctgcgcccaattattgcggagagtttgacaatgcaggtgccatgatgagtgtggatgaaacactaatgtgttcttttcagattttaaagcctgcagagaaaaagaagccaaatgccacgagacctgtaacgcctccaagggagttgcatcaggcctgaacccgtccattcagaaagcttcaaattatagaaacaatactgttctatacgagtgaccgattatgctttctttggcctacattctttattctgcggtgaagttgaggcttataagttaaaacaaaggaactaacttactgtccaccagtttatacagaactcacagtacctatgacttttttaaactaagatctgttaaaaaagaaatctgtttcaacagatgaccgtgtacaataccgtgtggtgaaaatgaattcagacttattaaatgatgaacttgttaaatcttctcagtgtctatttatcagcacaatacacacaggagaactgttgatggcatattgaatagattttcctgaataaattgctctggaaacca

SEQ ID NO: 98396 - DNA, 1502 bp, Homo sapiens
  misc_feature (25)..(25): n is a, c, g, or t
cggcgggccgctgcactccccgcgngcatccgtgcgccgcccgaggctgtctaaggagtcggcggccattttgttcttctcgtggttccagtggggagagaaggaggaagtagggagcggggtggcaggggggggacccgccgcggctgctgccaccgccgccaccaccgcctctgctcgtggcgtgggaaaggaggtgtgagtcccgggcgcgagccggcggcggcgccgctgcgggagggtcggcggtgggaaggcgatggcggatttagataaactcaacatcgacagcattatccaacggctgctggaagtgagagggtccaagcctggtaagaatgtccagcttcaggagaatgaaatcagaggactgtgcttaaagtctcgtgaaatctttctcagtcagcctatcctactagaacttgaagcaccactcaaaatatgtggtgacatccatggacaatactatgatttgctgcgactttttgagtacggtggtttcccaccagaaagcaactacctgtttcttggggactatgtggacaggggaaagcagtcattggagacgatctgcctcttactggcctacaaaataaaatatcctgagaatttttttcttctcagagggaaccatgaatgtgccagcatcaacagaatttatggattttatgatgaatgtaaaagaagatacaacattaaactatggaaaactttcacagactgttttaactgtttaccgatagcagccatcgtggatgagaagatattctgctgtcatggaggtttatcaccagatcttcaatctatggagcagattcggcgaattatgcgaccaactgatgtaccagatcaaggtcttctttgtgatcttttgtggtctgaccccgataaagatgtcttaggctggggtgaaaatgacagaggagtgtccttcacatttggtgcagaagtggttgcaaaatttctccataagcatgatttggatcttatatgtagagcccatcaggtggttgaagatggatatgaattttttgcaaagaggcagttggtcactctgttttctgcgcccaattattgcggagagtttgacaatgcaggtgccatgatgagtgtggatgaaacactaatgtgttcttttcagattttaaagcctgcagagaaaaagaagccaaatgccacgagacctgtaacgcctccaagggagttgcatcaggcctgaacccgtccattcagaaagcttcaaattatagaaacaatactgttctatacgagtgaccgattatgctttctttggcctacattctttattctgcggtgaagttgaggcttataagttaaaacaaaggaactaacttactgtccaccagtttatacagaactcacagtacctatgacttttttaaactaagatctgttaaaaaagaaatctgtttcaacagatgaccgtgtacaataccgtgtggtgaaaatgaattcagacttattaaatgatgaacttgtta

SEQ ID NO: 98397 - DNA, 1124 bp, Homo sapiens
  misc_feature (25)..(25): n is a, c, g, or t
cggcgggccgctgcactccccgcgngcatccgtgcgccgcccgaggctgtctaaggagtcggcggccattttgttcttctcgtggttccagtggggagagaaggaggaagtagggagcggggtggcaggggggggacccgccgcggctgctgccaccgccgccaccaccgcctctgctcgtggcgtgggaaaggaggtgtgagtcccgggcgcgagccggcggcggcgccgctgcgggagggtcggcggtgggaaggcgatggcggatttagataaactcaacatcgacagcattatccaacggctgctggaagtgagagggtccaagcctggtaagaatgtccagcttcaggagaatgaaatcagaggactgtgcttaaagtctcgtgaaatctttctcagtcagcctatcctactagaacttgaagcaccactcaaaatatgtggtgacatccatggacaatactatgatttgctgcgactttttgagtacggtggtttcccaccagaaagcaactacctgtttcttggggactatgtggacaggggaaagcagtcattggagacgatctgcctcttactggcctacaaaataaaatatcctgagaatttttttcttctcagagggaaccatgaatgtgccagcatcaacagaatttatggattttatgatgaatgtaaaagaagatacaacattaaactatggaaaactttcacagactgttttaactgtttaccgatagcagccatcgtggatgagaagatattctgctgtcatggaggtttatcaccagatcttcaatctatggagcagattcggcgaattatgcgaccaactgatgtaccagatcaaggtcttctttgtgatcttttgtggtctgaccccgataaagatgtcttaggctggggtgaaaatgacagaggagtgtccttcacatttggtgcagaagtggttgcaaaatttctccataagcatgatttggatcttatatgtagagcccatcaggtggttgaagatggatatgaattttttgcaaagaggcagttggtcactctgttttctgcgcccaattattgcggagagtttgacaatgcaggtgggtacaagtacccacctgcagagg

SEQ ID NO: 98398 - DNA, 559 bp, Homo sapiens
gagggggtttcaccatgttggccaggctggtcttgaactcctgacctcaagtgatccactcacctctgcctcccaaattgctgggattacaggctcctgccgtctgacttaatttttgtacttttagtagagacggggtttcgccatgttagccaggctggtctagaactcatgaccttaagtgatccacctgcctcagcctcccaaagtgctgggattacaggcatgagccatcatgcccggccaaattactatgaaattctatcctgccagtgctttagaataacttgcattttaaagtacatttgcacattttacatataatgctatatggttgtgtttgggctttgtgtacagatgacttttgttattaagtggaaaaggcctgaaatatgctgttctatgttaagtaaattgatataacctaagaaaagatcttgttgccaattcagaaaccataaccttaaatagcatgcctgggtctcctctgtatctggtttaacatctgcattgaatattggtattttccaataatctccaactagcttatttattttga

SEQ ID NO: 98399 - DNA, 374 bp, Homo sapiens
ctactaggagcttgagctatgtgttgttaaaatacttgaatactgctactactaactaataatagtgatgagaatggaaattttgctttgtggaaaagcgttaaacagttatcaagggcacacataaatttacctattgaaacacgaggaagggccaggtgcggtagctcacgccagtaatcccagcactttgggaggctgaggtgggtggcttacttgagctccggtgttccaaactagcctgggcaacatggtggaaacccgtctctaccaaaaatacacaaattagctgggtgtggtggtgtgcgcctgtggtcccagctgcttggggggctgaggcaggagtatcgcttgaaaacccaggaggcagaagc

SEQ ID NO: 98400 - DNA, 1306 bp, Homo sapiens
tgagacggagtcttgctttgtcgcccaggctggagtgcagtggcgtgatctcggcccattgcaagccccgcctcccgggttcacaccattctcctgcctcagcctcccgagtagctgggactacaggcatctgctaccacgcccagctaattttctgtatttttagtagagatggggtttcactgtgttagccaggatggtctctatctcctgacctcatgatccactcgcctcagcctcccaaaatgctgggattataggcgtgagccgccacgcccggcccaacaacttaatcttttattagctttgcttaagagggccaattaaatcaaagccctttagttccctttaacagggactggagttatgatgcatgtgttacgacttttggcccactgtccatgcaactctaagtgcaggttgatttgctttccagaaatcccaaaggggctgctcttggatcaccgaagagccttacctatatcaaatcaaaaagacattctgggtcagattagactatgctcctggccctacagattgcacataaactatcataaatacagctttttcagggaactagttctaaaactcttacctgctgagaataagtcttaacactaagatgactgtattatatcaatttattattagaatcagacttatacctagcacaattaactattgtgtgggcaaagaacatttaaagggcatagtagaggtaaggagagacacatactcagctagagataaaaatactaagttgcactgattacttaaaatactagtcacaccataaaagtgccctgtagtttcaaaaacacgtaagcaatgaaatgttagccattatgtgttaaactacttaatctcatttctgtgatgtgaatatttttaaccccctttttgtagatgagggaactgacaagtgacttgtccaaggccatatagctgtgagaaaacccatgcattctcttttcagagttcatgctatcactcaactttaaagtaggccaagattaatgttggtaagggtttgtaatctgtaagaatgctaaaaacgtaagtatatatatcattttagatttgacattttgtatcttgccagtttttaggagaacttttcattttgttaagtatgcatgaatatagttgagtatatgagtaactggttcttatgctgctgttttgtatttttaccagcaggaagattgcaaaagttgatgtatgtaaatcttgaaatatttctaagttttatgtataacaaaatatgtattttaataaacttcttttgatattttaaaaaaactgt

SEQ ID NO: 98401 - DNA, 1265 bp, Homo sapiens
tgagacggagtcttgctttgtcgcccaggctggagtgcagtggcgtgatctcggcccattgcaagccccgcctcccgggttcacaccattctcctgcctcagcctcccgagtagctgggactacaggcatctgctaccacgcccagctaattttctgtatttttagtagagatggggtttcactgtgttagccaggatggtctctatctcctgacctcatgatccactcgcctcagcctcccaacaacttaatcttttattagctttgcttaagagggccaattaaatcaaagccctttagttccctttaacagggactggagttatgatgcatgtgttacgacttttggcccactgtccatgcaactctaagtgcaggttgatttgctttccagaaatcccaaaggggctgctcttggatcaccgaagagccttacctatatcaaatcaaaaagacattctgggtcagattagactatgctcctggccctacagattgcacataaactatcataaatacagctttttcagggaactagttctaaaactcttacctgctgagaataagtcttaacactaagatgactgtattatatcaatttattattagaatcagacttatacctagcacaattaactattgtgtgggcaaagaacatttaaagggcatagtagaggtaaggagagacacatactcagctagagataaaaatactaagttgcactgattacttaaaatactagtcacaccataaaagtgccctgtagtttcaaaaacacgtaagcaatgaaatgttagccattatgtgttaaactacttaatctcatttctgtgatgtgaatatttttaaccccctttttgtagatgagggaactgacaagtgacttgtccaaggccatatagctgtgagaaaacccatgcattctcttttcagagttcatgctatcactcaactttaaagtaggccaagattaatgttggtaagggtttgtaatctgtaagaatgctaaaaacgtaagtatatatatcattttagatttgacattttgtatcttgccagtttttaggagaacttttcattttgttaagtatgcatgaatatagttgagtatatgagtaactggttcttatgctgctgttttgtatttttaccagcaggaagattgcaaaagttgatgtatgtaaatcttgaaatatttctaagttttatgtataacaaaatatgtattttaataaacttcttttgatattttaaaaaaactgt

SEQ ID NO: 98402 - DNA, 222 bp, Homo sapiens
ttttattattgatgttggaagttgaaactggccatatctaaatatattcattctgtttcttagtactaatgggatcttttcttagacctgggaaattttctcccattatttcttttgtttcttcccttttttctttcttttccttttctctttctagaactttctagaacaaatctcaggtcccctagatgtttcttccataattgttactatgcttctcat

SEQ ID NO: 98403 - DNA, 363 bp, Homo sapiens
tttttttttttggagaaggagtctcactctgtcgcccaggatggagtgcagtggcgcgatctcagctcactgcaacctctgcctccccggttcaagtgattctcctgcctcagcctcccgagtagctaggactacaggtgtgtgccaccacacccagctaatttttgtagttttagtagagatggggtttcaccatgttggcaaggctggtcttgaactccttacttcaagtgatccacccacctcggcctcccaaagtgctgggattacaggcatgaaccactgcacccagctcctgtcagtcttaaaacaaacataattaccataaaacccagcaacctcactcctggacatttgtcacag

SEQ ID NO: 98404 - DNA, 249 bp, Homo sapiens
tgccattttatttatttctgttttccaaggtgagctctttgggtgtaaaatgcaaagatgggatgaagagacattgcagccctctgattactcacttgggggaagtagatcaaggctatgatgttgcctgacagtgatggttgaaggcagctgagtcctgtcatggaaaatgtaaaggccctcccctttttcatttccctccaggaacttctgcctgtagtaataaagaatcctgtgttcatgcctgtg

SEQ ID NO: 98405 - DNA, 385 bp, Homo sapiens
cctgcttcttccctgtcttccccatctcataaatggcaccaccatctacctagctcttcagtacttctctttccttcactcctcacatccaatctatgagcaagttctgtggaccctatccagaaatgtgtctcatacctgcccacatccttccattgttatagctctcaccttagtccacaccaccattttcttgctagactatagcgggcctcctaactcacttatctgcttttactcttgaccctggaaataactctctataccagagccagaagggctgcagcacttaatgctaaatgcctatccattcttcccttcttctgattctgttctggaaggcaagagacccaactgaaagacaaaacttcccagcctcctcagc

SEQ ID NO: 98406 - DNA, 297 bp, Homo sapiens
aaaacatacacacacacgcaaaatacagagacactaaaaagttttctaaaaaagaaaaactattgctaatcctaatgtagagacctttattgacattctggtacaaatccttccaggattttttcctaccgaaagtagcattatatttttccctcactatcaaaatataagattataggatttgccaaatgatactgcattaatagagatgacttgacattttaaaaaatgatgtcatctgagtggaaataacaatgcatccgccaggcgtggtggctcacgcctgtaatcccagca

SEQ ID NO: 98407 - DNA, 463 bp, Homo sapiens
cttctccattccaaccactactgtgctagtctaggccaacttatttgcactggccagcaatggcatactactggaattactttctaaccggtcctaattgcaatcaaatctattaccccattactgttcttaaaatgctatgttcaaactacatttttgctaagaacctatagttctctaccactgaccacattcacatcaagactaaactcttcttctggttttcaaggctttaaacacacttatccaagcttaccagtccctgaatacctcagctggatctccttactgccctatcccaacccctataggccactgtaagatttcaaagcaactgcaatttgttcctttctcttgtctttctgaggcaatgcctccgtgggagtacctatggacctgtgccagagctctggcagtcttgacagtgctcggaacactgtacaaataggagtcatgtcagtgg

SEQ ID NO: 98408 - DNA, 1092 bp, Homo sapiens
tccgtctctaaataaataagtgaataaataaatgtatactaattgcattttaaaaatcaaagtataggccgggtacggtggctcacaactgtaatcctagcacttttggaggctgaggtggatggatcacctgaggtcaggagtttgagaccagcctgaccaacatggtgaaactttgtctctactaaaaatacaaaattagctggtgtggtggcgcatggctgtaatcccagctactcgggaggctgaggtaggagaattgcttgaacctgagaggtggaggttgtggtgagcggagatcgtgctgttgcactccagcctgggcaacaagagcgaaacttcgtctccaagaaaaaaaaaatatataattcacataagataaaattcaccctctttggccaggcgcagtggctcatgcctgtaatcccagcactttgggaggtagaggtgggcagatcacttgaggtcagggagtttgagaccagcctggccaacatggtgaaaccccatctctactaaaaatacaaaaattagcccggtgtggtggcatacacctgtaatccacctactcaggacgctgagtctgcactcagtccctgggctacagggtgaaactgtatctcaaaaataaagaataaaatgcagctacttaaagggtgtagagttgaacaactgttaccactgtctaattccagaacctttcatcaccccaaaagaaaacccattcccagcagtcatttcccattaagtctcctctagcccctcacaaccactaatctaattcatgtttctatgtatttgcctattctaggcgtttcatacaaatacagtcatataatttgtggcctttcgtgtctgacttgtttaacttagcataatgttttaaggcccatttatgttgttgtatgtatgcatacttcattccattttactgctgaatattgctttgtactgatgccactttttgtttgtcttttcatcacttgacggacattttgtttcttccactttgtggctgttacaggcagtgctactgtgaaaatttgtattaaagttttagcgtgaatatatgttttcagttctcttgggaaa

SEQ ID NO: 98409 - DNA, 720 bp, Homo sapiens
gtatttcactgtattggtcaggctggtctggaactcctgagctcaggtgatccacccgcactttgggaggtagaggtgggcagatcacttgaggtcagggagtttgagaccagcctggccaacatggtgaaaccccatctctactaaaaatacaaaaattagcccggtgtggtggcatacacctgtaatccacctactcaggacgctgagtctgcactcagtccctgggctacagggtgaaactgtatctcaaaaataaagaataaaatgcagctacttaaagggtgtagagttgaacaactgttaccactgtctaattccagaacctttcatcaccccaaaagaaaacccattcccagcagtcatttcccattaagtctcctctagcccctcacaaccactaatctaattcatgtttctatgtatttgcctattctaggcgtttcatacaaatacagtcatataatttgtggcctttcgtgtctgacttgtttaacttagcataatgttttaaggcccatttatgttgttgtatgtatgcatacttcattccattttactgctgaatattgctttgtactgatgccactttttgtttgtcttttcatcacttgacggacattttgtttcttccactttgtggctgttacaggcagtgctactgtgaaaatttgtattaaagttttagcgtgaatatatgttttcagttctcttgggaaa

SEQ ID NO: 98410 - DNA, 606 bp, Homo sapiens
tcagaaagagggatgctcaggaaaactagaaagtccaagcatgacagaaatggtctgtttacatcataagaagaagacagatgaaaaaaaagctttcatatgagcaagtcgtctacaattaaagggaaattatttaaaatggtctttcagagattgggttttgatttttaaaaaaccacttatacactaaagaattggtttgaactacaaaattttcttaaggttattacgtccatataactttctgtgaagggagccgaaggcccatgggacgtgaccaactcagcattccactggaggctatatgatcgaacagcaaactgtttatcatgaatgcaggatgtgagcaaactcacaagtgttcccgccgacagaaggtttgctggaggcaatcactcccgggtgccgaggttatctactgcaacatctagagcctgttgtttgaggaatgcagtcttgcaagcctactctggactaagcagctgaccccttcttccactccccttctcactgtctctttcgcctaataaatatggagggctgtgtaaagctcagggcccttgtccacaagaggcaagcttcccctgaccccttcttccaaatata

SEQ ID NO: 98411 - DNA, 323 bp, Homo sapiens
tgcttattggccatttgtatgtttttagagaatgcccacttcaaattcttttcttatttttcatttgggttggctttttattgttttttgtttgtttgttttgagccagagtcttgctttgtcacccaagctgtagtgcagtgtggtatgatcagggccctctgtagcctctacctcctgggctcaacgaatcctctcaactcagcctctcaagtagctgagattacaggcgcatacgactacacccaactaattataaattaatttaatttttttgtagagacagggtttcacttttgttgcccaggctagtcttgaactcc

SEQ ID NO: 98412 - DNA, 613 bp, Homo sapiens
actccacattccattacatgggtatcaattgcttatttttaattttattttattttgggggtagcttgtgtagttttggaaggggctttaacttctcttagaaatcagccaggataggaagttgggaatacatagaacccacaggaagtccttcctaaggggagtccctgactcctcagaggagaattgactctgtgatcaatgtggttgcattgcttctgctctgggctggcatagaactgggcactacagggcacaacatgcacctctcctccacactgccgagtggggagatttccagagggcttgtaagggtgaccaagtagttgagacatggagccctggaaaacaatagcatgaggagtaccacacacactctcacactcacacatcctcacactcccacacgtgtataggtgttcactcaggcatgccaccaagtgtgggtgacagaaattaatcacagaggccaggcatggtggctcacgcctgtaaccccagcagttttggaggccgaggcgggtggatcccttgagatcaggagttcacgaccagcctgaccaacatggtgaaaccctgtttctactatatatatgtgtgtgtgtgtgtgtgt

SEQ ID NO: 98413 - DNA, 194 bp, Homo sapiens
ttgctaccatttacagaatgatcaatttgatagctatcatacatggctagcaagacactgatttttctaataaaaaaatttttaatgcatacaggtctggtgaacagtttcaatttaacggatgaggccaaggctaaagccagagtaaagtaatcagagccatgcctcaggaacacgatttagctaatagtgtg

SEQ ID NO: 98414 - DNA, 666 bp, Homo sapiens
ccactaaactaagaggagaggtgtttgttctgtccttttagtgaggcgctgagagatttgtgccagaatccacctggtgctcttgggtcaggagttgatgggtctccccgagccgcggctcaggtgtctccctgggctgctttttcttcggttccagaggcgacagttgggagaggaatactctgaagtgctgtgttggtggtggtgttttggttttgtttgcttttcttttaccttttcaaatcaactttatcaaaatatagtttaaatgaaataatgaaaggtatccaatttaagtgtaccattaaatgaggttttttgtttttttctgtttgtgttttcttttaagagactgagtgttgcccaggctggagtgcagtggcatgatcatagctcactgcagcctttacctcctggggtcaagcagtcctcctgcctccgcttccagagtaactgggactataggtgtggtggtaagcacctgtggtcctggctacttaccggctgaggcaggatgattgcttaagccgaggaggttgaggctgcattgagctgggattgcattactacgctccagcctgggagacagagcaagactctgtctcaaagagaacaaagaaaaaacaaaaaactggggggagatcagggcacggggtggggaaaaaa

SEQ ID NO: 98415 - DNA, 834 bp, Homo sapiens
gggaagtgaaggagctgcccatgtggcaggcagagagaacaccatgtctccagagctgaggcagagggaacaggactgtgtgtttgagcaacagctggagaccaggaagctggagtggagggggtgatgtggaaagttggagactgagggattgtcgaagggtgggggctacatcacttagggtgtaacagtggcctgtcttctctttgtaaaggatccctcccactgctgagcaagaaggtgggaaatgggagagcagctctcggagcccagcatgatacccagacaggaggctatgggggctcaggcaggggctggaggcaggcttgggaggggtgggggatgatatggtttggctctgtgttgccacccaaatctcatcttgtagctcccataattcccatgtgttgtgggagggacctggtgggagataattgaatcatgggggcatgtctttcccatgctgttctcatgatgtgaataagtctcatgagatcttatggttttaaaaagggagtttccctgcacaagctctctctctctttgcctgctgccatccatgtaagatgtgacttgctcctccttgccttctgctatgattgtgagtcctccccagtttaatgaaactgtaagtccatcaaacttctctttcttttgtaaattgcccagtctcaggtatgtctttatcagcagtaagaaaatagactaatcccggctgggcatggtggctcatgcctgtaatcccagcactttgggaggccaaggcgggcagatcacctgaggtcgagagttcgagaccagtctgaccaacatggagaaaccctgtctctacta

SEQ ID NO: 98416 - DNA, 961 bp, Homo sapiens
cctcagactttcgagacagcgaacggaccgaccgggactgccagccgctccgggtcaaggactcgccccacccgtgccccccaccaggcgctcccaactcactggtgagcgcggcggcccgggcgctggatgcgggggcggccgcgatggccccgcgcgcgggacagccggggctccaggggctgctgctcgtggcggcggcgctgagccagcccgcggcaccctgccccttccagtgctactgcttcggcggccccaagctgctgctgcgctgcgcgtcgggagccgagctccgccagcctccgcgggacgtgccgcccgacgcgcgcaacctcaccatcgtaggcgccaacctgacggtgctgcgcgcggccgccttcgccggcggggacggggacggcgaccaggcggcgggcgtgcgcctgccgctcctgagcgcgctgcgcctcacgcacaaccacatcgaggtggtggaggacggcgccttcgacgggctgcccagcctggcggcgctcgacctcagccacaacccgctgcgcgcccttggcggcggcgccttccgcgggctgcccgcgctgcgctcgctgcagctcaaccacgcgctggtgcgcggcggccccgcgctgctggccgcgctggacgctgcgctggcaccgctggccgagcttcgcctgctgggcctagcgggcaacgcgctgagccgtctgccgccagccgccctgcgcctggcgcgcctggagcagctggacgtgcgcctcaacgcgctggccggcctggaccccgacgagctgcgcgcgctggagcgcgatggcggcctccccgggccgcgcctgctgctcgccgacaaccccctgcgctgcggctgtgccgcacgccccctgctggcctggctgcgcaacgccacggagcgcgtgcccgactcgcggcgcctgcgctgcgccgccccgcgggcgctgctaga

SEQ ID NO: 98417 - DNA, 263 bp, Homo sapiens
aaccactttatgtaagtgagagtctctcacatccccaaaactttacaattgtagatcccagtcccttcttgtagttttttttatatataccctcaatatattataaattatgtaaaggcaaaggctgtgtcttttttgattaaccattctaaatggttgtggcatcatatttatttattaaagtatttcttaaatgcctaagatgttttaaattctagagatacttttttaagttgcagagatacagcagtgaacaaaacaga

SEQ ID NO: 98418 - DNA, 343 bp, Homo sapiens
ttgtacaggatgaaataccgtatggtgctttataacatggagttgagttgtttctataagaatattatacaaatgtaatactactgggagaaagtagagccagatgttgattggacagattgcaacccccccacccccccactcctcggggccaataattcttaataaggtatgatgttaatacctctaggaaattgccagggattcaggtgacagtgtgtgatgaaaacggtgtattgtgtgctggcctgactgcattaccatgtttgtcttctattgtctaatgatttcttatttcttaaatgctgctgataaaattattgatataatacatttttgacag

SEQ ID NO: 98419 - DNA, 224 bp, Homo sapiens
gggtctcctcatctccacttacttctgggtaggaaagtgggcacaaggtaacccttgcaacctaactgccattccagaacattagtcttccaaccctgaacaaaaagtcctactgctctgaggctatgccatcaggaatttatgtaacatcctctacccccacttgctacagtcatctccaacgtccattcttccatttcctgaacccactcactgaggactaa

SEQ ID NO: 98420 - DNA, 850 bp, Homo sapiens
atctgactcttaacactgatcaaaagcccatgagcttaattttgaaagaaatccaaaaggcttgcccatcatttgatcactcagaagtgctgctgggctctctaggagttggcagtctatgggaagggtcagccagaattgtgtccattaatctggaaaatatcaggatagacataactaggagacttggcacagagggcaggcactgctgagggggcttccagatagaggaaatgagagttaaataaaacctggaagggaaagtggaagtttgccagggagtgaggaggagaaaggtgttccagataaagatgaacaagcgtgggcggtgcaagaaatagcaggactagcccagggaagtgctgtgcttttgaagcaaagcatttggggcataattttagtggcagagagtggatgggcctggagaggttgattggggccatgtcagatctgtaccaggctctgtggaactgcaatccctagggtggccctgggtggccccaggctggcctggagctcaaggccgatccacatagctgactcacaggtgtgcctgagtccagtctcaaacttcagcgtgttctgccagagctggactgaaccacaaggccactttcctgagacgtgctacaagaacctgttagaccaggtcggattacaggcgtgagccaccgcgcccggccgagacggggtttagctcttgttgcccaggctggaatgcaggtggtgccatctcggctcaccgcagactccacctcctgggttcaagcaattctcctgcctcggcctcccgagtaattgggattataggcattgtgcacatgcccggctcatcagatttagtagagag

SEQ ID NO: 98421 - DNA, 478 bp, Homo sapiens
aaccaatattgatacattattattaactctaatctgtactttattcacatttccttagtttttccctaatgtcctttttctgtcctggtattatccagggcaccctattacatttagtcatcatatctctttaggctcatcatctctgtgatcgtttctcagacttcccttgttttagatgaacttgagggttttgaagatagtactgactggtcagatattttgcagaaggacctttaattaggatttgcctgtttttgacatgagtaagatcagggtaatgggtttttggggaggaggaccactgatagggttcggctgtgtccccacccaaatctcatcttgaattgtagctcccataatccccccatgttgtgggagggtcctggtgggagacaattgaatcatgggggtgggtctttcccatgctattctcctgatagtgaataagtctcaggagatctgatggttttataaa

SEQ ID NO: 98422 - DNA, 858 bp, Homo sapiens
ctgaatgggagctacaaagagaatgagaaaagtcaaaggaggctttcttgtcaccttctgccacacctaggccagtgtgaacaaaggccatactctcatcccacctccccaggctgggtaaagtaggtgccatctgagttgcagaggggcaagggtggaggtgttgtcccagccacctgccagtcctgtgactctctgagtccacttatttggaaggacaacaatcctaaaagcaggtacagccagtaaaacaataatgaaatggactatggtatggcagagagataggagaggatgaaggaagacccagctgggtttttgtaatgttcttgcaagaaaaaaaaagtgagggtttgaattagggcagggataatggatatggggaggaaggcacaaattagaaacattcccgagcataatccataggatttaactttacctagatatgagatatgggtgggcaggcagcctcggagactgctccagaatgcttaagttggtggcaaaaccattcactgagacaagaaacacaggtcagggaggagtttagggtagttgagaagaaaagcaaatgtttcttcttgtccaaatttaatttcaagcaacaacaagaatccaactggagctatccaaggaggttaggaatttgaacctggagctgcagaaagaggtaagagctagagagaaagatgtggaggtcacaggcatgtcaatgtcagaccagtgcataggggagtgagggcatcctggggagcagaagagggccaaggaaggaatcccagggaatcccagcatttaggcggcaggaggaggaaatggacacagcaaagagcaactgagatacaaaataaaaggagc

SEQ ID NO: 98423 - DNA, 736 bp, Homo sapiens
acatcagctgaagtctcacagccagcgaatggcaggccagggcaccagggcctaggtctgcctgcctcttccatccaccttctgtcatcacaagccttctgatctccagccctctgatctgccccagtgggaccctcctgcgtctctgctctagttgtagaggacccatcaggcacttagagagaaatgagtggtgttgtgaacattcgactgtgtccatgtggaatccacacacacagtttgcctgaaaatgactgataggatggaaactgacaagtcatcatccgcttcgggcaccagcgatgactggttaacatgaatattgtgttgatttccgctagatagaagaagatgtcacttgtcgttaatggggtgtcacacgtacacttgcctaaaggaaaatgctcttttggtgattgttctcaattttcacctcattttatagccataaaaaagaaaagattcagcagaaaggatgaatccacctaggggtaggatggaaaggcattcttctcatttatttccttctttctttaccagaacaaccaaaacccagtgaaaatgctggtgcaagtcagaagagggggacctgggttctaagagcagccaggtactctgggcttcagatcagagcctcagaatccagcagttatgcccacaaggtagccaaagtccagccagtaccaccggtctctcggccagctatacttgcctctgctcaacaatgatgatttga

SEQ ID NO: 98424 - DNA, 431 bp, Homo sapiens
tacacactgaatactctatttcactttttgttaatgcagctgtgttggatgtaataacaaaattaataattcctccacaagttttagctcgactataagcttgacactgactaatcagtacagagagtcagtgtcttcagtataatgctatgtctagcttatttttttatcctattaaatctatgtgcgggatttctacattaatcccttgttttctcatttatttttaaagcttctaatgtccccaaatttcatctgatttttttctttttaagaatatggccataatgaagtcccactcacatttagattcaaaaacatattttcactggaatttcatgaagtgactgccagctataactttattagaacatttcactcatattgttacctttatcttcctgcttgcttagatgttagttgtgacattt

SEQ ID NO: 98425 - DNA, 399 bp, Homo sapiens
tttgtagaacatgaagaattttactaaaatgaggggaagatgggtgcagaggaaggggaaagtcagtgattgggaacctgtgttacgactattgggaaagagtctaagttggtgaagggtctgagattaccacactttcaagatgacaagtcggcctgccacacattcaagtatgctggcagaaggctcaagagtcctggatcctggatgaatgagctatgacgatgtggatggctggatgtcaggagaagatgatgtcagtgtttggggatcctcaatagttgaaggtttttgttttgttttgttttgtttttgccaaaaacttttggaagagcattgtaatagaatgttattgtctctttctttttaactcattaaagtgttgccacagatgttgta

SEQ ID NO: 98426 - DNA, 323 bp, Homo sapiens
gcagacagtgggaagtgggaacagggagggggttttgttctggggcactctgagaggagcagccccaaatctagagggaagggtccaggctcaagaaggaactgaggacaaactgagtgagaacagctccaccagcccctacccctggagggtgagatgtggcctggaagataggacttctattgagaagctctaagataatcccagcactctgggaggccaaggcgggtggatcacctgaggttaggagtttacaaccagcctggacaacatgatgaaaccctgtctctattaaaaatacaaaaaacaaaacaaaacaaaac

SEQ ID NO: 98427 - DNA, 219 bp, Homo sapiens
ctggataacttgctacagcttctccgtcagcacttgctgttttgttttgcactttgacattctgtagatggtttctttccttaaaccgcatgaaccaacctctgctagcttccaacttttcttctgcagattcctcactctcctggccttcatagaaatgaagtttattaactggcctaatttcagtatcattgtgtctttggaaacaagcaggcccaa

SEQ ID NO: 98428 - DNA, 249 bp, Homo sapiens
ctacggtgtgccggctcaggttgtgggagtactgaaaacttttgccacactgcacacacgtatagggcttctcacccgagtgtgtccgctcgtgcctcttcagtgtgtatgtgcacgagaaggtcttcccacagagcgggcaggtgggtgccacgccgtcgggtgagagccgggcccgggtgctgtctcgctcacggaagtgggcactgaggtgcagctgcagcacgtgggagctgggaaatagcttgc

SEQ ID NO: 98429 - DNA, 1326 bp, Homo sapiens
  misc_feature (1292)..(1292): n is a, c, g, or t
  misc_feature (1298)..(1298): n is a, c, g, or t
agccggagcaactgccggcctccgcccccagccgcagccggtcactggcggcgccttccgcgccaagcttgggggccttttcggggtcctacatggcacggcttccgacccccggcccgggacggggctcgcaggccccagaggggcaggctggagaaggaggaggttaggtgtcttcaggagggttgctgagcccaaggacgcgccatcgccgcggagaaggagccggaccccttgggcggagcgcccaatgtgtggtccctcacgccgtcccgcaccttgctttttagggttctttttccgctttctgagcccttttataccttacgtttagaaggggaaaatcatcctcccacaccttctccccgactttttgccttttttgtcttgaagttacccaaaggtctgtgtattgttctcagtggtcccaagaattactcgaatatagttgttttctgagggaggatggatggagataactatcctgatcccagtgtcactttttaaggcattcgcttcaagagacaagcagtttagaatcaggcagaactggattgcaaaatttatgggcagaccggtatgtgtgaaggaaaatgtctaatcaacaggagaagtatgaagctcagaatatagtcaattcaacagaagagagtgatgatgcttttgatactgtcactattccagttccctcagaagagcctcaagagtcagatcaaactgaagagcatgaatctggaatagaacaattcagtgagagccatgcaatacatgttgaggagcagagtgaccaaagcttttcaagcctggaaccagacaatgaacaactcatggaagaggttatatcaccaagacaagtttcatatactccgcaacatcatgaaaagcaatatgcaatgcagaggccaaatgatgatagtttggcatttctggataaaataaagtctgtaaaggaatctttgcaagaatcagtggaagattctctagcaacagtaaaagttgtacttattccagtgggccaggaaattgtaataccttttaaggttgataccattcttaaatatcttaaggaccatttttcacacttattaggtatcccacattctgtactgcagataagatactcaggaaaaattcttaaaaataatgagactctagtacaacatggagttaaggccacaggaaattgtacaagtgggaaatcttttctacaaatccagatctgtatccagtcagaagaatagatggattaactgatgtctctcaaatcataactgtcactgttcaaactggantgatcnataacacgaggaactgtttgagaatggc

SEQ ID NO: 98430 - DNA, 840 bp, Homo sapiens
  misc_feature (806)..(806): n is a, c, g, or t
  misc_feature (812)..(812): n is a, c, g, or t
agcggaggatacgaccaacagctgagaacgcggcgagtatggaagctgcgtcttaggagcctgggaaagcacttcgacgagaatagtttggtttcgtacacaggaaaatgtctaatcaacaggagaagtatgaagctcagaatatagtcaattcaacagaagagagtgatgatgcttttgatactgtcactattccagttccctcagaagagcctcaagagtcagatcaaactgaagagcatgaatctggaatagaacaattcagtgagagccatgcaatacatgttgaggagcagagtgaccaaagcttttcaagcctggaaccagacaatgaacaactcatggaagaggttatatcaccaagacaagtttcatatactccgcaacatcatgaaaagcaatatgcaatgcagaggccaaatgatgatagtttggcatttctggataaaataaagtctgtaaaggaatctttgcaagaatcagtggaagattctctagcaacagtaaaagttgtacttattccagtgggccaggaaattgtaataccttttaaggttgataccattcttaaatatcttaaggaccatttttcacacttattaggtatcccacattctgtactgcagataagatactcaggaaaaattcttaaaaataatgagactctagtacaacatggagttaaggccacaggaaattgtacaagtgggaaatcttttctacaaatccagatctgtatccagtcagaagaatagatggattaactgatgtctctcaaatcataactgtcactgttcaaactggantgatcnataacacgaggaactgtttgagaatggc

SEQ ID NO: 98431 - DNA, 902 bp, Homo sapiens
  misc_feature (868)..(868): n is a, c, g, or t
  misc_feature (874)..(874): n is a, c, g, or t
agccggagcaactgccggcctccgcccccagccgcagccggtcactggcggcgccttccgcgccaagcttgggggccttttcggggtcctacatggcacggcttccgacccccggcccgggacggggctcgcaggccccagaggggcaggctggagaaggaggaggaaaatgtctaatcaacaggagaagtatgaagctcagaatatagtcaattcaacagaagagagtgatgatgcttttgatactgtcactattccagttccctcagaagagcctcaagagtcagatcaaactgaagagcatgaatctggaatagaacaattcagtgagagccatgcaatacatgttgaggagcagagtgaccaaagcttttcaagcctggaaccagacaatgaacaactcatggaagaggttatatcaccaagacaagtttcatatactccgcaacatcatgaaaagcaatatgcaatgcagaggccaaatgatgatagtttggcatttctggataaaataaagtctgtaaaggaatctttgcaagaatcagtggaagattctctagcaacagtaaaagttgtacttattccagtgggccaggaaattgtaataccttttaaggttgataccattcttaaatatcttaaggaccatttttcacacttattaggtatcccacattctgtactgcagataagatactcaggaaaaattcttaaaaataatgagactctagtacaacatggagttaaggccacaggaaattgtacaagtgggaaatcttttctacaaatccagatctgtatccagtcagaagaatagatggattaactgatgtctctcaaatcataactgtcactgttcaaactggantgatcnataacacgaggaactgtttgagaatggc

SEQ ID NO: 98432 - DNA, 304 bp, Homo sapiens
gtatttttttgtagagacagggttttgccatgttgcctaggctggtctcaaactcctgggctcaagcaatcctcctgtcttggcctcccaaagtgctggtactcacaggcgtgggccacgtctggccctaccttattactttttaactacccattctgctttaggccttctgttatttggtggttcatgaatccatgaactgcacaatgatgatggtattataactgagcttccccgtaatgatgtaaaaaacaaaggtcattcctattttccagttagagccactttgtaagttagattaagt

SEQ ID NO: 98433 - DNA, 167 bp, Homo sapiens
gtttatctgagtccccagctttgttaggcaatgtgcttttatttttatttttgattttgattttttgtgtttatttttattttaaatgaggtctcgctgtattgcacacaatcatcctgaattcctgggctcaagctatcctcctgccttggcctgtcaaaggatag

SEQ ID NO: 98434 - DNA, 295 bp, Homo sapiens
gctgagccaggatttgaatccaggtctgcaaatccaatgcctgtgctctctgcacttcaccggaatgaccttatggaccccagaggtatcagggtttctctggaagcagggtctctcaccaaccagaccagcccagctaagactccatgggagaggggtcacttgaacctgactcctttggtaatatgtggatgtcagtaaccacagcctcccaggaaggaaacccaagaggaggtgggcgggaagaaggaggaagacggttggcctcatttgggaggtgttcacggtggggact

SEQ ID NO: 98435 - DNA, 290 bp, Homo sapiens
aaggtgtgcatcattggggaccatcttggaagctggctatcacaccatccatatgaatgagaaataaaccttctgagtatctgataataataataataacaacaacaataacagaagctcctacttttctgtcttaataatttctatatagaaactcctagtgtaatttctgggctggcacgcactcctggttctcttctttcctccttgcctttattttgtctatcactttcatggaactctttcttcagtctgcactttcaacatgtttccttagtggcttatcttta

SEQ ID NO: 98436 - DNA, 807 bp, Homo sapiens
ttccatgtttccaactgaacccatgttcctccactaatacttggattttcttccaccacggccgttcctgagacagcaagaccagttcctcctccttctgctcctcctcagcccacttgacgtgaagacgacgaggatggagaccttgatcgtgccccactcccacctaatgaatagtctgtagattttctcttccttaggactttcttcataacattttcctttctctatcttactttattataaaaatacagtatataacacagatgcaaattatgtgttaattgagtttttatgttatctgtaaggcttccagtcaacagttggccctcaggagctaagttttgggggagtccaaagttgtatgagtatttttcactgtgtaggggatcagtgcccataaacctcaggttatttaagggtctactgtataaagtaaatattggactcataataacaatagcagctataacatctttgtagcacttagccttggtacaggtgccttcaatatgctaactaatttaacttttaaccaagccagttctttatgtaaaaaaaacgattcatcataatttaatatcttatacatgttccattcaattttctaaatttggctaatataaaataaggtttaatattaccatgatttgatcaacatttcaaaattacatatatttctcttacaaattcattgttattgacatcaaatttataaccacgttattggcattgtttaaccacacagtaaaataagtgtaatcagtgaaaaaaatagaataaaatctatatagtggagaccttgaa

SEQ ID NO: 98437 - DNA, 317 bp, Homo sapiens
cgtttgggatcgtgagaaatgatatgaggggggaaggggaggcggccggctcgattttattcataaagttttttggaaaaagacaacagaaattgtactttgttgagaagactcctagagccaaatagtcacagactcagaatacacagagacaagcaaagatggttccagcaagctctaaggacacagacatgtgaaagaggcgctgaagacacacgaggactgatgcatggtagatgtcatcctgatatggctgggcttctggactcactgcctcctccttctagaacccagcacctccaaggctgggagaagag

SEQ ID NO: 98438 - DNA, 105 bp, Homo sapiens
aaaactgcaattatttttgtaccaacctaatataatctttatattgtcactgagaaactcagtaactgagaggttaagtaacctgcctgaagtaatggaggtgct

SEQ ID NO: 98439 - DNA, 286 bp, Homo sapiens
ggcccatcagttactctgggcccaatatatgtgacatatggtgcgctgagcattttatgtaaataacctattctattttattgagagggtctcactatgttgtccaggctgaagtacagcggcatgatcgtagctcagtgccaaccttgaactcctgggcctaagtgatcctgccttggcctcccaagtagctgggactacaagtgcatgccaccatgagaggctaattttttattttttaattttttctagtgacggggccttgttatgttgcccaggctggtct

SEQ ID NO: 98440 - DNA, 448 bp, Homo sapiens
tgtatttttagtagaaacgggctttctccatgttggtcaggctggtctcgacctcctgacctcaggtgatctgtctgcctcggcctcccaaagtgctgggattacaggcttgagccactgcgcctggcctctgaatggtatttctaatggactcatgggtgggatagatgagattacaagaattgcaatttaggatccgcaatttaggtttgggattgaaactcccctcccctcacccagtataccctaggactaaaggtgaatccagaatcgacagtactcatggggactaaaggccagcttcaaataatctcattccctacgtagattaagaagacctcagattgccggcacctctactctagcttacttgccataattaaagatgaatcttctatggaagaagaaaatatgcagctgagtgccgtggcttacacctttaatccaa

SEQ ID NO: 98441 - DNA, 537 bp, Homo sapiens
aattctgttttagatcagttgggatcaggtgactgataggcacaggaaatgtgcattcccagctggtggtgctggagaaatctggggcttataaagagagaactgggctagtgagatcaggcatcattatgcctaatggtagtgaaaaccttaaccaagaaaaacacataggaaatagcagtggtccagagctatttccctaggaaatccaaaacctaagaggaaaaagtagaatagaacctctaaagagacatctaaagaatagttcaaaaggacacagtggctcacatctacaatctcagtgcttcgggaggccaaggtgggaggatcgcttaacccaggagttcaaggcagtatagcaagaccctatgtctacaaaacacagtgagactccgtctctacaaaaaataaaattagctgggcatggtggcacctacctgtagtcccagctactcgagaggctgaggtgggagaagcgcttgggcccaggaatttgaggttgcagtgagctataattgcaccactgactccagcttg

SEQ ID NO: 98442 - DNA, 775 bp, Homo sapiens
agcagtagctggtaggagagcgcagtcgccccgcgggctcggaggacacatcgtccgggaccaggctctgggaagcgggtgtgcacagcccagcagagtcagggcgcgaccccaaccgcctctcaccatccttgccgtctcctccgagccgagggccggccctcctgcctcgcctgccccgcccctgccccgccccggcccgggccgccgggaccgggagccgggacgcgggtgccgcagcccgaggcaggtaaggggagccccggctctccgtccccggtccgtggcagcgctgagcatcccggccccgcaccggcccgggggcgcgtcaaggtcgagaggcgtgatggcggcagaacgcgctggaggccgatgggactgtgcgactcagggcccggcggagcatagatggccatgagccagtgacgctggacggacggcggcgcgaaccccctgtgactgaccacgcaacctgaacgaacggtgcgcacgaaccacaatcactgaacgacccaagcgcttactccccagcctaacccccagagcgactacagcaccgtcggcaccatccgacgtatcgttgatacctcgcccctagttcccgacgctgggacgcgcgcccctgacagcggccgccacaacacgcggctcatcacgaacccaatctcacaagtagactctcaacgtacacatccgtgcccgaccgaggaccctgaaatggccattccatgagccccctcatggagcctgatcagttctaacatcaccctgacac

SEQ ID NO: 98443 - DNA, 225 bp, Homo sapiens
gggtgccaggctgggcctggaggtgttggggtgcgtgccaggctgcgcctggaggtgggggtgtgtgtgccaggctgggcctggaggtggggggtgccaagctattttggagggtgtccccaccctctgcacacttcacctggctgccacccgtcagaggtaggttatgctggctgtcctgctgccatgaccaccaatgcccctcccctagttgtgcctccagcc

SEQ ID NO: 98444 - DNA, 299 bp, Homo sapiens
gggtaatattggccttgtagaatgaatttagaagaattcctttccttttgatttttttggaataatttaagaagaattagtattagttcttctttaaatgtttggtagaattcatcagtgaagccatgtggtcctggacttttctttgctaggagagtttttattactgattcaatcttgttactcattattggtctgtttgagttttccatttcttcatgatacagtcttggcaagttgtatgtgttgagtaatttatcaatttccattaggttttccaatttgttggagtatgattg

SEQ ID NO: 98445 - DNA, 444 bp, Homo sapiens
caaaccgcaaaaaactgaccccagtgagatggtgtaagaacttgcagagtaaaatgcgcctgagacactcactggggcatagttcagagtctcctgagagggggttattgagcactttagtgagtaggatggggtgggacagtctctcaagtaattggatggcctgacttgacacatgattaagacatatctgtgtcttgaaaaggttttttcacttattttgacctaaggcttgttttcgttgtcttgagacagtttccctctgtcacccaggctggagcgcagtggtaccatctcggtccactgcaacctccagatcttgagttcaggtgattctcatgcctcagcctcccaagtagctgggactacaggtgtgcaccaccacactcagctagtttctgtagttttagtagagacagagtttcaccatgttagctaggctgt

SEQ ID NO: 98446 - DNA, 504 bp, Homo sapiens
ggtgatgggatcagtcatagcccaaacctcagcatcatgcaatatacccaggtaacaaacctgcccatgtactcctaaatctaaaattaaaagttcaaattatattttaatcacaaaaaaactacaaatagcaaataccaaaatatataacagatgtataagtgctccttgggataaatatatgatagacaattaactgtcatcatatccctgtctctgtttccactcatttctatagtgtactcctgtggctcactagtaatataaccacagtggtaacacaaattccaggttcaacggtaacctaagaaaatctgctttcttacttcttgaatattccttataaaaagaacaataagggatgtaaaataaattttttagaaagacagaagacaaagatatttggttggctaggaaagagaacagataaacagacaatatcaagcaaatacacaccagtccatcttaggcctagatggtacccacggtggaataagaatgtta

SEQ ID NO: 98447 - DNA, 685 bp, Homo sapiens
agggtgcgcacttggccggcgagctccccagctggcggcggcggcggctgtgagctggccgcttggtttggagtcggaactcaatccccagaactggatctttaggttccacgttggcggccctggatctagggacgcaactcttggggtcctcccactgcgccgcctggggagcctgctcctgcttcctttcccggctagctggccccgtcctctgaggccgtgcgaattcccgccaccctccctcaccccggagccctgcccttcccgccctatgtggccaaggcttccaggtgcgggcctcgctccacaactcaggaggcaggatcagcggctccattttacaggacagatgtcccacggcttgcagatggctgggccccaggagacggtgctagcccttcctctgagagaaggggtgcaggctgccgccaccgcgcccatcctcctgtacaacctggaggatggcttgtcagaccatcccctggaccaggggccccgctgccctgcccggcggccctgcagccctgcctcggctccagctcccacatcgccaaagaagcccaagatgcaggcacctggggaaacgtttcccactgactggagccccccgcccgtggaattcctcaacccgagggtgctgcaggccagtcgggaggccccggcccagaggtgggtgggtgtg

SEQ ID NO: 98448 - DNA, 215 bp, Homo sapiens
tattgtgctttagtaaatcaagtctcagaatggaattggttccaaataatttgcagggggttcatttcatttcaatttcaaggtggtgaaaaaaaatcactccagaaattctccatgacctcttttttttcttcaaaacacccatctcctccacctatccccttcacccctctttccctctaggtctcgactcctagccgatggctggcccctgg

SEQ ID NO: 98449 - DNA, 120 bp, Homo sapiens
tggggatcagaggagcttcctggagagggacacttcctggagttaggtctggaaggaagagcaggaagataaaggggcgagatggagcagggaggatgttccaggcagagggttcaccac

SEQ ID NO: 98450 - DNA, 362 bp, Homo sapiens
tgcccctggacaagcctatctgaggcttcccttaagtgtgaaatgggtcttcaggggttttaagacactctaccccaagtaagcttatcaagatctgaacatctcaagtgtcccctctcctgggttggtgtgtgtgtgtgtgtgtatactctacttagtgtcccagcatcaggaaccaataagattattacagagttctagttttgagagctagaaagacacccattttcagtattgctagtaagattgtggtagaagtggaaggcatctaagtcatctcttggaattatcacacaaaagtgttaatcaccatggtgtgttccaatgttgactataaaatctcaggagcatcttctcttatc

SEQ ID NO: 98451 - DNA, 418 bp, Homo sapiens
tgataatcactatatgggttatgtcactggccttcacaacatttatctagggaaaatacttttattatcactactttataacagggaatgtgcagcccagaaaagcaaccttccccgcatcacctagctaggaagtggcagggctatgatttcagagtctataactttagaaaaaaaatagttttacagacaaagaaactgaagtgacttgacccagtgaagttagcagagaaggtgccaaaaaacagaggcctttcctagtcattcaacttagtatcctgaccccaatatgtcatcactgctagctggggatgttttaatgccaaataaagaagacgctccatctttgacactcagggaattaaagggtttgaaggcagctttatcagcatcagacactttcttcagcagtaattac

SEQ ID NO: 98452 - DNA, 275 bp, Homo sapiens
gtgtcaactgccccagaagcacagttcagggtccttcgctgagcatgcacctgcactcctgtgagatggagatgtcagaaaaatagcctcatgtagaaggaagatggggaatgtggaagggatgtggcagaggaagcctgggggagcagtccagcatctcaggccaccatgagcagcatggcctcagctgggccccctctgccctcccatcccatcacctccactaggaacattgcttagagcccgccacatgtccccatttcaggatgacccta

SEQ ID NO: 98453 - DNA, 1284 bp, Homo sapiens
tgacttctgccatacagagcaaggtctccacactcctttctcctgtaataattttccatttgaaaattttccttgcaattctcacacctttattatttcatataaattttacaatcaatttttttcttgtctagataaccatgccatttggattaaaattgcattacattgcaacttttgagaaactatgggaggagaattggcaaccttataatattgaatttgctcattaaggaacatagtttctctgtttatttaggtgttatatttttcataacatacatgttggtatttctacccaggcttttctctttgttttgtcatgtaacccatgaatgagactgcactgtctgtgtgattgggcagttgcccaaagtttaaggtgttaacatgcattaattcacttaatcactcctcatttcctccttccctcaacccctgacaaccatgaatctgccttctgtctctagatttgcctattctggacattttatatagatgtgtcatccaatatctggtcttttctgactggcttctttcacgtagcaggattctacggtttattgaggttcattcattgtgtggcctgtatcagtgcttcattcctgtttatggctgaataatgttccactgtatgtacatatgtatgtataccacactttgtatatccatttatttactggaggatatctgggttattgacagtatatttcaggagtccccaagatcatcctcccccttgatctactgctctttgtatcttatatgacctgtgcagaactatttatctggaaattaggtgatggttaactaaatatagttcttctaaagactcattttccgttggtattacatcctgaggagactttaactcaatctcccaatacatttgatcatcaatatcagtattaccacatgacttatttgcatgaggtaatcaaatctaaccagccatgccagtgttacccatattgcatgttgtggtagtagatgcagccccccaaaataaaagtcaaaagatgctggcacattcctgaggttcttctcagccactaacaattggtgtagttcatcatcacctggaatgaccaaaatgtctcccatggaaatgcggctcagctgtgtaggcttccatttaactttgtcaggttccgaggcagggctggcttgagtggtcttgtttccactttggctatgatgaataatgctgctgtgaacattcaggtatacgtttttgtgtggtttcatttcttttaagtatataccttggagtgtaattactgg

SEQ ID NO: 98454 - DNA, 674 bp, Homo sapiens
tggggcaggagctggagaagctcgacatcctgcagtgggtgagacagttgtgcacagtgaagaattgtctcacctcctgcatggctttccaataaacagatgatctgagcttggaacgaactcccctttacaaacatcaacaaagtggtttggagtagtatgaaatatttgtattcacttaaagtggaaagacaatctgcacacctggaggagatatttgcaacatttacaactggcaaaggtttattaccaagaatatataaagaagtcttataaatcaacaagaaagaagaaaaacaacagaaagaaatggacaaaagaaaaagcattttataaaagaagaaatgctcatggccagcaaacatatggagatgttcaaactcatgtgaaatgtaaatcaagacccaataagataagcttttatgtccactaaaatggcaaaatgttaatagctagacaatccaagtattggagaacatacagatccatgggatctcttacatatcgcttataagggtacgcattaggacataggacactcacttagaaaaagtgtggcattatcttgcaaaatcaaacactcacataggctgctgtgcaggtcctgagtctgtttgccctcagatccactctttgctatgcccttatgtcctcagttttccagcaggatctcg

SEQ ID NO: 98455 - DNA, 261 bp, Homo sapiens
aagaatcgagctcggtacctgcatgctctctctgctgtcactcccagaccttattaccccaacagcctgaacaatcccaacagcctcctaactccacaccctgcccccagtttcccccactcaaatctgtgctcacacaaatgccatattcctgttgtgtcaacagccaaaatcactgatgtctctgcacttacatcatctccccgcacctttgtgtggcctctcctccactcaggatgcccttcccatcctcctcacctg

SEQ ID NO: 98456 - DNA, 416 bp, Homo sapiens
tgcacatttgagagagagaactatgggagaagagagagagggtgtgtgtttgtgtacacatacgttttctgcacatggcatgaagaaatgtgaggggccgctgccttgcatggaaggccagcccttgtcacattattctaatggggagccctaaactagcctgctgaactgtttggagaggaccttgacgcaggcagtctggagggaactgtaggtttccccgttaagaagaattgtaaagcagcccttatgggatgggcaggagtgacctggggccaaaagcccagcagaacaagcagcccgaatggggctaagagagaaccctctcctcattacccccacacagtgattagcgcggagcagcttgttcccccccaccgggccggctgcccgaactctgctgtgcaccatgagcc

SEQ ID NO: 98457 - DNA, 1851 bp, Homo sapiens
aaaacatatggaaattctcttttgatcaaaaggagtgtctcccaattagtttacgtgtgttagtattgctgacatattattatcatcacaaaattccttttatatctagatggtatcaaataagaaaaaaatgcatcatttggtcaattgcttattgaagatcccagctgaagcctttctttggtaaagagcgcagaaagagaccatagctattcttggatgagaaccttgcctctactaaatagtttctgcttttcctctctgtagccagacagctcaatagcctagggagagtcgatgaaggatatgcaaattacatttttcccattctcagaacaaagacagcaaccaatgagccagaggtttcttctctctttgaaaccaaatagcacgctgaatttagggctatgacaaaaatgttgttaaagcaagagcaaaatcatccttcctatgggattcttttctcagtgtttacttaattctttttgcagtttgggattgggagtttctagtaatgataattaatgccattttacatgatagcttcaatgcagaaatggtgtgagcctgagttacaaatgacatgactagggatacaaacttcgtctgtactaacatcctaccaagcagattggaaacaaatactactaccactaatattctgatgtaattaataacatctaatagaaaaatagaaacatcgtgcttagcatgaaaccattgcacaatataaacctgctcccaaatggcaaggatttttgctaccaatatttgttcttaattctccagttattttaagtaaataagtttcacatctaactacctcagctactgttgttttatttagaaacatgaaaccatgcactttgtaatcaataagtcttttgtttaacatttcaaaaggatatttggtgcaaagcaattttcaaaaatttgtacatgatatacaccacccaacctcaggaggttgtacttaattttgtttgtttgtttctaaggttggttttgggtaaaatcctcatttccactcaacatcaagataagctgctctatatttgcttaatttgccttaaacattttgtgctcctttccctgttcaatttttttgttttgttttaaatctatctctgaaaaaaaaatggaacaggtggcaggtgaacagcaaatggaagagaatggaccagtaatttctcagtcccctgttgtcaactatctgcatgacattctgattgtgcaaaaatgccattcctgtgcttccccctccattacagaataaggtccgagagaccccacgagtgtgcgtagggaacggtgtagacatttcccccagtatgagcacagtgcctggacctgaatgatcatcttggcagttcttgtgcttttactttgtaaacattgtacaaatgtatttggaattttatttgaaatggagacttaaactagttattaaatttgtttccttcctgtaaatatatatattcaaattccatgtatccaaacatccctttagcgttcagattgtaagtgtgtctttattcgcgggaggccactgtcagcaggcagtgacccccagtgccctagtttgaagcacagtgtgtggagtatttgatgtactacagtaccatagttattttggtctgttaagtaagttgcaatttgtgatgaaatgaagtggaaagtagtacttcataatgaacaaatttccttggttacatggtttttcttgtaaaacttaaagaaaaaaaaagaaaacttgaaattttatatatttggattttgtagttttttttttttatttaatgcaacacaaggtaccaaaatcattaaataaagtacactgtggtcatttta

SEQ ID NO: 98458 - DNA, 444 bp, Homo sapiens
cagtgtctccaatcctatccccctgttagctccagtgcttataagaagaccaagtgctttcccttggcctgggttgctcaggtctccagtggaaagatattctttcagatactgtgtactgatgaaactgctgactcagctggtctgaaggaccccactggcactggctggtctgaaggaccctgctgatcacaacttgcctgaaggaccctactgacatcagctgttgtccaaaggacgccacaagaaactgactcaccaaaaaatgcatcctgatgatttcatcccccttaacccgaccaatcaacaaccccaaatctacacagcccctttccctccatgattcctacaaaactccagcccagaactcctcagggagatggatttgaaggtctcctcccttctacttgcttgatgccctattattattaaactctttgctac

SEQ ID NO: 98459 - DNA, 255 bp, Homo sapiens
acaaaaattaacttaaaatagaacaacgatctaaacgtaacgacctaaaactatgaattataggaaaaaaacatagacaaaaatgtatgtaacactggatctggcaacaatttattggatatgacaccaaaagcacagacaacagaatgacaaattgaacagaacagaggcctcagaaataatgccacacatctacaaccatctgatttgacaaacctgacaaaaaacaagcagtgagggaatggattccctatt

SEQ ID NO: 98460 - DNA, 619 bp, Homo sapiens
actctagaggataaaactacgtcaagtgagcccatggtattgtttcacacagtctaacaacaaagttgagtaggtccaacagggactggaaggcctgcaaagctgaaaatgtttattagttggccacttacagaaaaatgttgctggccccttatttaggaaatcccaccagacacgcatatcttggtctctccacctctttttctccatccctttgcctttttctccttccttccactctccatattgatggctacagttctgtgctttgggaagaagttctacctggaaataccagacacccctccaaaatagtcccattctccttacaaagagccaaaatcttaggaaagacaaagtacttccaaactatatgtcaaatctctttcataatggatcctattgctgaaaatgggatttgagctgatttagtttggagctcagaatgttttgaagggaaagaaaatattagaagacagaacaaatatttcttgggcatctttgggtaagacccagcaccttccactgggtgcttactctgtgaggcaggtgtcaacagctccattttatgcaaagggaagcacccacaggttaaaatccacccagggccacatggaag

SEQ ID NO: 98461 - DNA, 403 bp, Homo sapiens
tctatctctagttctgctcttataattatccccttccttccattttcttcgagtttattctgttatttcttaaagttgtgtgtttagtttattaattttcagccatgtttttcttgtctttaaaaacatttaaggcagtaaatttccttcaaagcactgctttctgtatcccacaagttttgatatataacatttttattattattcagttcaaaaatatttaaatttttattgtagtttcttctttgactcattatttaaaagatatgttcttgccaggcatggtggctcgcacctgtaatcccaacacttttggagggtgaggctggaggatcatttaagcccagaagtttgagaccagcctgggcaaaatagtgagaccccatctctactaaaaaaataa

SEQ ID NO: 98462 - DNA, 309 bp, Homo sapiens
taatagagatgaggttttaccatgttggcaaggttagtctcaaactcctgacctcaggtgatctaccagcctcagcctcccaaagtgctgggattacaggcatgagccaccacgcccggccagaatgacaattcttaaacctacaatgacaacaccctatcccatgatgtctccattttcttgcacgggaactacaatgagaacagtgaccatctctatgtcctaccaagaaatagtcctgttcagtggacagcattatcagccttataaaaatatgaagctggaaagagacaccagtttttagctacc

SEQ ID NO: 98463 - DNA, 501 bp, Homo sapiens
gtcttgctatgttgaccaagctggtctcaaactcctggcctcaagcaatcctcccatcttggcctcccaaagctgggattacaggcgtgacacacatgcctggccctttttttcacaattttaatgtatgtatttttagatctcttggaaattggcctattctccgtagttctaaggagatgaattctgtttgttgcacctgtttctcatggcattttttttccttcaggtgctttgtaaattccactcatcttccgtatttgaccaaaggagcccttggctaatggagatgtccctatggggcaggtcatgtgaatttgcaaagaaccactctgcacagcataagcctataattctaattctaatttatctcaggggactctttgggtccaacagccaagggcagcaagccagctttactagttttactagtctgcttttcaagaacaagttgacagcatttctagtccctggctttctgcaggaaacacagtttcagcg

SEQ ID NO: 98464 - DNA, 325 bp, Homo sapiens
tacagctaggattcctttccagtggcatgctgagcacaggctatggagcagtgttgaaaatgcagtagaatggacctcactatccatggagcctcggacgccctctacagacaagctccccaagctgtggccggaaaaggcagcagaaatacacatgcagaccctttctgggtcatcgtcagggcaaactcatgtgtcccatggaacagatacctccttgcatacaaaatacaggcgagcacctacatgataataagcacattattcaccactatttctgcaagctgctctaaaatcagaggctttggggaataagaaggcaaaa

SEQ ID NO: 98465 - DNA, 285 bp, Homo sapiens
tgctgggattacaggcatgagccaccgtgcccagcttggacatgtgcttttatcttatttccacctaggagtggaaatgctaggtcatatggtgcgcatatatttataagaaactgcctaactcttttccaaagttgctgtattactgtacatttctaccacagatgtttgagagttttagttgctccacattttcataaacacttgatattgtcagtctttttaattttagccattctagtcatagtatttcattatggtttaaatttgcatttctatgatgac

SEQ ID NO: 98466 - DNA, 115 bp, Homo sapiens
tattcagaaagaaatttgataagatttaaagcctacttatgattttttccctcttaactaattaagactggaagaaactttctcaactagtaaatttcatataccaaaagcttac

SEQ ID NO: 98467 - DNA, 783 bp, Homo sapiens
ggtcctatcatcatcatagcgaactcgcctaatctgtaccacattcgggtctcaactcctccagactagctctgcttcttgaagtttcgagaggcttccagaggccagaattcagggagctctgaggcttccatgtaagtttctgggcatccactcgtcgctgttcctcggtgtggtgctgtcgggtctgcagagggcttcctgtcactgtctctcttgcactggttcttggcacagccccagcagcctcatcaccctccactttccagccttgggagcatgggcttggagacttatggagagtcacatggtgagtccagtgaataacagctggtgccagagcccagagctggacgtgcagccccttggccaggggcttttccctcggtttcccactcctggccttcatggagggtcctgtacatgcctttcttgcacacccctggctctgagctccagacatgcctagtatagcccagggccagaggaggcccaaaatgccacaggtgtgttttgtcctaaaataatttggattgatagcagcatttaaaaatcaagagatttttgtgttgattgctccatttctggctcattttaatgggatatcaggcaccacagggtggcattctcatataggggcaggggctgagctgagcagggctgtccttcagacagagcctgtgccttcctgcgaaccacctgctaccttcactcatttacagaacctgccaggccagaagacttctgtatttgcggctctattcttgggcttcggctgtgttg

SEQ ID NO: 98468 - DNA, 490 bp, Homo sapiens
tatattctcaatcactttagagtttcaattaggtgaattattatcaatggttattatcaaatccactgttgtcaggctacctgacaagcataaatataggtagagttaattttaaaattctttagatggaaacctttgaactaaaggtttaatgaatcttcaaatgaaagttgaataacttttcaactgattaaagcctatggggcccagtgtggtggctcacgcctgtaatcccagcactttgggaggccaaggcgggtggattgcctgagctcagaagtttgagaccagcctgggcaacatggtgaaaccctgtctctactaacaacaatacaaaaaattagccgggcatggcagcatgcgcctgtaatcccagctacctgggaggctgaggcaggagaattgctagaacccaggaggcagaggttgcagtgagctgagatcgcgccactgcactccagcctgggcgaatgagagagactccatctca

SEQ ID NO: 98469 - DNA, 906 bp, Homo sapiens
gactgtcctgaccgggtcctggcagagatcagcacgctggccaagatgtcctctgtgaagttgcagctgctctgcagccaggtactaaaggagctgctgggacagggaattgattataagaagatcctgaaactcacagctgatgccaagtttgagtcaggcgatgtgaaggccacagtggcagtgctgagtttcatcctctccggtgcggccaagcacagtgtcgatggcaaatccttggccagtgaactgcagcagctggggctgcccaagagaagccaccggcgggccggcctggtgcccgtggtattaagagaagcgacaaggcccttgtgagaaacgcatctgtgcggtgtcgtgcagtctacgcagtgaatagggttgggcaggtgtgggctggcgggtggactacacccttgagctccagcctgctgcaatccgtggaagagcccatggtgcacctgcggctggaggtggcagctgccccagggacccccagcccagcctgttgccatgtccctctcagcagacaagttccaggtcctcctggcagaactgaagcaggcccagaccctgatgagctccctgggctgaggagaagggtgttccaggacctgtgtggagcgacctgcccgtatggagtcacgccctctgaactgctcttcgggaggcagcctggttctaggatgctgaggccctggcccggactctggcctccagatccccagctgcctcacttctctcttgagaacttggtcagggctcctgaggacctttcccaggcatctacctatccctgtccttggaaaggccacttgttggcctgtttccataacgcaggcacacattaaccagcaagtataaagggacgacgaaagacaaaaatcgaagggacactagtacagg

SEQ ID NO: 98470 - DNA, 383 bp, Homo sapiens
tacagatacgaatcgagccggtacccaaagttaatgaaaaatgattccttaaaaaaaaaaaaaaaccaagggactaaaatgagataaggctcaggtatcaaaaaacaattttaaaaacataaaccaagattgtcttattgtaagtgctatgaatatgaatactggaataacatttgtttgggggaatcaagataccttgagataatacttctactccattaaatactaaatatgtgtgtgtgtgtgtgtgtgtgtgtgtgtatatatatatatattttttttttttttttttttttttttgggggccccgggcgtgtgcacgagaaaaccagaggggggaaactggaaggggggggggcgcgccaaatgggggggaatttccc

SEQ ID NO: 98471 - DNA, 292 bp, Homo sapiens
tagctgggattgtcctcgcgggggatgctggaaggggagcgggatttaagacaatccggcggcatccttggctggctggctggcggccggggtccttgcccatcacttggaacctgcagaggggccccctgtctgcaattctgttcctgcttccatcacggggctctgagtgagggttttggctggtggaggtcttaggtgggaactgccctggccctggacgaaccgcaccaccataaggccccttcaccctacaccgttggcccctgctgcctctccacctcatcctctc

SEQ ID NO: 98472 - DNA, 168 bp, Homo sapiens
atgacctgaaatttgatgtaattgaagaagatctttaagatcttttaaaattaagattaaaagcattttaacaaaatggaaaatgttaattcaaatgattattttgaaataacttttgctttaaatataaaattaatgtatgctctaaacagaaaacatggtaaacgg

SEQ ID NO: 98473 - DNA, 543 bp, Homo sapiens
cctgcgttgaagcatctccagggcagcccttcctcccgcccagccccagtttagggggatactgacccctcccccgacccgtagccccctcttgaggggctccccaggcgtcgggccataggaggtggggagcttctttccttagcttacctgcctttggtgagccttaaggaaaccgctatgactgtcctctggcctgtccattctagttgtgggagagaggtaccctaagttccgctccccctgcttccagaatcggaggatctttgctaggtgtgaaggaacctgtccctcttctcttttagaagtgacagggagtgctgtctgtcgccgttttccttcctcctgtcccacaaaaccagttgtcccctctagccctagaggaatatctcgatttcctttgggggaggggggtcgtctgggtgagaccgttccacacgcacagaagtgtgtgtgcgctcccgcaactccttacttcctctctttcctcaagccagagaaccaaccaggacctcagctgagtttaaagtcacttactagaaa

SEQ ID NO: 98474 - DNA, 447 bp, Homo sapiens
caggtgaaactcaaatgctaatgggggcagttggtaggataggacatacaaggtggggaggcagagagggaaggttattttccagtgctcatgtgagtgggaactgataagggactccatggggaaaatgaagaaacgctttgtatattcctctgaactctagttaggcctaacctgctaaaagtcagactttgtttctgataacgggctgtaccttcatgcccttgtaggtgtaatggccataacgaggggttagagactttgtcctgaatttttaaatgctgatgtaggcatgggaaccaagactttttggccaacatggacccgaagatccatggaggggagccagcttggtattgctgagcgcttgctatgtactggcattgctgagcacctgctgtttgctgcccttacatcatgctgtggaggcatggaaaacagtctgcc

SEQ ID NO: 98475 - DNA, 461 bp, Homo sapiens
tgtgagacagagtctctctctgtcagccaggctggagtgcagtggtacgatctcagctcactgcaacttccacctcctgcgctcaagcaattctcctgcctcagcctcccgaacagctgggattacaggcgtgtgccatcacgcccagctaatttttgtatttttagtagagacggggtttcaccatgttggccaggctggtctcaaactcctgacctcaggtaatccgcccaccttggccttcgaaagtgctgggattacaggcatgagccaccgcgcccggccaaccttaagttttaaaaatgcacaggaattgttagcagtgattacatatttggatagtgcaataccagtgggtattatcttttttgttctttctacttttctggtgttccccaaaactttgtttagtgaacatcctttaaattaaaaaagaaaggaaacacattattcagagatat

SEQ ID NO: 98476 - DNA, 353 bp, Homo sapiens
cagcttatgtcttaccttctcagagaaacattctatcacttgttcctcattctcatttaaaatagcacgtttcttctctagcacatcctgtctcgtcaaactgctttattttattcattgcattcatcactatctgaaatgaccatatgtatgtttccctattaattgcctctccttacttgaatataagccctttaaagggcagggattctttctgtattgtttactgttatttatgagatggaaggataaaaagctgatgaataggaagaggggggaaaataaagcatactttctttgggctccaggtttatgtgggggtggtggtagatagtagacctatcggttccaaa

SEQ ID NO: 98477 - DNA, 584 bp, Homo sapiens
cggtcctgcatttactccatggccagtgatgatgagcattttttcatgtgtctgttggctgcataaatgtcttcttttgagaagcgtcttcttttgagaagtgtctgttcattccttggcagacctgggattgttttcgttcttttctgcgactcagttttcccagcagataaggggtggggtcataacttcactcatcaggggaagtaagatgacttgggagataattgcttgataagcacaagcctagagcaaaaaggacagtaatgagcactgtctcgctatctccctatgcgcgcaagagcatcacaagaccagggcgagagggaggaccagggtgagaaacaggttgtggctaaacgtggaccaaaattgagcaccggcctacagttttcaggttaacgcttttatgtccaggaggccagcagcttcagtcttccattcccaggggactgactgggcctccctggggttggggtggaaggagggaaggtatcacctttgtacttttttttttttttttttgagagggagtctcgctctgtcgcccaggctggagtgcagtggcgcaatctccgctcact

SEQ ID NO: 98478 - DNA, 574 bp, Homo sapiens
tcagcttgaagctcagggctgctgtccagccctgtccactcccctgtcaagggattgtatcatcattgcgaaacaagcatataatcttctacgacttccaagtacatacataatggcacaaaggaattatagtttttcagagctcttccctgaaaccagatgccatgacaagttgctttaaggcaagttacttgccaggcttggtggtgtgcacctgtagtcccagctactctggaggctgaggcaggagaatcacttgaacccaggaggcagaggttgcagtgagccgagatcacgccactacactccagcctgggcagcagagcaagactcaaacaataaataaataaataaatgactcatgaatactgccattgttccagatagcagcagaatccttttctgggaataattatttggtgatttttatggaggatacaatttgctggcatcctagtgaaactgtactcatttttaaaatgtttagtatacaatataaaagactaagatttgaaagactgaaaattgtacatcgttcagaggttatcagtgttcattaaaatgtcactaattt

SEQ ID NO: 98479 - DNA, 353 bp, Homo sapiens
tcagggactggactggcagagaggagtaggagggactcaggttgggggaggcaagaaaaggtgatacaagccttgaatttggctaaaaggtctcagcctagaatggggatgggtcaatgaagcatgatagaaagactatgagaaaatggtattgaatagggaacaagtaagaggtctggtggcacatggacgcgagatgaatctgtcaatccccacaactgagactgaggcaaggccgagtaggtggccctggtattgattaaaaaggagatcggcagctgggcgcagtggctcacgcctgtaatcccagcactttgggaggctgagacgggcggatcatgaggtcaggagat

SEQ ID NO: 98480 - DNA, 249 bp, Homo sapiens
tgaaactatctgggcctggagatttctttttcagaaggttgtggttaaagttttaatctctttaatagttatacaatggttcctatgatctatttcactttgaatgaattttgatagtgtgtggttttcaaggaattgttaaattaagtcaaagttgtcaatttatgcatggagggttgttcattgcaacaacactaatcctttaagcatctgaacatctgtagtaaaatcttctgtttcatttttgtt

SEQ ID NO: 98481 - DNA, 699 bp, Homo sapiens
ggtgagtcccgggaggcgaagccgcggctgctcatagcggttcacttatgtgcagtttggatctggctttcttggttttatagtcatgacgtttgctctgcagctagagaaaggatgtctttgccagaagaattacattttgagcacattccctttcatgggcagagggattcaccaaacgtagaggggcagttttaaaaaaatttcagaggtgttttcttcctctaaagacagcttaaacaacaaaatggtgcgggctccctcatcatgagctggtatgtgttgtgatggtgtacacatcagaaccagctgggtgaggagtagccattagggggctggctcttgtgctctgttcaagttgcatttgtttttgtcttgataatagcgaggagaacagggtgaaatggcatggagggagggtgtcccttataaaggccagggaagggctgagcgcctgtgtaaagagagggcttccttgcctgccttttgactccagagggaaagagatgtgccgtgcctcttgctttagtgtaaggacagaacttccctgttcactagtcagtggagctactttacccaaaaaggtgggttctgtttaagcaggcacagcctgtgggcaatcattttcttgccaagttttgacctctggtgcttagtcacacacaagcagcatgggtgtttttagaattaggtgctgtg

SEQ ID NO: 98482 - DNA, 988 bp, Homo sapiens
ctagttcacatcaaactgggtttcccttgcccgggcctccaggtcccaaggtgctgtctttgcacctgcactccactgtccacatcagactgggtttccctcgcccgggcctccaggccccagggcactgtctctgcacgtgcactgccctgttcgcatcagactgggtttccctttcccggcactccaggccccagggcactgtctttacacctgcactgccctgtctgcatctcttctgtctttctgtgcctcttgcccttagagctccttgtctgtctttcagtgcatataccagaatgtctgtatgtctatgtgaaatctttttgtgggaatgcctgaatttttacgtatgtgactttctggtgtcatccctaaggccaagagtgttaagagttggggtgagagatggtagagttttttatgtttggctctccacattatataggttctaggatatgtccctgaaactacaacgtagctcatacatgggcatttttataagactaagtgtttttatgggtggacctcctgattctctgccatgagctaggcctgagattttacagacctaggactaactgcagtcacctggacaccagagatctgtaactgtcaaccgtaaagagagagagtatatttgcttctttggggttgaaaccatactgacgtaatataaacagaatttggtcagcaccatcaggcaaacatagtctgctcgataaggaaactgtgagagtcaaatggaacttttgaagaatctagaccaagctgaacttccctgccatattcacccctgcctcacgcctctccctgttcacccctggctggctggctgcatcctggggaatgcttctgctccatcggggtacccttcctcctctgcatctcctcaagagaagtgtaaccaagacacatagaagaagcacagactaacacaccttcccccatagtacatcatctccaccctccacagcctcatgttatg

SEQ ID NO: 98483 - DNA, 337 bp, Homo sapiens
acagagagcttgcagtttcagttctgtaaactaagtcacaggtcaagaacagatagaaatacaaacattcacttatccagatctcaaaggatgtgcttagttccaggaagcacaaaatattttcttagttacttgagctcacaaatggtcaaacaaactgaaaagactaacagaattatctctcatttctcacccaagagagtatatcccatcgttctagtaaagatcaccaaatgatcacactatgcagccagagtcccatcattgcagtcaccagtggcaaatgactattggtcatgcttaaatcagaactatggctaaatctgtccaagggcca

SEQ ID NO: 98484 - DNA, 167 bp, Homo sapiens
atttatgttgtgtgaaggtcacgaccaccttaccatatcaagctgaaaatgttaccactatctggacaattggacatgtttcactgggactatattttttctttctgtgtgtgctatgaaggcactggttggctgggttcagtaataaatatgtgaggtctttcgtt

SEQ ID NO: 98485 - DNA, 446 bp, Homo sapiens
tgtatacaatgggatattggtacatatgtacaaagggacattattcagctttaagtgttcatcaagagatggatggatgaagactgtgaaacatgtatacaatgggatattggtacatatgtacaaagggacattattcagctttaagaaagaagaaaattttgccatttgtgacaacatagatgaatctgaaggacattattctaagtgaaacaagacagacacagaaagacacatactgggtaatcacatttatatatagaatctaaaaaggcagaactcatagaaacagaggggataatggtggtttctaggacctggggatgggcatagaagaaatgcagagatgttgaccagagtacaaactttcagttataagatgaacaaggtctggggatctaatgtacagcataggtgtgcaggacagttctctcagtggccttgga

SEQ ID NO: 98486 - DNA, 787 bp, Homo sapiens
ccttgatagtcctgtgacaggcttctagccaagatagactatggaggataaaggggggttatgcatcacttaaaccccactttgtcctcagtcagtgctttcaaatgcccttgctgggtcccataactagccacttactggaaggaaagcaggggttataggccaataaggtgacctggcgttggaattctgaggagaccactgacatttcaatgccccactggccctgttatcacctcttatgccaatgagagacaaaggagcaggagagagagaggggaggaaagaagggtgaaaagggacagaggaaatgtcttaaggtgaaacagatattccaggaatacactcctccctcatccatttgctactttccttcagtactttacaagaaagtaaatattgtgaggagccagatcccagggaaggcacagaaaggaatcctacattaggctgaagcagtatttttggtgctctgctggcatactgaattcttaggatgctactgtggagccaacatcacgctggtcgtttgtattcaagttatggtgatgaagacagtccccgtgtctcaaatctctatgtccaagttattaaattcaggagactggacgcttaccttaaatgaagcaaggtaggaggcagatgactacttaccaagaccatcatttgcataaaggagtcaaagaatcaccgtgtatcagtcagaccacaggctggttgtctctctaaccaagtaacctgatgctattaatacaatgacaactagggatatttagggaaagaaacg

SEQ ID NO: 98487 - DNA, 880 bp, Homo sapiens
ccacctcggctgcccaaagtgctggaattacaggcatgagccactgtgcccaaccttaagtgaatgtttaatcatacacttcccagccatctcttgaaatttatttagggttgccagaaaagatttccacaatggcttatggacctcagatgaaatgtatttcctcaactcttgccttattctctaattggaaggaaattgcttaatcccatataaatgtaaatgctattaacacccatggatatcctaggataaaaaggaactttggctggtagcagtctactttttattaaggtagcagtcatttaccaaacatcagtaaaccagtgagtgggcctttggtgggcctgcaggccctgggcaggagccaggccacagtggcagatgtgctctggggcttggggatgccccggctcctttctccacttgcacctcctcatgtgcctgcccattgtgaattagtcaacactgctttccagctgcattacgagcctttattgactttgcttttcatccctttgacccactttgacaatgtcattagctagggcagccttttcaaaatcaagatctattattttcatttttaaaaagtcattcaagtatgcattgcatgaatgcactttaataaaccaagcctactcattctcatacttctgttttatcctctaaagataaattttctcccaatgctggttttagtgaggaatgaaattttttgtgccaagagtggaaaggaagacctttctatttttctagaaactcagattttactttttcttcaaacatctaatttcaccgcttttcaacaaggacatctgcgatttggtggtgtatctagatgatatctacaatgcttcacatccaagaaaatcagacc

SEQ ID NO: 98488 - DNA, 573 bp, Homo sapiens
gctgacatggagaccgtaatctgcattacgctagaatgcaccaagaacaaacttccagaattccatgccctgtggtttccaggagggggttatcccccatcccaaacacgaaatggctctagagtcagaaaattgcccccacctgggaacagagctgccaacatgttaataccagaaaacccacttctgccagcatagacgcgtccttttgcagtaaacagcaaagcagagaagggatattactgttttagaaaaaagctgcagtcaaacacctcatttttagtatctcagttgcagcagagtagaaataacgtgaatatagctccatccagcagtggaaactgacccatggggagccggcggggagtagggaaggggcccaggaagaaggggcaggtgtgagggaggctgtgcatcctcaagggctacactgtgcttttggttcccactgtgtgttccgaggcaagagcataccctgaaagcaacagccaagcgcgtggagcccaaacccaccagcctgagcactcagtccctctgccaagcccacctgggtgcaacctaggcacggggagg

SEQ ID NO: 98489 - DNA, 567 bp, Homo sapiens
agacagagtctcgctctgttgcccaggctggagtgcagtggcactatcttggctcactgcaaacttctcctcccgggttcacagcattctcctgcctcagccttctgagtagctgggactacaggtgcctgccaccacgcccggctcattttttgtatttttagtagagacagggtttcaccatgttagccaggatggtctcaatcttctgacctcatgatcctccagcctcggcctcccaaagtgctgggattacaggcgtgagccactgtgcctggctggtatgccaaactcttaagatccttgtatagtgtgaggaattcatattgcacattttgaatacatctattccatgttagtattattattcccatttttagatagtaaaactctttttatagaatgcttggaggggtttatccattggttggtggaagtatagcatagccgcagttactgtggtgatgcatcattaagcatttttggaacctaatacagccctaaggttaagaggagaaatacagtatctaatatgaactttgccttcaagaagtttataaaatttct

SEQ ID NO: 98490 - DNA, 191 bp, Homo sapiens
ggttgtagcatatcactgcagacctcaaagacatgcactgtcagatgtcaaggacaccagggtcaagcaaaatgaagagctatgacaattcccaggataattatgctccccaaattcctgttactaaggaagctcaaatatccaatgtgggaaatcaagaggaacatgatataaaaactagccttatctgt

SEQ ID NO: 98491 - DNA, 442 bp, Homo sapiens
ataataggatgactcgactgatttcagatgtgcattcccacaaaaaagttacaaattgagggagagggcatcccttccttgtgtccttttttcagaaaacttctttaaaagttgtggttaaacaaccataacataaaatgtactgtcttggctgggcatggtgtctcatgcctgtaatcccagcactttgggaggctgagacaaggtggatcacttgagtcaggagtttgagattggcctggccaacatggtgaaacctcgtctctactaaaaatacagaaattagccaggtgttggggtggacgcctgtggtcccagctacttgggaggctgaggcatgagaaccgcttgaacccaggaggcggaggttgcagggagccgagagtgcaccactgcactccagcctgggtgacagagcaagactccatctcaaaaaaaaaaa

SEQ ID NO: 98492 - DNA, 249 bp, Homo sapiens
agggagactggaccattacagccaaaagatcctgaggagacacaaccactagctgaaatatggcattgtggaagaaatcctggaacaaaaaaaagacattaggtaaaaatcaaggaattctgaatcaagtatggacttcagttagtaaggtctcaattattagttgtaaaaaaaagtgcactcatgtgagatgttagtaatgagggcactgggtgcaaggtacatggaactttctaatcttctcaactt

SEQ ID NO: 98493 - DNA, 290 bp, Homo sapiens
cacactaggttgttggcctgatatttgggagaattcacacatatgctagatttgacgctgatgggtttgtttttctcaaattacaacatgtcaaattgcttttactattatcaattaattaataaatcaatactttgcatgagaagaaataactgaataagaagatattcaaaagccactataagttacgtcaacatttttcatgttttcagttaatttaattttgaccttcaaattgcaaggaaaattccactgaagttttgaaatttgaaattaaactagtaaaaccc

SEQ ID NO: 98494 - DNA, 360 bp, Homo sapiens
tcaaggaggtaggacagtggagatgaaatgtgcagacacatcttcagtgatgtgtgactgtgagagggaatggaaaattggcggctatgaagtcaaggacgtttggtgcttctcatcaatttacatgagaggtttgtttttttttttttttcaataaagtaaggttattatctcccagtttgtttttggcctttaatttcatttacaaggtttctgacatgggtctaatctattcatcttttccttccaatgcttttaaacctggaaagtctttccccatccaaagatcatataaatgtttgtgtatatttttctagttcaaaatgtttaacattaaattatttaatctatggccgggta

SEQ ID NO: 98495 - DNA, 395 bp, Homo sapiens
ctttcaagtaatggaagcatgaacatatccactattcagctttgttcctgcagatgaacaatgccatggtttgatgaacaaatgggaagaaacctgggcccctaaatgactgtatgaagacactttgcctcctgacccactcaccacagaactagtatataaaagagaaattgactttcaatatcttcaagtcattgtatttttgacattagagtgtacccacatctaaattacatgccctagcatttaattttgatcactcacttctaacttacataatactgttgtgaactactttaaagaatgtcagaaaatgtatatacttaaagacaaactcaaaattaaaaaaataaatgacaggactacaaagagaaataaacaaatgttacaccagg

SEQ ID NO: 98496 - DNA, 121 bp, Homo sapiens
gtcttaaaacaataaataactgattaagaggaaagattttcacacctactaatttatatctgtctccgttatattaagtttataagacacttgtccggtaacactaatatcagcatttcga

SEQ ID NO: 98497 - DNA, 289 bp, Homo sapiens
ttaataagcaaccgcttccacctgcacatgagaggagggcgaggctaaggagactcaagcatgtgatagcgttcagtgttggaaaaagacaggacctggtggggacggtaccaggaagaaacccggatgctgcgtcctcagcgctggccttggatacgagcttcaccgctctagcccgattcttcatttgaaaacccgtgattgtaataattccctgcacatctatcaggactgtaaatcacatgaattaaatattaggtgacaactaataaaaagatgaggcccgtcc

SEQ ID NO: 98498 - DNA, 670 bp, Homo sapiens
ccgtctcaaaaaataaataaataaataaaaaataaaacaaataaataaaagctaaagcattctaggaattacatgtctgggagctactttgctgaatctcttggaagttgttaaggaaaggcatctgagatataccagatcagaccttcatcttctgagcttcccacttgtaaactgaaattttaaattacctggaataggcctcccttctcttaactcccaatttgaaggctgcgattttaaattagatgagaatttacttaactctatttgatacatatccttatgaatgaacatttgttgactgtctactgaatgtgacaggtattgttctaagcactttatttgtaatgacttacttttacaaaacacccctatgagtaatgttctattgtccccttatttacagttgaggaaactgggtacagagagattaagtaactagtctgatgtcacaggtagtattcagctgagcctgcactcataaatatgatactgtcctgcttctcccttgctaatataggcaataaagagctttctgaaggggaagaaatattattattaaactgatttaatgaattactataattgcagtttcaataattagttttgtaaaatgcaactggtatagcagtttttgaagttttctaattttttccttctgttcact

SEQ ID NO: 98499 - DNA, 689 bp, Homo sapiens
tcccatggagagtgagaagatctgatctgtgtttcaaaggtcacttgactgccgagcagctggaggcgagttgctcctttaggagactgctgcagttgcctgggtgagaggctagaggggtctggtctatagcagtggcaggggagatggaaagaagagaatgatttgaggggcattcggggggcaaaatcaacaggacctggggggagacgaagggatcaagaatgatgcccagattctgggtgagtggcagtgctgtggtgcacaagtagtgatgttatgtttccgggtgacctgctgtttagcaggagcccagcctgtggctaagaagtatagagaactgaaactagctccctagggatgggaaaaccaagtgggctgaggataagaacagggccccagggctgggtgcagtcgctcacgcctgtaatcttagcactttgggaggccgaggtgggcggatcacttgaggtcaggagttcgaaaccagcctgatcaacacagtgaaaccccgtctctaccaaaaaatacaaaaattacccggacatggtggcacatgcctgtagttccagcgccttgggaggctgaggcatgagaatttcttgaacccgggaggtggaggttgcagtgagctgagattgccactgcactccagcctgggcaacacagtgagaccctgtctcaaaaaa

SEQ ID NO: 98500 - DNA, 734 bp, Homo sapiens
aaggacacaaaggctacaccctgcaaaagcagtcatctgtcaagaaaaggaaacccttggcagagtagcccaggctaatatgaggattaaagcggcagcggatcataaaacgcaccaatcagcactctgtcaaaacggaccaatcagctctctgtaaaatggaccaatcagcaggacgtggctggggccagataagagaataaaagcaggccacccaaaccagcagcaacaacccgcttgcgtccacttccctgctgttgaagatttgttctttcactcttcacaataaatcttgctgctgctcactctttgggtccctgccgcctttatgagctgtaacactcaccgcgaaggtctgcagcttcactcctgaagccagcgagaccacgaatccaccgagagggaccaacaactccggatggaaggaacaactccagacgcactgcctttaagagctgtaacactcacagtgaaggtctgcagcttcactcctgaagccagcgagaccacaaacccatcagaagaaagaaactccagacatgtctgaacatcagaatgaacaaactccggacacaccatctttaagaactataacaccgcgagggtccacagcttcattcttgaagtcagcgagaccaagaacccaccaattctggacacactatgacaaccactatcttggaatatggtgttaatcactactatgcatattttaatataggtatctataaaca

SEQ ID NO: 98501 - DNA, 1000 bp, Homo sapiens
tttttaaaaggcaagttgttatatgtgctggatagtttttaagtatgacataaaaattgtataaagtaaaatattaaaatacacctagaatactgtataactttaagtcattttatcaacacattgctaatccagatattttcccgcagtttttctttgaataacagagcaattaatttacttttactatgaagagtcatcattttagtatgtattttaagcaatccaccaagaactcagtaggcagctgagaggtgctgcccagagaagtggtgattagcttggccttagctcacccacacaaagcacaacaggctttgaactattccctaacagggcatttattcttttttttttttttttttgtgagacggagttcgcttgtcgcccaggctagagtgcagtggcgcgatctcggctcactgcaggctccaccccctggggttcacgccattctcctgcctcagcctcccaagtagctggggactgcaggcgcccgccaatctcgcccggctaattttttgtatttttagtagagacggggtttcaaccgtgttagccaggatagggcatttattcttgaacttgattcagagaggcacacattaccattctctaatcagaatgcaagtagcgcaaggcggtggaaactatggaattcggaggcaggtgatgcattgggcgagtttattaacatctgtgactctctagtttgaaatttatttgtaacagacaaaaatgaattaaacaaacaataaaagtataataaagaaaaaaaaaaattcactggccgtcgtttacaccgtgtgactgggaaaaccttgcgttccccacttaatggcttgagcacattcccttttgcagctgggtatagcgagagggccgaccgatgcctttcaacattgccatctgatgcaatggcaattgagcgtatttttgttccggtaattttgtaaacaactattttaaccatgggcgattggctcctttatatgttgcg

SEQ ID NO: 98502 - DNA, 247 bp, Homo sapiens
acatttcaacaaaaaatactttccctccaaaaagtgagaaaagtaacgttgttttgcattttgcaaatctcttttatgtctaacttgataaaagatggttggattctcacagttacttctgcattcagtctgttgctatatgtagctttggttaagtatataatgaaaatctagtcggaaaagggagaagtattttaataaccttttcagataactgtgtttggtaaatactaaaactcaacaaacg

SEQ ID NO: 98503 - DNA, 742 bp, Homo sapiens
atccttgctttcgtgccactgtaactgtaagcctgcttcaagctagcccaccccctttttaaagtgtgtataaaagtcaagtgctcggagtcgcttccaagatggccaaataggaacagctccagtctgcagctcccagcgagatcaacacagaagacaggtgatttctccatttccaactgaggtaccaggttcatctcattgggactggttggacagtgggtgcagcccacggagggcaagctgaagtagagcagggcgtggcctcacttaggaagcacaaggggttgggggatttcccttttctagccaagggaagctgtgacagactgtatctggagaaacggttcacgcctgaccaaatattgcactattccaacagtcttagcaactggcagaccaggagataccctccaatgcctggcttggtgggtcccacgcccacagagccttgccactgctagcacagcagtctgaaatcgacccacgatgctgcagctggacggggggaggggcatctgccattgctgaggcttgagtagctcacagtgtcaacaagcagcctggaagcatgaactgggcacattccacctcagctcagcaaggcctactgcctctacctctgggggcagggcagagtagaacaaaaggcaacagacagcttctgcagacttaaacatccctgtctgacagccctgaagagagcagtggttctctcagcacaatgtttgagatcctagaa

SEQ ID NO: 98504 - DNA, 566 bp, Homo sapiens
attcagggaagatggccatgtgcaggtggaggcagagattagagaggggctgtcccaagccgagggacacagaggatgccagacaccacgggacactgagaagggcaaggaagggtcctcccctagggccttcagagggagcacggtcctgacacctggatttctggcctccagaactgggaaggagtaaatccctgttgtatccagctgctccctttgtagtcacttttcacagcagcgctgggaacgaacgcaggcaccaatccagcttgggggccatgtggggtagcagcggatcgggacttccttctaagagaagcgatcttgagccgtgtcacgggtgaggagttaggagttagctcagtggggaaaaggtgaaggcagcactcacggtcatcaagccagcccctgtgggaagcaggctgggtttaaggatttctaacctgggctccttgaactcccagggtccccctacatgtgtgcttcaattttgcaccttttcttggggagaaacgattttggaggaccatgtggccttcacggtcacaaactggcaatgtcaagaa

SEQ ID NO: 98505 - DNA, 664 bp, Homo sapiens
gtggtgatggttgcccaacattgtaaatgcacttaatgcgactatactatatgcttaaaaaaatggatgaaatggtaagttttgtctttttttttttttgagacagggtctcactctgtcacctaggctggagtgcagtggtgcaatctcgactcactgcagcccccacctcccagattcaagcggttctcccacttcagcctcccgagtagctgggactataggtgcacaccaccatgctcattttattcattttataaaaatgggtaattcctagtccctggcccattctcccctacttatagaatgtggtattaaaatattttacccagtttgcaattatatgcttagaaaatattatcctaagaaaaaaagtaagagaagctatgctttaagaaaagatcttttggtatagaatttccacattctcgaaaaagtttccccagattaaaccgattacattttttcgacctctccacatccatacaaagttcacctagtttgtcttacttgttacccggagcataaagccattatctttatttcaaatctcaaaatgattaacagtttcagttgatagaataagaagccagtaatactatggctaacaatcttttttttccactgtgttaatcagaacactgctagagtacttcattcattc

SEQ ID NO: 98506 - DNA, 218 bp, Homo sapiens
gatttgggaaattccacctttcaatctgaaatctggggaaagtcccagaaaacaacggattactatatttctctcatgaaccagactgaagcaaggagtcaggtctaggaccaaggacctcggcactccagggagcccagggcccctcagaaaggtctcgcttggccaccgagagcgtggggccgtagcagttggcaagcgggggaggggggtcacgc

SEQ ID NO: 98507 - DNA, 298 bp, Homo sapiens
ttcgcttggctcttcttatgcactagatacagctacctgggatgcaggtgctgtttcccaaaggcaagcaagtggcagtaacctagctcttcgcggaagaagtaacgagagaaatcttcagacccagaacagggtcctctgcatatgcaggtccccaacggctctatttctcccaggtgggaaggtgaccgttcctcaggacctcccaagtgctaggcactatgctgggctcttaacatgctttccttaatttacgggccattccttccccccaatccaataatttagagaggcctca

SEQ ID NO: 98508 - DNA, 725 bp, Homo sapiens
tgtctttgctcactagattccctcagccttcaacaccttgagagcttgtttggaggccctagcaggggtgcaaagctactcatatacccttggctgaagaccagtcctcctctatcggggattgtcgtgagtgcagctttgggaaggacgcatatggagtggtgagggaggaaggggacacctgcctagccagccagatcagccgaatcaactttggcgatcaatggggtgacagatgtcacagccagatcaccctcacatccccctagccttgaacacctttccccatcttcttcacctggcactttttcttgtggcaggagatggcaggatgagattgtggtcttccatccacacagctaccccttcaccatgtgatctctgcataccagctaccttttgccttctgacatgaacggaagaagcctgcagccctcaccagaagcagatgctgatgccatgcttcttgtacagccggcagaactagctcagttgatcgtggataactgacacaaggaaggcaaaagtgggtgaaggaggcctgctgaattgggaaattgttagacaacattctacaacggctgaacagtgcttgtcatttcagtgctgtacaagaatattaatgatgtggaaagctgtccattataataaagttcagaaagaactttgcaaaataaacaaacacacaacaacgggaacagaccaaaaaaacttctcacagggta

SEQ ID NO: 98509 - DNA, 948 bp, Homo sapiens
acaaagggccacgcctgcccctgggaggggtattgggctgccgcccgcagatgttgcagtaggaactgaagaagatggcgtgcctgggcttcctcctccccgtgggcttcctcctcctcatcagcaccgtggccgggggaaagtacggcgtggcccacgtggtgtcggagaattggagcaaggactactgtatcctgttcagctccgactacatcaccctcccccgggacctgcaccacgccccactcctgcccctgtatgatggcaccaaggcaccctggtgcccgggtgaggattccccccaccaggcccagctccgctcccccagccagcggcccctccgccagaccactgccatggtcatgaggggtaactgcagcttccacacgaaaggctggctggctcagggccaaggtgcccacgggctgctcatcgtgagccgggtcagtgaccaacagtgctcagacaccaccctggcaccccaggatccccgccagcccctggcagacctcaccatccctgtggctatgctccactatgctgacatgctggacatcctcagccacactcgtggggaggccgtcgtccgcgtggccatgtacgcacccccagagcccatcatcgactacaacatgctggtcatcttcatcctggctgtgggcacagtggctgcaggcggctactgggccggcctgaccgaagccaaccggctacagcggcgccgtgcccgaagaggaggggggtctggtggtcaccatcagctgcaggaagctgcagcagctgagggagcccagaaggaagataatgaggacatcccagtggacttcacgccggccatgacaggcgtggtggtcaccctgtcctgctcgctcatgctgctgctctacttcttctatgaccactttgtctatgtcaccattgggatctttggcctgggtgctggcattg

SEQ ID NO: 98510 - DNA, 236 bp, Homo sapiens
ttctctccagtgtgtatcctcttatgtctagttagggttgagaattgaattaatgctttgccacattcttcacatttgtagggtttctgtctagtatgaactctcctatgttcagtaaggcctgaggaccagataaatgctttgccactttcttcacacttgtaatgtttccctctagtatgaattctcttatgtttagtaagggttgagaactgggtaaacgctttgccacattc

SEQ ID NO: 98511 - DNA, 322 bp, Homo sapiens
ttcatgaccccttatcagctccaggcctacatttcaacaatttcctctgttttcatagaatcttgtctcattttttcttttcatcattgatatccactcagttctcaactccagattctatgtgactttctattttctgtacctctactctcagtaatactggacacacaaacacacacatatatacacacataaatgtctcatgtggataataaattaaaattttctaacagcaaagaaacccctattttcctgtcacattctctgcaatgacatcccttactcccacccataagtagaacatctcacctcgtatttgttt

SEQ ID NO: 98512 - DNA, 349 bp, Homo sapiens
tggttatggttatgtgtattttatgcactatgaatttaagatcaatttctattgataaatgataaagtgctttagtttagtttgccatttggtttatgtgatgtcatataaaagtttaaaaagacccattctttgctatggtttccggatttagtttattccatgtttacaacttacatacaacattatttcagttgaaaagaacaaatgacctatttattaactgagcagccaatacttctcatactaataatgggtatgtattacaataaagtggcagcagtaaggttggtagacttatgtatgattttcctgtggggtcctgggagcccaaattatttattacttg

SEQ ID NO: 98513 - DNA, 732 bp, Homo sapiens
ccatcttctgatattttttagaattttctttagagaaaaactgttaatgttttactcccttttgagggtcacaatctattacaaaacaaaaacttttcattcagtttcattgtatgtggccctttacacttcctgctaaagactttagccatgtatctttgcccagctagatacacacacagtcagcttttgatatttgccctgtggaccagatgaaataaagcccagaatcaagtctactgtttcccaattggtgtgaccatgggctgaattctgcgcttctttttgttgttgttgttgttgttacattgctacagcccagatttccaatgaccttgagaggtctatgcgtgggtatgtacatcctgatgtgggttactcatttcccatgtaatcttacaggtcctttatttctgcccaaatgtgagaggctccagtaaagtttctagctagaagaattataatctatagaggtggttgatagaattattttcatgctcagtgttttcctttaggtctctattctccaaatcttgcaggtaaagtagtcctttattcagggaagatgatgacgttcataattgcaggcctagagagaaagctggtcaattgtcatacattccacagggaacatcaaacagagctcctttagttgagggcatctcaattcactgagctgagccagtctcactgatgtgtgatctgaatgacagaggactggcaaaggccctg

SEQ ID NO: 98514 - DNA, 458 bp, Homo sapiens
acgagaatggcgtgtggtgggatgatgcctgggtgcccagtggcaccgtaggcagaatctggagatatagtcagttgggctgtctgacccacactcatctaagcaaccctttcttcccagcctcggatcacctcctgctaaaaattaaggggcttgtttctgtcccgggaggaatcaaatttctttccatcttcaagcatcccggtgtagtgcaccacgcaggtctggccgtgcctcgggaaggtgcactcctctcctggggagatggtttccacctgcactcccatggcggcggccgatgctgggtgggcgggtagcgcgacgggcggtgtggaccaacagcgacctggcggcggttccacagctctggctagacccttggcttttatttatttatttatttatttattttttgatacagagcctgggcgacagagcaagactcaaatcaaaaaaaa

SEQ ID NO: 98515 - DNA, 543 bp, Homo sapiens
ctgacccactcctggctcaagctatctgcgcaccttggcctcccaaagtgctggtattacagagctgagccatcatgccatggccatgtttatcacgttgtctacgattcattatagcaagcggtaactaggggaggtcccctagttgggtgcaagcagattcatttatgtattgtgcaaatcatgtaacacagtgaaattcataatcgtaaccccatactgggatcattgaaatattttactttccctattttgtttactatcaagcctgatctcattaagatatatccagtggcctggatcaggatcatgtgaaaaacaggaccttggcttgcttacaacgtttgcatttgttttggtgggtcagaacataaggaaatggaaggtgtcggaagcaaagctgagtgacagaacacattcagtcagggcagatgtctatacagagtgtagtggaacctcaggaaaagcttcatatggattcatgcgcacgcgtctggaggcaccagatccctccatggcagatccaagaacagggagctgagg

SEQ ID NO: 98516 - DNA, 398 bp, Homo sapiens
aatctggagatatagtcagttgggctgtctgacccacactcatctaagcaaccctttcttcccagcctcggatcacctcctgctaaaaattaaggggcttgtttctgtcccgggaggaatcaaatttctttccatcttcaagcatcccggtgtagtgcaccacgcaggtctggccgtgcctcgggaaggtgcactcctctcctggggagatggtttccacctgcactcccatggcggcggccgatgctgggtgggcgggtagcgcgacgggcggtgtggaccaacagcgacctggcggcggttccacagctctggctagacccttggcttttatttatttatttatttatttattttttgatacagagcctctctttgtcacccaggctggagtgcag

SEQ ID NO: 98517 - DNA, 528 bp, Homo sapiens
cctctaggctgccgtgtaggtcttatgagctaacaaagctggaaatgacgaaagccaagctgaacaaaagttaagagctttgtaggaataaaaatacttttatttatgaacatctaaaggctttgcctaaaagtgtggtcagtggaccggcagcagtggcagtacctggagcttatcaaaaatgcgcagcccgggtcctcaggctccaccccagtcctgctgggtcagagtctgcattttcacaagcttcccccatcacccatgggaaacactggtctaggaatttcttgcttctcagttccccattcccggaggctgcctcttgggccttctttccatagcctacaaggggttcttggcaggaaattcccatctcgttggagaaaatgctgtggcccagccagacccctgccctgctcaactgcctaggagatatgagtgcatcagaattaagctgaagttgggcagaggctctaacagcctctgtcactccaacaacctctgatgagaccatttgttgggagtgca

SEQ ID NO: 98518 - DNA, 271 bp, Homo sapiens
cactatcacgagaacagcacaggcaaaacctgaccccatgattcaattacctcccactggttccctcccacgacacgtggggattatgggagctacaattcaagatgagatttgggtggggacacagccaaaccctatcactggatcatatggttattttggattttaaaatcttggttaccaattctgagaaacctagaaagcatagtttatctgctccctgcgaagataattcctcacatttttgtttctctggaaagtctgcaaaaca

SEQ ID NO: 98519 - DNA, 161 bp, Homo sapiens
gaactgaacactagatgcaatatactgtatgtacattgtacattaatacaaaaatgaaaaaggatcctaatgcccaggcctttggggtgggggcaacagccttctttgcagtgtgaaggccacactggggtgtagacgagcaaagcttcttgtgtgacctg

SEQ ID NO: 98520 - DNA, 326 bp, Homo sapiens
actgctggctgtggagataatataagtctggagtcttgttggtggccatccgcttccaccaaaggagaccagctttctgagaatgaagccaactcagagcaaagaaaggaacaagggggatccctgataacatcactgggattcctggacccagctttgtctgaggatagacacccaaagttacataaacctgtaaattatctttttagctaaagctagcttgaggtgggcttctgtcacatgcaaccaaaggagttcctactgatacacaaatgttttccaatgtgccctgtggagtcctgaaggtccccccagaggtgctttgg

SEQ ID NO: 98521 - DNA, 379 bp, Homo sapiens
cctgcaattacccagttcaaatgtttgaagaaataaacattttacattagtcacactcaccccctgggcatggaagcagagccaagccctgttaagagtaaaaacagcccaggaaggtgttcctgaggtaacggcattacagataccagtaaggacagaaggcttaagagcgatcctcagactgaagtggcatcatttagaggcacacgtgacaccaagagccaacagaggtttctgcctccaggtaccccagtttggcacctaataagcactgtgcttactctttctccccagtggtatgattgtgacattcctctgaaatacagcttagcagctacccacagggtttgagagatgattggcagctgcagcttccacc

SEQ ID NO: 98522 - DNA, 327 bp, Homo sapiens
gtctaataattccacttgcagatattaatctactatttaacagaactcatttcttcataattatctaccaatcaacattactctcccttattactccatcttatcattctaagcagaacccagaatatcaatccgagcttatcccaaaagtatgtattttgatactaacatttaatcattgtacatttattgagtattcactctgatccaagcagtgaattgaatgaggcacagtccctggtctcaagccgatcactaacagcataataattatctccagggtgacattatgatttctgttagattctagagcagtaaaacagttgt

SEQ ID NO: 98523 - DNA, 317 bp, Homo sapiens
ggtggtggttatatgggtgttcactgaacagttctctcaattttactgtctgacacacctgcctgctggaaatggaggtggccttgaagaagtgagaatggcagtcatagccctgaggtcagaggacatggtctcaccttaaacaagcctgctgacctggaggaggactttcacatccccaagcttctttatttaaaagggtagtggtcaaaatcagggacctttttacaaacatcttatgtttggacccaactatgagtctactgactcacaatgtgaggcaggtggggtaacataacattatctttttcttttct

SEQ ID NO: 98524 - DNA, 459 bp, Homo sapiens
aaccaagtatgatcctcccaaggaccagggcctacagtccagtcaagcttgggagtgtagctaagggaggaatgaataacccactgtcatttcaagcgtaggattctctcatcactctcactgttttaaatcttctttatcatcacagattttacattattcccttatgtatgaatgttatttttattgaccattgaagattggaacctttttctggaaaaacatcacatggttgagtcaaggatgaaaagtcaaaactaccttttcatgtgaggggagagagagagaagcgcgcgcgcgcgaaagcgtgtgtgtgtgtgtgtgtgtgtgtgtgtgtgtgtgtgtgtgtgtgtgtgtattgggaccacctttcagctgtgttgcctccctctggtggccattatatgcacaaggcctgggtgacatggactgagtcagaatgtaacttacttttcaaaa

SEQ ID NO: 98525 - DNA, 573 bp, Homo sapiens
ctagggccggggagtttgggggagtgactgttaatgagtacactttcttttgggggtaatgaaaatgttctaaaattgataagtgatggttgcatagctctgaacacactggaaaccattgaagtgtgtattttaaatagggaaatagaatgtgaattatatctctaaggtgttacagttaatggaagcctttcaccttatcgtgatactgtatttcctcagtgctgagatgtgctttttaaggctaggcttggctgctcactcctgggatcccagcactttggaaggccaaggcaggaggattgcttgagcccaggaattctagaccagcctgggcaacatagtgaaaacctgtctctacaaaatgtatatttttaattagcggggcatagtagcatgggcctgtagtcccagctactcaggagactgaagtgggaggatcacttgagcccggggggtcgtcaaggctgcagtgagccaagattgtgccactgcactctagcctaggtaacagaatgagaccctatctcaaaaaaaaaaaaaaaaaaaaaaaaaaaaatatatatatatata

SEQ ID NO: 98526 - DNA, 641 bp, Homo sapiens
ttatgtcttcataagtcttaactccagaatctggattctagtatcctatctctctttgttaatttccatatttttaaaaatagagatggggtttcaccatgttgcccaggctggtgatgaactcctgagctcaagtgatccacctgtcctggcatcccaaagtgctgggattacaagcgtgagccaccatatccagcacctagtagtctgtttgtcattagttagttgtatgatcttaggcaaatcacttggtattcttcaatgctacaattttacgattccatgaaaaattctgaagaacaaaaaccaaaaactcgcacataaaaactgccttcaaagctttcctttctcaaatagcaggtcttataaatcacttttggtattctccataatctagaccacactcaaatgagaaattactgaacccatgattcctaagcaaagagaatgaccaaacatattcctttactaagcaacctgagtccaagacactttataattctgaaacctgtgactgttctgtataaatgttttttatgcaaaataagcaccaaattcataattctaacacaatgatgaattatattattttttccagctcttttatcgagtttatagactacattaatctttaagtacca

SEQ ID NO: 98527 - DNA, 479 bp, Homo sapiens
ttcagagaacttgactgactctcccagtgtcatacaacagttaaatggcagaattagaacttgaaccaaagtctgactcatatagatcagggctatttcaatatttacttattcatccagacgtgtgtttgttcaagtcagtgtcagtgagctagatactatctgtaggtacagtgtcttaagatatgttacttgatcctggctgggcgccgtggctcacacctgtaatcccagcactttgggaggctgaggcgggtggatcatgaggtccggagattgagaccatcctggctaacacggtgaaatcccgtctctacaaaaaatacaaaaaattagccgggtgtggtggcagcctgtagtcccagctactctggaggctgaggcaggagaatggtgtgaacccgggaggcggagcttgaagtgagccgagatggcgccattgcactccagcatgggtgatagagtgagactctgcctca

SEQ ID NO: 98528 - DNA, 661 bp, Homo sapiens
gtccagtgcctcacagacagcatcccagcacatcatggagagctaagtgacagaacaggcagctcctcttctccctggaggggagaacagagatggatttctatcaaaaggagccactatgtgctgttacatgccatatacatgggaggttgtgacagttgtattaaaacctccaggactggctatctatgactggctccacagtgctcagggcaagaagagtcaactgcaggtcttttgtggctcattatcttcttgcttccatttcttaaagggagaatatgtagattggtcccctaacttaggaagtacggggaaagtaaaaccagaaatacttcccctaactttgactcgtataaacacattaaggaaaggaaaggttgaaaggatgttcccacactcaaggaacttgtacaaccaagtcaagcgaggcaagtcaagaagaaaacagaaccccaatcatttctccagatgctctgaatcacctccagggcacaggcatagatgttccccaaccctgaatgctacagcaagtgcatatctacttacagcagatttgtaaacagatctattctccacttaaaaacattttttcaagaccagtgattaaaaatgtaaaaactaaagcctgaaaaaatatcagttccccttgcagagccca

SEQ ID NO: 98529 - DNA, 373 bp, Homo sapiens
tatgctctactcccagctacacatcatctgcccctctacagctcaatggaaaggttccccctacccgctggggccgttacctgactgttgccaaactcactggttaaatcatttggacagagcatggttggctctggaatagcaaattttctatgaatatactggcattacaaaaagctgatttggtcaccagctttcagatttatttccgtgaacagggcgagagttgtcaaaagaataagctcatggagctgatgaagaacttgatgatgaggggaggttttctcacccggcaggtccagtgtcaaccaggcaaacagcttctactgctctaaatttttagcatccacctgtctggactagcaactcccta

SEQ ID NO: 98530 - DNA, 268 bp, Homo sapiens
actgccactgatctgtacactaagaaatggctaaaatggctaattttatgttatgcatatcttactataaatagatgaatgcacacacacatagaaactacacaatttcaaaaataaagaaaaggcaaaaaaaaaaaaaaaagagtggttaagaaaagtgactgagagctacagaagccactctgtctgctgcctggccccctttcctgtggtctggcaccagtgggcccaggtcagcacagccacggccgtccctgccctcaccctc

SEQ ID NO: 98531 - DNA, 500 bp, Homo sapiens
ttccccttcacatttgactatgattgtaagttttctgaggcttccccagccatgtagaactgagtcaattaaactttttttgtttataaattacccagtttcaggtagtatctttatagcagtgtgaaaatagactaatacactaggcaacatagcgaaaccctatatctacaacaaaattagctgggcgtggtggcccgtacccatagtcacagtacctgtagtcacagctgctcaggaggctgaggtggatcacctgaggccaggaggttgaagctgcagtgagctgagccatgagcatgccattgcattccagcttggatgactgagactctgtcccctgaacccccaagaaagaatatcttactagggaaaatgtaaattggaatggaaatatcagtgactgaaggcctaatgagaaatacatgagccgctgttgctgaagtccccacgctgtaggaaaaaccaggctcttgtcacatgaccaggaaagattaggc

SEQ ID NO: 98532 - DNA, 567 bp, Homo sapiens
ctttgatcctcacagcagtcctgtaaggtattatgtggcggagcctggatttaaattagactctttctcaaattccatctccagtggttatattattagagatgtgaatttgttccccaaaaaacacttaatgatgctactgttatttgatccctttgccagtgccagacagtgtgctaagtatgcgttttacgtatgttaattcatttattatatgcaaaaccactttttttttttgagacggggcttccgtctgtcacccaggctagagatagtggcttgatggcagctcactgcagcctcaacctcctaggctcaatagatcctcccatctgagcctcctgagtagctgggactacaggggcacaccaccatgcccagctaaatttttgtatttttagtagagatggggttttgccatgtttcccaggctggtctcaaactcctgggctcaagtgatccacctacctcagcctcccaaaatgctgggattacaggtgtgagccattgtgcccagctgcaaaaccacattttatagctaaagaagttgaggctcagagagattac

SEQ ID NO: 98533 - DNA, 314 bp, Homo sapiens
ttaaaaaaaaaaaaaaaaaaaaaggcaaacatcacattaaaaagtctgctacttcacaaatgcagaattacattttcttaaggtttttttatctctctttccctattatgacactataattttatcaggcttaatagtgcagttacataatcaaaatatatttcttcaggtatttatccttaggagacctgatccttagtaatgtctaactaaaagtttccaaatagatgagtgaacgattgagcatgtcgagattttcttttgtgtttttaaggattgcatttattttaaacaagaacatactatccttcatt

SEQ ID NO: 98534 - DNA, 809 bp, Homo sapiens
ttgggaaaatggtacctctagacttgtttggtgccgggttgccacaaactcagcttataagaaaacacagtatcttgaaagtgtattaaaatgaagcatgataaaacgaggtatggctgtatttgatttaaatttagaatttggtaagatgcagctctgtggatgtttcaaagaagcatgtgactagtttcttaatttatatttttgaggtctaaatattgtcctaaaatattttatgtttaactgagttttttcaggaatcgtgtaatcttttagttgttgataatacaagtaattatttccatcaaagggaaaaagttacttaagcaaaagacttagccctgtttatgggctctgcattttctgtcctttctttttcatgtaatacattatatgcatcttacatgtcattgttttccttttaatatatggatgtatgataatttatttaactgctctgttctctgttacttttttttttttaaatagacaggatctcactttgtcatccacactggagtacagtggcaagatcatagctcactgtaacctcacacacctcctgcctcagcctcccaagtagctaggactacaagtgtacctcacaatgcctggccaattttttatttttttgcagagatgaggttttgctgtgttgctcagactatttatttttattgcttttctattcttaacagaatttcagagaacatctcttcagttaacttttcactcacatattgatccgttaataattctgataaatttctaaagatgaaattgctgattcatgttaaagacttgatcct

SEQ ID NO: 98535 - DNA, 1174 bp, Homo sapiens
tttcagtgaaagcagtgtatttgctaggtcataccagaaatcatcaattgaggtacggagaaactgaactgagaaggtaagaaaagcaatttaaagtcagcgagcaggttctcattgataacaagctccatactgctgagatacagggaaatggaggggggaaagctggagtattgatcccgcccccctccttggttgtcagctccctgtcctgtgtgtgggcggaacatagtccagctgctctatagcaagtctcaggtgtttgcagtaagaagctgctggcatgcacgggaacagtgaatgccaaacacttaaagcaattcgatgtttaagtatgtaagttcttttttttttagacagcgtttcgctcttgttgcccaggctagcatgcaatggtgtgacctcggcttactgcaacctccgccttcccagattcaagcgattctcctgcctcaggctcccaagtagctgggaccgggtgcgcgccaccacgcccggctaattttgtatttgtatttttagtagagatggggtttcgccatgttggtcaggctggtctcgaactcgtgaccgcaagcgattcacccacctcagcctcccaaagtgctgggattaccggcttgagccaccacacccggcacatcttcattctttttatgtagtaaaaagtataaggccacacatggtttatttgaagtattttactaatttaaaaaaatacagaagcaggaaaaccaattataagttcaagtgagggatgatggttgcttgaaccaaagggttgcatgtagtaagaaattgtgatttaagatatattttaaagttataagtagcaggatattctgatggagtttgactttggttttgggcccacggagtttcagatgcctttgagaaatgaatgaagtagagagaaaataaaagaaaaactagccaggcacagtggctcacgcctgtaatcccagcgctttgggaggctaaggcaggcagatcacttgagaccagcttgggcaacatggcgaagccccatctctacaaaaaacacagaaattagctgggcattgtggcgcacacctgtattcccatctactcaggaagctgagatggaagaattaattgagcccacgagttcaaggctgcagtgagtcgtgattgtgccactgcactccagccg

SEQ ID NO: 98536 - DNA, 515 bp, Homo sapiens
gccctgctgatgcctttggggtcattcttttattttgaaggataagacatgtttgcagccatatagtgatattagctcattctgttgaatcccagaagtctgatagccttccttcattttatcccacctcaatccagttcactcgaatctgctggtataagattatcagaaactgagttggcctcccatgcaattcatggaggtccacaccatcagacaagaggcttttccagataactgcatctctattcctggcttctgttgagatgactaattggatccataaattgcacacctggtgctttagcaaatggttgtctagccacacccttgatgttctcttcagaacagtttctcattttttaccatgtggttaggctgaagaatttccaaagcttcaagtattggttccttttttatttacaattccttcttcaatttatttccctcctcttgcactttacaataagcagcaaagagaaaacaggtttcatcttcaacactttacttagaaa

SEQ ID NO: 98537 - DNA, 2313 bp, Homo sapiens
cctgaaatgtgcaatctactgtatagtattgccacataattgtacatagatgtattctgaatttgtggaatttcttgcttagatactattgtgtttgtttcatatgaatatttttgtaattctaaaagagatcttatttaaatttcctttttaaaagccgcatggttctgtgatccatgtaactgacactttttggctttcagtgctgtttagaaacagtggcaaaggcagggtggtgctgcctgcaagctgctgcctatggaaggcaaagtcatagtaatgagatagcacctctgaactgtgcagtcagcataccctgagtgatggctcaggggcgcactacctattttgtcaccagagctgactcaggcttcctggaccctcaaccccagatcattccaggcagcatagctttcttcacagtcctttcagaattcccaggctgaaatcagccatagcagttgacaaaacagctatccccacaagtgatgagatagtccctttactgtcctcaaatggacttggccttagagacgtggtaaagcactttggcagggtttaaaatatttgtgagaagcccacatttcagtatacatcctcactggcttccatgcacccacctgacggtagcctcacagaagtcctggctgtcactcaggtggggagctcatggtgccgctggggactttttagagaaatgtaaagagaatagctattcagtgtctactagcagagcaacatgtgtcaatttaaccaaattcacaaataaccctccatttttcaatatctgctactgtaaacatgaatattgaatactgacaagagaatacccatacaaatcgtcccaccgccctagaggccacagaattagcccaaaattatcaaagaacattaactggaaggtcaggtttttcaaggaacatagcttacaaatgcatcagtgtgtatctggagagcatcctaactgcatttcaactcatcttttaagtgatttcagtcaaaactggaaaacaactaagatgtagtaatttttttttcctggttcaaaccttcaataacttgctcattcagcagtctctctgagctacatttttatttgtaaagtgactctgtctgcatggcaatgagcaggtgcgtgttttttccacattcgccctttcttgcagtatccagggaaacacatcattacaaagggtttctacctgaaatctttcatggaaggcctacaattcgaaaagctgcacatgtttacagaagagctcttaccctccatgcaaacactttgctctgtggtgtcacagctttgtgacaataagatggcaatctcggatctacaaggtgctgtcgggaatcaaataaaatatgttatcagagatatcatcacatctatagtgtttaacagagctttatgccaactactaagacaaagctttaacaaagtttatagaatactgaaactcgtaacaattacctctctacgtgatgctgtaaggaatcttgctaatttggtaggaagaggaagcatttaggaaagggtttagtatctaccaaaagtacttgacctcaagtaaccaatagtaatgcaaacttgctttaaaggaaccaaaggcattgccaagtatttgccaaaaggaggcactttttatttaaaatttgagactaatgagatctcaaaaatcagccccaaaaaggtattatccatttaaggttataattttcactaagatgtagatatttctcttattgttttcatgtaaaatagtatagagttgttttgttggtttaagagtaacattcagtagtaatacaaagttttttttctatgtagaaattagttttcttttcttgcttgcaatagaaatgcaatgtgataggtgtttctcttcttattttcattgtcacattatgtcttagcatctcactttatgaaaaaaaggagaaagataccaatctacagagccctgcttgttgaagcactagtttaatcaacaaaaaattatggcaatcgggggtccattcatctattgcctttatgttgttttttaaaagaaaaaccatgatgcctttgtatttgctgtttgcacccctgaaatcaattccatatcatgtttgaatgccatacattttgcacatgtactgtacataagtaatgcatactgtatttttatatgtgtgcacatttatcatcagatcttttgtacatagtggcagtattgtagctgatcgggaaatgtttgatatctcagcaattttgcatttttgtgtctcaaataaaagacattttgatgtatgattcttgctgtgcagaggaaa

SEQ ID NO: 98538 - DNA, 411 bp, Homo sapiens
cccacttttccatcctgagtagctaggactgcaggcacatggcagcatgcttggctgatttatttttattttttgtagagacaaggtcttggggtgttgcccaggctgaacctggcaatcttatgaagaaacactttaaactctgaaggaaactttttaagtaatatagacacaatatttttgaaaagctcttaaattgctaaaaattaatgcaaagaatagaattgcttatagtagcccaagaggaaagcataaaattgaaactggaagaactttttgggtggtattaattggagttgtttttactttgtgcatttcactttctattccttctcggaaatgccagaagtacatttggtaccaggatgagaaattcctgttcctccttgttttcacacttgagatgtttgt

SEQ ID NO: 98539 - DNA, 1017 bp, Homo sapiens
aaacagcatacacagacagacagttagggactctgaaacgatctcactaccaagaatgattaaacatttgaggaaaacctatggtagacaaatgaggcaccaaacttaataaacaaaaagtaatagcgagtgagacaatgaataagtaacagagactttgaaataagtaaaagtaagattcatagagagaaaagagattattgcatttataaagaaatatgtattaaaatgaattcaaaccaatcaaatatcttagaatttaagaatgtaattatcaggattaaaatgcataattggactaaatagagtggacacggttaaaagcaaattaatgaattggaaggttgaattccttcagaatgcagttttgaactgaaaaaggtggaaagcatgaacaaaaagtcacatgatacagaggacgttctaaaccttcagcgttcatctgatgtaaaattgaaatagtatggagttataatcacagaagtaataggaaattttcctgaactgaagacagacaagtcttctgaaaacaccttatgaatgcagaagtaaagaataacaaaaggccaacactaaattcctgcttatgaaatttcagaatacgtgataaagaggaactgactaaaagtattcagagagcaaacagtttatctgcaaaggaaagaatgagattgacaacagtcctattattgataaaaaataaatgatagaagatagaatgcagtagttgtggagttgtgggaaaaaacattttgaactcataattctaaatcaggcaaaccatcaatttagtgtgagtggaaaattaaaacaattttgaaccttctctgattgtttcacaccttctttgaaagaattgatggaagtactcccttccaaaaagcaggggagtgtccaaagaagggaaagacataacatgggaaacatgtacacacagtaaaatgtatagttgagcctgatagtttttaaaatctataatgttaatctttaaatatttaagtctagatcagatcagtt

SEQ ID NO: 98540 - DNA, 774 bp, Homo sapiens
  misc_feature (4)..(4): n is a, c, g, or t
  misc_feature (63)..(63): n is a, c, g, or t
agcngcggagttgagattcagaccttgacagtgtaaccgatagactgggctggggcaacgctnatgaaaggcaaattcctgagagaaaaatcacccagactttctagaagttgttatgagtggacctgactacctagagagagtaatacagaagctccgtgccgatcacagctacctcattaccatgttcctccaagatggccgcccctgaggagaatcatcaactgggctttacggaagagagaaatccaaacgaccatcagcaacaaatgaaagactgaagttgaaaggaaatccataatttttgaatgctggccgaggtctgtgacctctgactgaatggtttccaagctccgaattcctaggtgatgttttcatttgttcacacttgctgaagaagggaaaggctctctgatttacgtgtaagcaaaacaatctaaacagtaggataaaatcatgttggaatggagttctgcgtggatgctcctttgaaccaaatcagttccacaactgaccctgtcagggacatataaatttagcattttggtgtggatacagaagacgagattaacacagatcaagtaacatggaaataaaaaaggagacaatgctggatgatacaggggcagccaacaagaggagaaaacccaagcattggcaaatgcctcattatccaaagaacactgaggtgtggagcaaaactgtgttgaatgaactgtagatgggaaattctctccttcccaccgaaggagcccgctgcaggttgcgacttcc

SEQ ID NO: 98541 - DNA, 794 bp, Homo sapiens
  misc_feature (4)..(4): n is a, c, g, or t
  misc_feature (63)..(63): n is a, c, g, or t
agcngcggagttgagattcagaccttgacagtgtaaccgatagactgggctggggcaacgctnatgaaaggcaaattcctgagagaaaaatcacccagatttttcagtgccttctctagctttctagaagttgttatgagtggacctgactacctagagagagtaatacagaagctccgtgccgatcacagctacctcattaccatgttcctccaagatggccgcccctgaggagaatcatcaactgggctttacggaagagagaaatccaaacgaccatcagcaacaaatgaaagactgaagttgaaaggaaatccataatttttgaatgctggccgaggtctgtgacctctgactgaatggtttccaagctccgaattcctaggtgatgttttcatttgttcacacttgctgaagaagggaaaggctctctgatttacgtgtaagcaaaacaatctaaacagtaggataaaatcatgttggaatggagttctgcgtggatgctcctttgaaccaaatcagttccacaactgaccctgtcagggacatataaatttagcattttggtgtggatacagaagacgagattaacacagatcaagtaacatggaaataaaaaaggagacaatgctggatgatacaggggcagccaacaagaggagaaaacccaagcattggcaaatgcctcattatccaaagaacactgaggtgtggagcaaaactgtgttgaatgaactgtagatgggaaattctctccttcccaccgaaggagcccgctgcaggttgcgacttcc

SEQ ID NO: 98542 - DNA, 604 bp, Homo sapiens
gtgacttgcggaaaactcgtaaaagtgaataattttttgacaaatattacagcagataggtttttttgttgcttttgcttaattacatttcactgttttttgattcttgataccagcaagggattaaaatagcggtgtgtttttctgctgctagaatgtatgatgaatcactcttgattctgaagccaaattcttgctgatagcattgctgccaatttctgtgctatgttgccttagtatgggcattgcagcgtccgagaatgtgcacaaagcacatcagaataaaggtgatcccagagctgcagagtgcacgtcaggataccagagggcagcttctgagagagctggaaaaggaaccagcctgcgaatatagttgtttgtagctggactttcagtgtgcatgaaaagggggaccccaccccttttctttttccacagagggtcatatatgtcacttcagttgaagaataatagaaaaagttgtgatttggaacagacttgagttttctgaccatacctcagcatggtatggtaagttgtgtttaatggtttaggtgtttttttaaatgtttgtgaggtgatgaatgagatcataaaataccca

SEQ ID NO: 98543 - DNA, 198 bp, Homo sapiens
aagtcttcccagtggtaccagaaatactggaaatgtctgcatggggtggggggaacaaataaacattgatccttacttaataccatacacaataattaacctgaaatgggcaatatgcctagatgtaaagctaaaactacaaaatttctaggagaaaacctagtagattttctttgcaatattaaggcaggcaagatt

SEQ ID NO: 98544 - DNA, 752 bp, Homo sapiens
acggagtcttggtcttactccccaagcaatggtgcgatttcgtctcagtgcaacctctgcttcctgggttcaagctattctcctgcctcaacttcccaagtagctgggattacaggcgcccaaccacacccagctaatttttgtatttttagtagagacagagtttcaccatgttggccaggctggtctcgaactcctgacctcaggtgatccacccgcctcagcctcgcaaagtgttgggattacaggtgtgagccactgcgcctggccacatgtgtatatcttaaaggaaataatgctaggtaatttagtcaggtgcttgatgagcatttgtcatcatcatacggagtcaatttgtctttttctataaaagttctttttgtaaatgattagttgcttaactgctttaatttcttctaggtaccttacctgtcatcaggatctttttaccacaaataagaaaccttaaagcataaaacttggttcagtcttcacatttcttaaatggaaggagaaagggaataatagggagatatctttatctcaaagccaactgttgttgacttttccagtggcaggggtatgatgctaggacttcagatttcctgattccccatcctagtgccccttttgccaaactaggcaggctttcacagcttttggagcctaatttaagtttttcttgttaagaacagaaaactccattcatagattttaatttgtcattatttgcttatttactgaaaaaaaaa

SEQ ID NO: 98545 - DNA, 404 bp, Homo sapiens
caaaatgcccagcgtcttaatatgagtaggtagcagagctcaaatttaaatctggggatcctgcttcctgaattcatgctcttaacctccatgtgatggagagatctacacaaatcagaggtagaaatatttcccaaggaggtgacatctcagctagttttgagagaggagatgatgagaagccatgtgccacacagacatgggagagaagatcaattaaaagcagatgcaggccaggcacggtggctcatgcctgtaatcccagcactttgggaggccgaggcaggtggattacctgaggtcaaaagtttgagaccagcctggccaacatggggaaatcctgcctctactaaaaatacaaaaattggctgggcatggtggctgcatgcctgtaatcccagcta

SEQ ID NO: 98546 - DNA, 2865 bp, Homo sapiens
  misc_feature (1369)..(1369): n is a, c, g, or t
  misc_feature (1374)..(1374): n is a, c, g, or t
  misc_feature (1438)..(1438): n is a, c, g, or t
  misc_feature (1442)..(1442): n is a, c, g, or t
  misc_feature (1450)..(1450): n is a, c, g, or t
gagaaagaataggtcagaagcaatagtaaaagacataataacttgagaatcttccaaaactaatacagacttgcatatttgagaatcactgtagctctaagcagaatcaataccaaaaaacaaaaataaagggaaaagagaggaaaaattgccaaaacaaagaaaatcttaaaatcagccaaaggaggaaaaagatacattaccttcaaaggagcggcagtaaagacggacagtctactttgcaaagaaatggaaatcaaaatacagtggaacgatatcttcaaagtgttgtaagaaaataactgccaacctagaaatctgtatgaagcaaaaatatctttcaaaaatgaagtgagaatatagacatcttcagacagacaaaattagaattcatcaccagcagatctacactagaggtactataaagaaagttcttcaggtaaaaggaaaattatcccagctggaagcatggagatgcaggaaggagtaaagagcactggaaaggatagatagacgaatacatctaaaataatgtgaactgtgtaaaacagtaaaaatattgataggtgcagcaaaccaccatggcacacgtttacctgtgtaacctgcacatcctgcgcatgtacctggaacttaaaaatttttaaagtaaaaataataaatggcaacagcaacacagaaagctggaagagagttctgatgggggaaaaacacaggttatttttcctcggctctcactctacaacagtgatcatcacagaggacttctttgaccaaatgtgtggatttctccccacgtgccaagcaagcagtcagttctgcagtggacaccagctgggtcggtctcaacacagaagacttctgtgagcaaatgtgtgagggtttcttctcacacatcaaacaagcaaggagttctgctgtggatatcaggtgggtaccctccaattccatttcaacattatctacctggagataactcagatctcacaggttgaagactcagtctccaggactgtccctccttgagacaccagttgcaagtctgggcctccagaacttctgacccactagcttcaagttgggattcccaccacccctctttgggttcagttaatttgctagagtggctcacagaactcagggaaataattacgtttaccaggttattacaaaggatattatgaaggaaacagatgaagaaatgcctagaacaaggtatggggggtgggtgcttccatgccctctctgttgcaccgccctcctggcatctccatttgctcgggcatttggaagctctccaaacccaatccttttgggtttgttttgttttgttatgttttttggttttttggttttggaggcagtctcnctctnttgtccaggctggagtgcagtggtgcagttacggctcactgcagcctcaacctcctggactcangccntcctcccncctcagcctcctgagtagctgggactccaggcacgtaccatcatgctaggctaattttttaaaaaaaattttgtagaggtgggggtcccactgtgttggccaaactagtcccaccttggcctcccaaagtgctgggagccactgctcctagccccttttgggtttttatgagaacttcattatgaaggcatcattgattaagccattggccattggtgatcaacttaaccttcagcccctctaccctccctggagattggagggtagggctgaaagtcctaaccttctaatcctgccttggtgtttatggagaccagcccccatcctgaagctaacaagaggctgccagctatcagtcaactcattagcatacaaaaagacattactttggagtttggaaggattttaggaattatatgccaggaagcaggatcgaagaccaaatatatatttcacaatattacaaagataaatatagtttaaatgtcctcaggtctttgtaatttatattagattttaatgagtcagagatagtaatatctagggtagtccttctcaatcacatttggtgagagaatcacatcataatgttcaaagacagcaaacttcaacctgtgggtcaaatctggcctgccacctattttagtaaataatgttttattggtggaacaccgctatgcccgttagtttacatattgtctatggctggattcatgctgcaccgccagaattgagtagctgctacagagacattgtggtccacaaagcttacatttattgtctagcccttgatagaagagatttgacaacccctaggtattgtggactgagtgtgtgtgttccccaaagatttgtatgttgaaattctaacctccagcgtgatggtgttaggaggtggggcctttgggaggtatttagttcgtgaaggtggaaccctcacaaatgggattagagacacagagttcttgcttctttctgtctactctctgccatatggggacacagcaagaagaatgccatctgcaagccaggaagagggtcttcaccagaacttgaccatgatggaaccctggtcttggagggtctatagaacccagcctctagaactatgagaaatgtttgttgtgtgagccacccggtctatggtatttttgttagtagcagccagaactaagacatctgtgctaaggcatctattatatattatgaattaacttctttacatttagaatgccttgtaagaactgaaaaaaaaaatagtcactcagaatgttttctgcaggacataattctttcatagaacttgagttgattaactctagagtaatcactaaaaggatagaaagagaatttatagctaccaagctaatagagaaggagaaaggaaataaaataataaaaaccatttactgtcc

SEQ ID NO: 98547 - DNA, 602 bp, Homo sapiens
ccttctaatactctggcatcacagaaatgtgtgaggcacagaattcggaacatgcttagaactcacatttactgagctggtaaaattctaccttgaactgtagatcaaacctcaaagcagctttcacttggaatttaaaaataaacagttcaaagatactctagattatcaccctataaacttctactccagttatggtttctgacatatgattagactgtttcaaatgctggcaaaatggttaatgaagtaagagaaacagatcaacaacatatgttcaccttaaaccatctgttcatgatttcacccgtgactaactggttatgagataggacttaattaggttatttctgtgggttcaacaagggccataaactcagatcctacagggggccaggcagatgacttacctaaatgaagtggaacacgtggggaccctagtgcactgagcacagcttgcccttccaaaggagccagctgctcctcagtggctgctgctggtgctagggaggacccaatcttgctaaatgtgctgatatttcaagagaagtcagaaagctgggactttgtaacataagctcatattttaatatgttggcaac

SEQ ID NO: 98548 - DNA, 749 bp, Homo sapiens
atctgatgctgtccctcagtcactgcagtccctttcaagtatcaccttttttcctctgtagcagttatcaccatttggaataatttttgtttatttgctcattgtctccatcctcccactaaaatataagctctgtgatgacaaggtcctgtctctcttgctcacagctatgtgctcagtgtccccaagaggtgtttgccacgttgtaggtgctgggttagtttgtgttgtatgaagcagtgagcttaaacaaagggtttgaattaccttccctaagtagggctgtccttggtgcttggtctacaatgtcattggagataacccatcagcgagaataaaggaatacttcccagtgttagagcagcctcagagcagaaccagcccagatatgtgaggctggacatgggatctttgaacccgtggcaatgctggtgctgagtttccaccccataagaaaatctaccaacccaaggcgggaaggctgggagcaacagtatgatattctttactattttcctagggttgattctatggccatgacacatctttgagtccatatgacttttaggaggggtgtgctgaaaggttagtgacagcactcagccttctttgatgaccctgaatggaagatcccatcctattggcctgactatcttgctcccgggcaaagagagggtccatgtttgtgttcacgtctgtcaccaaacgggacccaggctggagcttcagcacctcactccaggtgaggg

SEQ ID NO: 98549 - DNA, 522 bp, Homo sapiens
agcggctgaaaagaaccactacacagtatttcccaaagtctggaccacctaaatcagaatcagctggcacgcttgtgcaaatgaaaattcctgcctccaccctggtcttactgaacaccgtggcaggcaccatgcccagaaatctgccttttaaacaagctccctgagtgacttttacacactctcaagtttgagaaccagtgctctcctttatgcggaaactaagaaaaacttttccagttacatttggggattgcagcggcagcttttgaattcctatataagaaagatttagggcccacaaacgggtgggattatgggatttgtatggaagccgaatctgcatagcacgcatcctgtttttcctaagattaggtgaagtctggacttcaactgggtgcctcaggaacgcggctagcagatggagattatcagggggatctaaatcccggataacccgctcgcgccgccaccaccagctggatggcttgagggaccccctccaagtatggcccactgcag

SEQ ID NO: 98550 - DNA, 565 bp, Homo sapiens
ggtctcactatattccccaggctggtgctggtctggtactcctgggcacaagcaattcctgcctcagcctcccaaagtgttgggattacaggcatgagccaccgtgccccgccccgataggtgttcttttaatacttcttctgaacttttcaacttccttcattaatttatgttaattaccagcactgattccctgcatcatcgaggagttattagtggtgtatttggcactagttttagaagtagatgccgctatgttttattcatttacagagtgatggcagctcatagttagtcctacaagtgcattattactgatttgtgaattcgtttatttttcctgaaacaattcaagtctttagaaagagaatccgaattattttgtagaataccatctcctgccatatcccttgggtctgatgaaacagatttgacaagaaaacatcagttggtgtttaggcatttttctctcttttattaattaccatcttgaaggatagtagccgaagcgaaagatcccataaacaagatcgcgctccgatatccatcaaagatgatattattg

SEQ ID NO: 98551 - DNA, 359 bp, Homo sapiens
tctccatgtgtttccaatatcatctatggcttgtggtcaagatgaagtaactaacgagatttaatctcctgcttgaaacaactaaaaaaaaaaaaagacactatagatgagaatgattttcaaggcattggacattaggtaatttttttttttttttgtatttttagtagagacggggtttcactgtgttagccaggatggtctcgatctcctgacctcgtgatctgcctgcctcagcctcccaaagtgctgggattacaggcgtgagccaccgcgtctggctaggagtctccttttagagaactggtccctgagagatgagactctaagtgagccctatgtttgccctagagtactgc

SEQ ID NO: 98552 - DNA, 357 bp, Homo sapiens
ggcatgggagacagtggagagtatttggattccagcctccttccttcctcagtgacaccctgagctctgcatttgtagagggtcctcctggtcaccagctacctgtccctgtgtcccttagcctgctattcttggcaacctcaacagttgctgccaggtggggagattatgtagcttaccaatagcagaaactgagcagtggctcactctacttcctcattctttcctgcggtcagcatcaaatcacatcttctgagcacctactgtgtaccatgttcttctaggcagtgggataggaaagtgattaagacatagtttcagggccgggagcggtggttcacgcctgtaatcccagca

SEQ ID NO: 98553 - DNA, 726 bp, Homo sapiens
ggcaatgtggtaaaacctcgcctctacaaaaaatacaaataaaagtatccagatgtggtggtgtgtgcctgtagtcccagctacttgggaggctgaggtaggaggattgcttgtgcctggggaggttcaggctgcagtgagtcgtgatcacgtcactgcactccagccctgagcaacagagtgagaccttgtctctaaataaataaataaataacataacataactacgtattctttgcatagctattcaaatgcaaaaaaaaaaagtagaaaggataattgtggactattcattgaaatactatatagcagtaacattgaatgaacagtgaacaactacatggaacaacttggttggaatttcacaaacacaatgttgcaaggaaagaagccagacacaaaaacattatgtatctctattattttatttatatcatgtaaaaacaggtgagttcttgtatttagtagactgggtaatagctaccctgagtggttggaatgggacacagtagaggctcctggaatgctgatactgattcgtttcttgatttggttgctggttacatagatgtgtttacctcagtattttgagctgtgcgcttagatctgtgccctcttttgtatgtatgtttattatacttcaatagaaagagaaaactgtatgaaagattaaatatcatgcagccattaagggtcctattttcaaagattatataatgatttagg

SEQ ID NO: 98554 - DNA, 879 bp, Homo sapiens
aaaatatttttttcccctattgaattttaaaagtacatgctatattttattttctttttttggttctttaaagggcaatacgttgagcagttacagtagaaaaattcattgttcatgcacatataagaaaccactagtagaactttgtaaatgaatcagttgcctcctttggtattcattctttgtttttttggacatggagtcttgctccatcgcccaggctgtagtcccagctacttgggaggctgaggtaggaggattgcttgtgcctggggaggttcaggctgcagtgagtcgtgatcacgtcactgcactccagccctgagcaacagagtgagaccttgtctctaaataaataaataaataacataacataactacgtattctttgcatagctattcaaatgcaaaaaaaaaaagtagaaaggataattgtggactattcattgaaatactatatagcagtaacattgaatgaacagtgaacaactacatggaacaacttggttggaatttcacaaacacaatgttgcaaggaaagaagccagacacaaaaacattatgtatctctattattttatttatatcatgtaaaaacaggtgagttcttgtatttagtagactgggtaatagctaccctgagtggttggaatgggacacagtagaggctcctggaatgctgatactgattcgtttcttgatttggttgctggttacatagatgtgtttacctcagtattttgagctgtgcgcttagatctgtgccctcttttgtatgtatgtttattatacttcaatagaaagagaaaactgtatgaaagattaaatatcatgcagccattaagggtcctattttcaaagattatataatgatttagg

SEQ ID NO: 98555 - DNA, 870 bp, Homo sapiens
gaaacacagccgttcactgaagaggatttgagtgttgtctcctctgtggggtcaaaacatcatgcttctttctgttctgccccatggcagtggtgacgatggcctagcttccatcccgtagcttcttgtgtttttctattccaccagtctatcaaccctgtatttgttgtcaaatttacactgtccacaggcaaagatctattctcctttagaatttaataggagggtttggaaatgatgccatggaaaccctgagcagcttggcaatgctgaccccaaatgagaaataactatcattggtgttttccttctactactattatcttgcccattgatcttcaaaaatttcattggtcaaattgattgaggaacgcaagacttaaatgtaatatggctctggcaaattctgagatgctaacaaaaacaagttttcttaagaacaatgtcaactgactcacagtatccgactatataaagtcgagtgctctcatgccaggaagctgatacagttcatgaaacctcagtcattctttcgtattactcctgtcttctctttggaaaacaatctcatgaatttggtcttgacgctgacttaacatcccaggaaacagatactcaattccactgtcttttttgagaaatgaacagttctcaaactttgtttaaatttccttttcacagatgagtaataaccaaagatatttctgaaagggctctgaaaacatgcaggcaattgatctttaaaaataagatagaaatagtaggttttataaaagaaggaaatagaaatacttcagaagaaataaagtgtgctgaatcatgttttaaacataattatatccggaatgcacttacccatttgaaaaaaaa

SEQ ID NO: 98556 - DNA, 312 bp, Homo sapiens
acagagtttcacaatgttacccaagctggagaaccgtggcaccatctcagctcactacaacctctgcctcccgggttaaagcaagttttgtgcgtcagcctactctggtagctgggactacagacatgtgccaccatgcctggctaatttttgtatatttagtggacacagggtttcactattgtagctttacaggacaaatataatctgacaatttccaaattcctatgtccagacacaaactacaaagcctatattttcaactgcctacttgacattttcatttggatgtctaatagaaatctcaaactc

SEQ ID NO: 98557 - DNA, 691 bp, Homo sapiens
aagggtttcatgaccaagaacctaaaagcgaaaaaacgataaaaacaaagataaatagctcggacttaaattaaagagctttttgcatggcaaaagcaacagtgagcagagtaaacagacaacccacagagtgggagaaaatcttcccaatctactcatctgacaaagaatagtatccagaatctacaatgaatgcaaacaaattagcaagaaaaaaaaaatctcatcaaaaagtgggctaaggacgtgaatagacaaatctcaaaagaagatatacaaatggccaacaaacatatgaaaaaatgttcatcatcactaatgatcagggaaatgcaaatcgaaacgacaatgcaatagcaccttactcctgcaagaatggccataatcaaaaaatcaaaaaataatagatgttggcatggatgtggtgaacagggaacccttctacacagctggtgggaatgttaactagtacaaccactgtggaaaacagtgtggagagtccttaaagaactaaaagtagaactaccatttcatctagcaatcccgctactgggtgtctacccagaggaaaaaaagtcattatatgaaaaagatacttcacatgcatgtttgtagcagcacagttctcaattgcaaaaatgtggaaccaacccaaatgtccatcaatcaatgagtggataaagaaactgtg

SEQ ID NO: 98558 - DNA, 779 bp, Homo sapiens
agcccagaaatagaaatagggtgaaataatccaagagtggaagctgagataccagcttggaaattattgcagttattcagggaacctaaatttgaggtcaaggatcaaaacgagccttctctctgtcaagagatttctacttagacttatgtcttctgcaatgtcttctgcaaatgatttactgaaggcttatggtatgctcagtgacctgtatcgttctcagacgaaaaacacgtatatgatctaaaatgcaaagtcatcttcaattatggttaaatatcatcatcacctctactaaccatttataaaccttataaactctttttgcactaacaatttcttttgtagccccaaagagccctcttagaaagaacttgagcccacagaaaggatataatttacttaagatcatagtaagaattagggtctttcaaaaccagggaagccacctggtcctttgaggaaatctaggcaaggtgggcttttaaaaaataatatccaacataaagcagagtctggcaataggaggtactaagtaaatatctgttgaataaatagatttcagagtaactcaaaattcattctgagtccacatgtgattatagaagaaaacaaaggaacgaccaagaaatcaactgacaggactgctggctcagagccactgctagggtccaataagacagtagaagagaccccttctcccactccatatcatcacatttgttatttgttctcaccttgacactggctttctgacagaataatttttcccagtgtgt

SEQ ID NO: 98559 - DNA, 378 bp, Homo sapiens
aagggtgatgcggttggagaggagacgtttgctgctcagtgtttagacctcaagcactgtgtagcccatgacccagcaatacggctctgggctctcaaccccagagaaattctgttgtactaccaaaaagacaaagggaagaaggacagaagaacaattagatctttccaatcatttggataaactgtctcccacagttggatatttcaattatttttcatttttcactaatataagcactgtgaacacccttatacacctagcaccccctttgtgccagccacactattctaagcacttcatgtgtgtgttaacttgatcctcacagcaactctgggaggtgagcacaattattatctctattttatgctaagaaaa

SEQ ID NO: 98560 - DNA, 661 bp, Homo sapiens
aatttggctgggacaaaagttagtggtggaagccatagacaaaacaacactgctgaggaaagaggtcttggagaaacagggaaagaaaggcctgtaactgaagtgtaagtaagagtagaatcatagtccagaattctgtgccagttttggaaaagatgcttattagatttctcttatgaactgttaagaaaagagataagacaatcagcatcatgtgctttggggaaaaggagtatttcaggacagatcctgggactagggacaggccagaagaagggcagaaactgagagacccaaggagataatgaaaatgctctctggatgctccagagatggtgaaagatggtctctggagcaagtggcttgcaacacaaaacattcttgcagctccaagagcagcctgagcaggctaggcttagacagtagtctgtctttgggaggagctcaaaaaattcaaaatggaatgcaagagctgccctaagaaccagttttcctttctcctaggccactgacctaattcagccgataaggactcaatcagcacttccctaccaggccacatgagctgacccaaatacatcctttaggagaaactatcaaggatcccatcaaaaggcaacacggacacttccgataaccagagaccctgttggaactgtca

SEQ ID NO: 98561 - DNA, 150 bp, Homo sapiens
aatttggctgggacaaaagttagtggtggaagccatagacaaaacaacactgctgaggaaagaggtcttggagaaacagggaaagaaaggcctgtaactgaagtgtaagtaagagtagaatcatagcactcgaccaggcccgaggtgcgt

SEQ ID NO: 98562 - DNA, 235 bp, Homo sapiens
tcttcagacagcagatgaaactgccagaaaccatggaaagtggaatcgcggataagagaggactactgtccaagccaaggaacacagggcttgcaggcaacccccggagctggaggaggcaccagatgcatccttcctcacagcctccagaagggaccaacccagccaacacctcgattttggatttctggactcccaagctataacagaataaatttctcttgctttaagccac

SEQ ID NO: 98563 - DNA, 234 bp, Homo sapiens
cctcccagatcacttccgctgtggtgtaaatcctggtcaagcttcctgatgataaaagaccacagggagacagagacccaggccccagctgacctgtcaggtgagtgacccaggctaacacagaatcatgagaaatcataaatcacagttatctaaaaccattaggttttggggtggtgtattacatataaccactcaaagacagcatttccattttaagtctttcctagggac

SEQ ID NO: 98564 - DNA, 153 bp, Homo sapiens
tctcatgtgcaaagaagtcatgtgagcacatggcacagtgggacggcagacactaggagtatgagaagaggcctccgaatgaaaccttcctgtctggcaccttgatctcagacttcccagtctgccgtcccactgtgccatgtgctcacatga

SEQ ID NO: 98565 - DNA, 254 bp, Homo sapiens
tgggcagtggcaccaagtctccagtcagctgtgcattttcaacttaatgacattttcaatttatgatgggtatatcaggacataaccccatcgtaagtcaagaagcacctggaattattagtctcaaaactagattccacctatatgaggtactcagagtagtcaaaatcgtagcatcagaaagtaaaatggtgactgccaggggctgagggagaagggattaggaagttactttttaatgcgtagtgtttcca

SEQ ID NO: 98566 - DNA, 253 bp, Homo sapiens
ctttatgaggctcagctacaccatctgaccagcacaggacaacttctgcagcacaaacacctcaggtggggcgaggcggctgccgaacccagggagccatatgtttgttgtttgctccactctggtgccctgtgctcctcagcccagccgggcactgcatcctggctgcatctcactcttctggtttctgcagttcctgccccccacacaccacgggctcagtgccttcagagaacgtaaaccacatcacagt

SEQ ID NO: 98567 - DNA, 907 bp, Homo sapiens
atcccggagggcgggcccagtgcggggcgggcggcgccgggggctcttcaggctcagggcataggcaggcggcggccgcgttttctggagacggtcgctctcggagggaccctgcaattgcccgagaccgagagtgggcgctgcctgaaagtttgtccctgggcgcttcgctggcctcatccggtctcggccttgttctgggcctggcgcctttcccattgttggggaaagtggtctaggagaccaaggcagcgtgctgggtgggagagaatgatttgtggcttctgattctgacatatgtcgttaaggaggggagggatgagtgaccctgttttacttatggagaacctggggccagagctgttttcccagggtgacacaggcggtgagtagtggagctggcattcctgaccccaaagctcagcgtttcccagccactctccgcagccaggccttcacctgcactgctgggcgcaggtggggaagtggggaaacggtgctccatcccctgcagagggcaggcgtgcggggagcggtggctgaactccacagacagctactgctcagctcttcagctgccggctttgaagagtgtgaggggctctgggcaagaggcccccacattactcaaggaccagatcatcaagagctttacttgtcccacaaaggagtctggacctcgtttaagtgcacaggagaccgctggaaggtcctcagtggcgtgccatggcccgacttctatttgagaagtttttctctggccacccgtctaaggaaaggtatctgggtgggtggtgcgggtgagaacaatggtggtgcggtgcttggcggagaaggtgagtgtccagagatgttcaggaagaagaactgacagctctggatgacaggaggtggaagtgagaaggaa

SEQ ID NO: 98568 - DNA, 405 bp, Homo sapiens
aacgggtgatgcggttgagggtggggggtgggggtgggggtttgcggtggatctagttggaggcagccaaggagggactctcaggtatccacaggggaggggcaaccaggagctgcccttgaggtcaggacaagagggtggtgggcagcggtgggcggcagctgtgggccacgacctagagcagcagccacgtcccaggagactgaggccctcaaggcacaaagcctcgtggggggtcctggctggggcccaagccactctgcttgggtaggacgctctgggccaaggggcagagtggctgctgtgggcctgggacacgcagacagtagaggcctggccgttctctgggctctgcaggcggccaaccccctaactcagctctatccgcaacccccataccctgtt

SEQ ID NO: 98569 - DNA, 380 bp, Homo sapiens
ggataatgtgggtcacttttatgaagtaggtaaaactggcaaaattggcaatgtatcaaatgtcaaggacatcaggagagaaaaagtcaagctcacctcccaggtttttggttagggtgacagtgagaataaggatgacaatgctgccaactgagatacagaaataaatctactgaaaatgcaaaccagttagtcaaacaatcattttctggaggaaaaatacattctctggtaagaaaaaaaatttgtttctatattttacctaagacacaaaacaggattcagtacaggtattaaaaattactggaaaattgtcataacatgcagtatctttaaagggaacaaatggaatccaaggtgtattacacaaaattgaacta

SEQ ID NO: 98570 - DNA, 264 bp, Homo sapiens
ctcctaaatggtctcagttaacagactgtagtgatgaaactggctgtgggctttgcatgaaaggcactgacgtggtccaggaaaagactcacaggccatgtccaaagcttgcctgctgaaacacacacacacacaaacacacacacacagtaagaggaagtaggcaaagaggaaaaactgtgttatctgcacatggaggaaactgcatgcttaaaatacaagtagccaaaactaaataatacttaacgaccattaaaatatgta

SEQ ID NO: 98571 - DNA, 347 bp, Homo sapiens
ggaaattaggtataaacttaatttttgcaaagaaagtcacataataaaacattaggagactcatttacttaaagggagtcttggctgggagcggtggctcacgccagtaatcccagcactttggggggcccaggtgggcggatcacgaggtcaggagatcaagaccatcctggctaacacgatgaaaccccgtctctactaaaagtacaaaaaaattagccgggcgtagtggcgggcgcctgtagtcccagctactcgggaggctgaggcaggagaatggcgtgaacccaggagacggagctagcagtgagccgagatcgtgccactgcactccaggctgggtgaca

SEQ ID NO: 98572 - DNA, 503 bp, Homo sapiens
agaaagcgaatgtacagtttttcacgtggagaaaagcactgcagaggaagatactagcagggcaagggatctgagtgcagtcagacctcatttgggtccagacttcattcctctatgtctctttcctttctacagaaagactgttagagaaaatggtagcattggtttcctgttgggagggaaagtgggtggtcatggtaagtgggtagagaaagacttcacagtatactgtttttgtacattttgagtttttttaaaagcgagacttgagctattctagctctgataatatggtgcagtatttgttatgttagttgtagtctttctgggcagtttttacatccccatgagccgttaaaaaaatacctgaacctttaattaggggaaataaattggaaaaatacatttcccttcacttaacattatcttagtttctctttttttttttttttttttttgagatggagtcttgctctgttacccaggctggagtgcagtggtgg

SEQ ID NO: 98573 - DNA, 207 bp, Homo sapiens
gcaaaaagctcacccaaaataatgtagatggtaaaaaaaaattacatgaaaagatgttcaacatcatttactcattaaggaaatacaaattaaaaccacagtagattcaaataccaattagaatggaccaaactttaaaaaatactgatagtggggcatggtgtcacatgcctataatcctgctacttgggcacctgaagtaggagg

SEQ ID NO: 98574 - DNA, 416 bp, Homo sapiens
cttcactgagggtcaaatggaaagaacacatgggggtcaagtttcagaaaataagagaaatgaagaaatatgtgcccggaagcaagaacgaccgacctcattaaactggctcccttcacctcctctcacatctttttctgccttttggccaagttttctctcccccgcatttcctccttgatctcgtttgaatcctcttccctggtgaagtcatttaggttcaggctcttattttactttggtccataatttagatcgaaccacatgtgctgatgtgattgaaacgatgtggaattctctggacagagatagaattatggaggggttagtgtgtgtgtttaagattaaaagaccaggtgtatgggaggaaatataatgaacaaaaaatagtattttaaatgaatactaaacttgca

SEQ ID NO: 98575 - DNA, 282 bp, Homo sapiens
aaaggtgttgctagggagatacagctctacagaataccgcagaaaacctgcagggaacgagtgggtgttggcagctttaaagaggaaagaaaagcaggctgggtgcacaggaaaggagagctctcacaccagtctggcctaatataacccaagaagtgcctggtgtttcccctgggccttccagtcaaccaccaggtcctttttattctccctttaatgtaccacaaaggtctcaccactgctctgtatctcacgctactttgactccaccaggcaccctga

SEQ ID NO: 98576 - DNA, 503 bp, Homo sapiens
actacctgccccttcccctactgtggataaatgtcaacacatgttttgtgcaagttatactttcaccatcaactttttaaacaggttttgaaataggtcaaatttctgataaccagttcagcaatttaagaatgtacattttcagttactgcaccagcagtgtttattgaaaaacagaaagaaaacccaaaaatataaaatacgtaaacattgtagaatggcatcatataacaaatgacaaaacctttgtggctaactactctttatatgttctgcaacaggagtgcccagcctcccttccctgtacatattttacactcaagactggaaggagttagctgttcctggttgctagtgtctaagcacggtgtgctgtaatcactgagcaccctgggcaatgtctttccaagtgagctattggttaaattgtgtgtgaaaggggcaggaaagaaaatatgggtatggaaaatcatctcttagatttcagcatgtattcaagtcag

SEQ ID NO: 98577 - DNA, 276 bp, Homo sapiens
ccctaaaggaatcgttgttgagaaagtgcgtaggagggaggaaccagaaaagtggcctcttcccccaatagtggattattcacagactgatttgccctgaatttgttccccgtcagcactaccaaaaggagacagagtcggcacctggctctcctcgtgctttcaccccagtgccagggacaaggaagatgactagttacggagggtgagggttgttttttgccaaaaagcctgggtagagtgatctgaattatctggcaccctcctgaatggaac

SEQ ID NO: 98578 - DNA, 762 bp, Homo sapiens
agcggctagtctagccctagacagggacttcagttttcctaggtgtctcctagcttttagagagtgccagctactcaccttgtggttatacaagatttgtatagtttttaatgacaacatttcaggaagaagcaataaaacatcttgaagacagaactgtctttttaaaatttgctcagaattaccataccagtaattccagcagttgagcaaaggacagtaccagcaaaggagagtataaaggggaaaggaacagagaagaagcaagacctataaaattatgcttataaaaattagactaataggccgggtgcggtgggtcacgcctgtaatcccagcaccttgggaggccgaggcaggcagatcacgaggtcaggagttccaggccagcctggccaacatagtgaaactctgtctctactaaaaataaaaaaaattggccaggcatggtggcaggcgcctgtaatccctgatacttgggatgctgaggcaggagaattgcttgaacccaggaggcagaagttgcagttagccgagattgtgccattggctccagcctaagtgacagagtgagactccgtctaaaaaaaaaaaaaaaaaaaaaatagactaattttattatgggacatgtgccacaacatacattctaactatagatcttctttctcaattttatattacatcatgggttatcccattagaataatgctggctacagtaataaataaccccaacatttcagtggcttaacatggaaggaat

SEQ ID NO: 98579 - DNA, 534 bp, Homo sapiens
agtgccatcaagtaatttccatataccccaatccaacattgcttgtgttaagtcctcatttcagtctctcaccagtatttcccccttgtctgtttctttgattttttttcttttttcaatgtgtaactcacagtcactgcaacacacaaaccctacgtgtagagtgtgatgaattttacgtatatttgcccctgtggaactacttgtgcagcgattggtgtggttggatgggtgctccctcctcctcctcctcatccccactctcattttcctcctgtgtcactggctggtccttcagcttctgctcagctttcagatagtggagtgtctcagggatgagttctaggaccccttctgtgttttctccgtcactcctaggggcgcttatatgatctcatggctttaaatgctatctacatgtgacagctctcaggtttgttctctacctctgacctcttctttccacttcagactcatattttcagctccctagttggcatttctacgtggaagtcaaataggcatctcaaaccc

SEQ ID NO: 98580 - DNA, 375 bp, Homo sapiens
tgagatcatgccactgcactccagactaggtgacagagtgagactgtttcaaaaaacaaacaaaaaaactgagttcaaggatattaaatcataaacataaaaaaactcaaaagtaccagcaaattttaggtgaatatctttagaatcttggagagcaaagactttcaaagcatgaccccaaaggctaaaaacagaaaagactaatgacctggcaacaatgacattaaaagcttcattatggcaaaactgaactataaacaaagttaaatatggaattatgggcactattgtcaactataccctttgtacaagctttcttgagggcagttttacaacagtaatcaaaatttatactttggccaagaaattccaaaa

SEQ ID NO: 98581 - DNA, 115 bp, Homo sapiens
gctatggtctttcagttaaccagtgggtcacctgggagcaaagcccttttgtgataaagttggctgatttgtgttttttttttttttttttaattttcgtaaacgttgcaaaacc

SEQ ID NO: 98582 - DNA, 515 bp, Homo sapiens
ttataagtaaaaatggaaaaagcagtttaaaataaatataataaatgtaagtgtaatgtgttttatatgtgcttcattatcatgtattgcatggcacgtatatagtattcaccagagtattatatattaatgtcaccataagttacacatatttatgttaaagtttattttttagagtacttctgatgttacattattttgtagacattttgaaaaataaaaaagccaaagaaaatgttaaaaaattactaacacttccatcccgcagaagcatttttacatatcagtgttaaatatttttctaagtatacagaacaatagaaagcagtcttaattagtataaagttaattatctgacataagtatctaatcctctgctcatcaaaagactattaagaaaatgaaaagacaatccacaaaatgggtaaaaaacattcacagcacaaacatcagacaagattttaataaccaatatatgactatcatctacaaatcaacaataaaataacccatgt

SEQ ID NO: 98583 - DNA, 232 bp, Homo sapiens
tgagcaaaagtttttttcttttcagttgacagaattctgttttcttcatttacttctactatctctcctttctcttgcaccctctgctgcatggaggacctaaaatagtttataatagcctggggttccttaaagaaaatggagaaggcaccagactccctttccagggaaaacaaattttttcaagaatgtaaacagacaagtttgtctcagttctcgaacagcttacttt

SEQ ID NO: 98584 - DNA, 283 bp, Homo sapiens
gcggccgcctactactactaaattcgcggccgcgtcgacggctgtctcttattttttaatttgtagtgatacttcataaatttggacagtaattcttggtcagttattaaatttccaagtatctttatccaatttgggcttatttttctttccttatgactttggggtagacaaggatttcataagaagcacaaagcatagatctgaaacaaaaaggttgataaattggactaccttgaacctaagaacttccgttcaacaaatgacaccataaggaaagaaa

SEQ ID NO: 98585 - DNA, 859 bp, Homo sapiens
tagaaaggttcatacacaatgtatcatgtaacatccccagtgggggctggggcagcaatctgtattaaacacaataattttgcagcaagtcacatgacacatgattatttctactaagagattactagattataaacagcctcacatcagtctgttgggttagactgtgctgccaaattatcaaataattttgtattttcagagtgttaggacttcagaattacagataggggatcgtagatctatagtattcctatttgaatggctaaatggatttttcctaaggtcctagcatgtattatgaccaggaaaattgtaacatttaacacgagagcatttctaaataccattttcaacatcagtacgtgcctgactcggagaacaatgaaagagccgtccttcatgcccagggccagctgagatccgtcggggctgaaagctacactgcgaaccgcctcttccatgttacagcgggcgatcaaggcatgatcagccaggctccacagcctaggcacaagaacgaagtcaaaacaaaacaaaaccaacttcccatggtcatcggccagcccaaggcaagaagggctgctcaccacaccaacagtaacaagaaaagacataggaacttcacaccagagccctttatcatggcctgtcagcgagtgtggaaaggtgttttagtgcatctttgggtcattttcatgatttgaaggaaaccagcaagaattatcaaatgaggtaacatttccaaagattttgagattcacagaacaaaaaaaaaatttaaggctgggcatgatggctcaacgcctgtcatcccagcactttgggaggccatggcaggaggaacacttgagcccag

SEQ ID NO: 98586 - DNA, 340 bp, Homo sapiens
agttttggagtgtgaggtcaaaggcgttttgagcaacttgtaagaaaccatttttaaggcggaagtcgggaattttgttttttatatgttgaatttgaaatccttattaaacatccaagtggagaggctggatagacaattaaatttagaccctgaggttcgggaaggaagtccaatgggctagagatataaatttgagagttgtcaacctaaaataataaaaaaggtaagaatctagtttaaaggaagtttattcaagcataaaggttgaagatggctacctgggagcatagattcaagttaccctaaatatacactctgattagcagcggttatgagt

SEQ ID NO: 98587 - DNA, 337 bp, Homo sapiens
tgtgtgctctcctctgccgatggcctttccctagcctgtgtcctcaaattcacgctcccttctgaggtaacgtgacgcctccccaccaccccacggtctggcagtgtaaacagttttcacccttgctcatttgaagagcgtaggagccttctctctcttctgaaaccccaaacatttgtttctatctttcttgaagcgtgaggagatgctgcttcacattcccgtgtcttccatgagactgagctcccggagggcaagcgctcgcccctgctcacatcttaccccccccagcactggccgacacagggcctccctcaacgtggatgcctggagaatg

SEQ ID NO: 98588 - DNA, 330 bp, Homo sapiens
gcatcactaaaattggtgtggagaattatactagagttttcccaaagggccccaccagtgttagggaatggttgttaaacctggtggatccgtgatgtgcatttatctccttttctctcttgaagccccactggaataaccactatgacaaagagaacaggagaagaaacagtcaataaagagatttcataataactttttacaagacagaagggctgggcacagtggctcacaactttaatcccaacatttggaaagccaaggtgagaggatcacttgaggccaggagttcaagaccagactgggcaacatagaccctgtctctacaaa

SEQ ID NO: 98589 - DNA, 429 bp, Homo sapiens
aggctccacaaagatgttgattgacgtgcacaattcggcacagccagtttcttggtcctttgtccttttctatttgaacaagcctttcaaacggatagggctaattttggataagactagagggagccctgggtcttaactgattatgggtgctttagatctggacttggaaatctccaagggcgaacactggggagcgtccgcaggggcagtgggcacagccggtcttcaggtgcggagagggggtcaaagggttccagcgattgctgggcttccacactctggtttcattttaacaagtgaagcaagagccgcttctcactgatagagggaatggaaacaaaagccgctctagtgcccagcaggatggagagggaacccgattctggtattgcttatgtatttatcacatacccagttccacggagc

SEQ ID NO: 98590 - DNA, 780 bp, Homo sapiens
cagaaacccagattcccaccaaatcatctgctggcacatagacctcagataaggagaactgaggacagactgctgttctttgttctaaatttcttcctgaggggcctggaggaagtcgcagccacgagccagagcaaacattttttccccaaatttttagacaaagctttgcctccttaaccaatcgctaagcagaaaatttttgagtccacctatatcccccttctgcttcaagatgtcctgcatctttcggtcaaaccaatgtatagcctccaggtattatcctgtgactttgcctgtaacctctgcctccccacctttaaaactgcttacctgtaagccatcagggagtgcaggcctgaagcatgagctgcctgaatgtccttgcttggtgcccttcaaaaatttcctcattttctctcgctgctagccccatgtcagtgtttggctttgctgtgctgggtgggggactccagttcgcttcaataacgcagggatatttcacttgtaaagcgggttcccgctaactgtggcgtcctaattagggaaaggaagttaggctggcgaaacaaggggaagcaaaaagagaacgcagataagctctaagtctgtctttcttcatggtccaggacacatagccctactgcagaaataactcaccgtcttcctgtgcctatcaccagacatgcgctgaggtgggaaattaaagaaagaaagaaaaagaaaatttaaaaaaaagaaataagttttcctgtattaggctgacttgtcccagaagca

SEQ ID NO: 98591 - DNA, 351 bp, Homo sapiens
aaacactgagcctccagcatttcaggtccagtcaacttcagcagatgtggtgttgggacacgagggtgttcagatgtgtgggggtgtccaagggggaatgattcagagccactgcctcagtttttaaagtaaggattcgtggatagtctttgtccccagtacaaaggcatagcggaaaaccaaagtggaagatggtgtggaggaagaggttcaaaggtgattttgttttttgcatcaggatgatccttgactgtgtctgaggccaaaagtaagtcttgactcccatgaaactccaggaaatggccggcacttgaagagccgtaaagaagcagcccagacctcactctcctg

SEQ ID NO: 98592 - DNA, 522 bp, Homo sapiens
tctatttagggagccttgccaatgggactggtgtgctctcaactgggaagcacttctattcaagaaggcctagagtgcttcccctttcagctctaccctgttgtgagcttggtctcagagtggcctccattcccttcccattcccagtgtctgactggagcacacatgccctgtgatctcttttcctatgactctggggaggtaaggaagggataaagttttttttttttatttaattaaattgataaattaattttttgagatgaggtcttgctctgtcgcccaggctggagtgcagtggtgagatctcggctcattgcaacctccgcctcctgggttcaagcaattctcttgcctcagtctcctgaatagctggaactataggtgtgcgctgccatgcccggctaattttggtattttcagtagagacggggtctcgtcatgttggtcaggctggtctcgaactcctgacttcaggtgatccttccacctcagcctcccaaagtgctaggattacaggtg

SEQ ID NO: 98593 - DNA, 247 bp, Homo sapiens
tgatttgggaactactttcactgaggcaaaaggcagaaaagggtgattgtaaatccaggctggccaagagtaaactgcagttcctcctgctgttggccagagaaaaagctattatgcccctcacaagaggaacaaatggcccacgagtctcttctttggccactctgagggatgctccctctctcactccgtttcctactcctgtactccagacattgctgctcacacacatcctgaagcagctatg

SEQ ID NO: 98594 - DNA, 392 bp, Homo sapiens
gagattgcacatcatgggtgtgcctttgggaactgcagcacatctcagtaaaagggtggtaggatttggggtttggttaggtgatttggggaggatccaaggaagtacgggttcactctggattgggtactgtcaggaagtagggacaagtctttgggtatcagtactattcagggttctccagagggacagaactaatagaacatatgtatatatggaagggagtttaagtccaggcctggtggctcacacctgtaatcccagcactttgtgaggccgaggcgggtggatcacgaggtcaagagatcgagaccagcctggccaacatggtgaaaccccgtctcttctaaaaatacaaaaattagctgggcgtggtggcgtgcatctgtagt

SEQ ID NO: 98595 - DNA, 422 bp, Homo sapiens
gtgtccaggccgtggggagccgagacgcagccccctcccgtcgcccccaggcgcccgccccccactcaccagccagcagcgcgcagggcagcagcagccagtacaggaccgcgccgagcacgtgcggctccatggctggagggcccagggcccggcccagaccgagcggacgccgcggcgctatggggcggtgcgggggccccggggccggcgcgccatggctgacccgcggggacccgcgcgccgccttctcctcttcctccttctccttcggccgccccgccggtgccgacgtcccgggcccgcgctcgctcaggcgaccgccctgcccctcggcggagcgcagcgctcggctcactggggccgagctgggccggacggcggctcccgccctcctccgcccgcgggcctttataagctcg

SEQ ID NO: 98596 - DNA, 424 bp, Homo sapiens
agatcgagaccatcctggctaacatggtgaaaccccgtctctactaaaaatacaaaaaattagccgggcgtggtggcacgcacctgtagccccagctacttgggaggctgagggaggacacttgcttgaacccgggaggcggaggttgcagcaagcggagattgcaccactgcactccaacctgggtgacagagcaagactctgtctcaaaacaaaacaaaacaaaatcggtaggaaaagaatacataattccttgtcttgaacagtggaagacaagaagaagccaataatattggctccttctatacaaaggagctgggtagctagaggatgagtgggagacttccacttgtacctattgaattttgagtagtgtcaattttatacattttttaaaatagacatgtaaagggagtgtgccaga

SEQ ID NO: 98597 - DNA, 264 bp, Homo sapiens
aagctagggatcaaacactgttaggtatcaagtataggcctttcatggaggcctgtaatcaaaatacttggaatggggcaaattgttacattaaccagaaatggaaatactattcctatcaatcatatacaatgtgcctgaaaatactgctttcttttctttattttttagacagagtttcgttcttgttgcccaggctggaatgcaatggcgcaatctcggctcactgcaacctccacctcccaggtttaagcaattctccgg

SEQ ID NO: 98598 - DNA, 193 bp, Homo sapiens
cctcccatacattctacacgtcaggtctgtccattcatctctcttacctgctcaaagttctccaatgacttacaattacacttagaataatatctaagctcctcaccatgcttagaaggtcctacaaggtgtggcttccacatgcctctcaggcttctccttgtaccagtctccactttggtccagccacact

SEQ ID NO: 98599 - DNA, 648 bp, Homo sapiens
caggtatctttaggtcaatgaagagtaaatataaaaacattttcttgaacaatatgctagcagcagtgaacagaggtgtgggtgtggaagattttcaagaggagtttagcatgaaagatgacatatatgctgttgccaacacttacaacacaatgactaaaggcacagtgtacatgcctgacacaacctctggcctgccactatgttcagagttgatgatgaacaaagtggtgactttgaagaattccctaagtcaagtgagaaaaaaatgtctctgaccttcttacatatgcaaaaaatatattttcagaggctgttgtaagtaagctggaaaaagtggatattgaagaaatttttaacatgaataataagtctccagttgttcatttatcaaccaatggtgaaatagctgaaatgactctgaatcagtatgatggtgatagtccaggcatggtggcttacacctataaccccagtgctttgggaggccaacgtggaaggtcacttgagcccatgagttcaagactggcctgggcaacataggagactcccatctctacaaaaaattaaaagtttgctgggcatggaggcacacacctgtagtcctagttacttgggaggctgagatgggagaatcacataagccca

SEQ ID NO: 98600 - DNA, 332 bp, Homo sapiens
cagtaactgagactcctcattcttcttgagtctacagattattcatcattaaaaaccatatgctaggccttaaaacaagtctcaataaatttcaagggattaaaactgttcagacttttttttttaaccacaatggaattaaattagaataataataatatttgtagaaaatcctgaaatatttggaaattaaacacacaactaaaaatgccagcatcaaaaaaagacaagatacattaaaaattattttgaactgtatgataacaaaaacaatgtcaaaaacatgtgagatatagttaaagcatggctgaaagggaaatttataaatttat

SEQ ID NO: 98601 - DNA, 123 bp, Homo sapiens
taaaatgaaataaaataaaaatccagctataagagagacatctgaaatatatgaagatgttgaaagtaaaacaatatgaagccacttatgcaaatatgcaaattcttggatgtttggaggaga

SEQ ID NO: 98602 - DNA, 303 bp, Homo sapiens
ctgtctcaaataataatgataatattttcttatgcttactttactgtaagattacagtatacattacaacatatgcgtttattgactgtttatgttattgataaggcttctagtcaacagtaggttactagtaattaagtttttgaggagtcaaaagttatgtgtggattttcaactgtggactttggtgcctctaaccctgtgttgttcaggggtcaactgtgtattctttctgtggtaacatttttagatgttatagcctttagacattagaaatggaaatttagttgaactcgagtgttc

SEQ ID NO: 98603 - DNA, 208 bp, Homo sapiens
tgtaaactggatggattgtgcttggagaggtccacaggcccagtgagctctgagaatttgaactggtttatttacacaccctgtccctgcccttctattaggagcacttcctgatgacagggtgaaattgtcccatcccgttccccagggcttaacctttcctcttagaattctccctattctacatgcttttcttcaactcaagtta

SEQ ID NO: 98604 - DNA, 476 bp, Homo sapiens
tgctgatgggcttgtgttcgttcccactcactgactatgcaagcgcctcttctcttagcctttctcaggatgcagttctccaggaggaatcagccttctgttgggctgctttcagagctctttgttgtggcttcctgccattgactttgcaagccctaagcatgctttatgctagttattttaagtgcagctccttcctcaaccaaaacaggaagctggctctgcaagagaatcaagtgcttttgatcctttcagctttttttttttttgactattcttctccaaatctgaaacatatccattctcgtctacggccatgagtgcatttatgttaacagaaaatgctaaatttaatgtttagaaagtaacctctgtggccagacatggtgactaatgcctgtaatcctggcactttgggaggccgaggcaggcagatcacttgaggccaggagttcgagaccagcctggccaacaca

SEQ ID NO: 98605 - DNA, 328 bp, Homo sapiens
tggtttcatttgtaaggactgcaagattttaattgcaagaattaaaaggaaggatagggaacctatatattaaaagacacattaaaaatgtagcagacacatacaacgtggggactgtgtttataaccaagttcaagcaatccaactgccaagaaaaaaatggagagatataaaatctgggaaacatgaatactggctggacatttgatagtactataaaatttttatcttttaggtgtgataaaaataattctttttttagcaatacatatgtcagaatttgcaggtgaaatgacgtgatgtctgggggtgggggagtctgataatt

SEQ ID NO: 98606 - DNA, 381 bp, Homo sapiens
caatctgcttacttccccaatttgattatttatacctctccctccacccctccaagatctggcatggaaattctttcaattgtctcaccgtacataccatctttccttcatgtctttgtgcatgctactcagtggcagctgcaaaggatagcttccccccataatacacaagctcccaaaattacctcaaataaacaatttcagttgcaacttgcttactacacattactgcactgcctcttcatctagacagcaccgtcttccttataaagtaattctggagccacgagtgatattacctctctcacctgcactataactcctcaagcccccactaactcttatttattgcccattcacaatttctaattatctttcaag

SEQ ID NO: 98607 - DNA, 994 bp, Homo sapiens
gtgcacgagggccatgtttggagccatgccagcttgccaatccttggcatactctgtacatagccagataactacacaagctcacctcatctgcacaaactcactctctgaacacttctaaggtcaccgagaagtcagggaaaaatgagaaccaggacagtcaaagcctttgcctctcctgaagctatggggcttgttgccagagccaaagcccctcttagcactcttattacttcatttaacaaacataaggagagcccggccctctgcttttaagggtggattccattactattaagacttctgcggcccctgaaagattaactcaacagtcacccctgtgaaagctgatccaagtggaaaatcgagttagaaaattccaccttcccttccctcacacctcagcagattaaggggaaggcctgatgctgagttatggggatttatgggaatgtgcagttgctggcttttaaacgctcactctttggaatgttggcaaccttgcttcctataaatcgttgctggtatttcttagcctttccttgccagcaacgcggaggcctgcaacaccttttccgtgcagtagcctgtgaaaatattgaagtcaggcccagaaaaacaccagcattgaaaggggaaactttgatgtttgctagttcttttcagacaactcttgccaaatcttaatttttccagtttacaagtaagggattctgaccatctgtctgctgtcaaccgatgtttgtttggatgaagattttatttttttctcccaatctagcactcctgttcttacaagtagtttattggacttcataaatgtcagctttttgcaggcattttgtaagcagcttatgatttagtatttaatcaaaattgagcagtcagcgtctgtaatcaatctgaagcaggagtaacaatgagattgaagcttaaaatgcaccaggaccacaatttatgtctcccaactatcgttgtaagaactaagtttgca

SEQ ID NO: 98608 - DNA, 520 bp, Homo sapiens
ggctgaggactgtgaagcaatcggggcgaggccgggtgtctgttcaactctcccgcgtatcgtctgtttcttcggcggcggacagtgttctgtaatgtgtctcccgttgcccgagctaaaggttttcctcgacggagtctttagaataccgtggtagaggcagtctccacaccactgtgctcgaacagctctatgaagaggcctatgtggagaggagaaaaagcctccaccaacagccagcaccaacttgccagccatatggcgtcttgctctgtcacccaggctggggtgcagtggtgtgatctcagctcactgcaacctctgcctcctgggttcaagcaattcttctgcctcagcctcctgaagagctgtgattacagacggtgtgccaacaatagcacggctaaagtttagtagtaataacgttataacttggaggtttatgtgatcgcattcactatagttgagtctggtatacttcgtgaagattggaagtccatgctctgataggcaagggttg

SEQ ID NO: 98609 - DNA, 2110 bp, Homo sapiens
ggaacatgggaccttgaggagttccgtaaccaaaaggagaaagtaacaacagccagtggagacaaaaagaactgcttctctttctttccccctccaagttcctagtggagggctgagtccagcatcccagactcgtgtgactatataggtaatgaaagtcttgcggcacaagtacctcatcaacttctatcgggccattgagagcacatctcgagtatacatcattctggaactggctcagggtggtgatgtccttgaatggatccagcgctacggggcctgctctgagccccttgctggcaagtggttctcccagctgaccctgggcattgcctacctgcacagcaagagcatcgtgcaccggtgagggcgctgccacccagactggggcctttgccctcaagggggttttatgcacatctcccatttcctgtccttttttcctctttcgaactccctcctcaatatctagcctattcatgcactctattttaatcatatggtcaaggatactgataaagtactcactgtatgcaaagcattttatgaaatacaatggtgagctcccggtggtcctcagataccatcctctgtctctctccctactttgggctctgctcacaactccatggctttccttcctctctaccttgtgccctcataatggtttctacctcccacttcctctgtcctcatctttaccctctgacccctggcccttcagctcccagtctaaaactaagccctctccccagcctgatgcccagcctttctgctgctggtagggacttaaagttggagaacctgttgctggacaagtgggagaatgtgaagatatcagactttggctttgccaagatggtgccttctaaccagcctgtgggttgtagcccttcttaccgccaagtgaactgcttttcccacctcagccagacttactgtggcagctttgcttacgcttgcccagagatcttacgaggcttgccctacaaccctttcctgtctgacacctggagcatgggcgtcatcctttacactctagtggtcgcccatctgccctttgatgacaccaatctcaaaaagctgctaagagagactcagaaggaggtcactttcccagctaaccataccatctcccaggagtgcaaggtccaactgctcattgcctgtgtggcacaatggagaaaaactcaggcaagacctctctctcccctgctctagaacctgatcctccagatgctacgccaagccactaagcgtgccaccattctggacatcatcaaggattcctgggtgctcaagttccagcctgagcaacccacccatgagatcaggctgcttgaggccatgtgccagctccacaacaccactaaacagcaccaatccttgcaaattacgacctgaaaatggctgagggagggggctaagagaggagcaaagcaggaggtcttgggctaaaaatcttttttaccaaaaataaatctaagtctgatttagtttcatcaactagggtcaaagacattcttttctcaaggcaatcttatagcagggaacactgctggagtaagagatagatttctgcccagagcctgtaaccaataatcttgacactgtgttaaatcaatagtgtaattcatgatgtggctcttaggggatggggtgctcagattaacgctctattttgggaagctttattattcaactcaacatatgctcattattttacatctttgtgctgtttaaatgctcaagtagtggggtaaaagccctggttcttccactttgattatggctctgcctgtctatagtccaaagtaatggcactgttagttcttttagaaatgggtattcgagctgggtgcggtggctcacgcctgtaatcccaacactttggggggccgaggcgggcagatcacttgaggtcaagagttcgagaccagactggccaacatggcaaaaccctgtctctatgaaaaatacaaaaattagccgggcatagtggcacctggctgaggcaggagaatcacttgaacccgggatgcaggggttgcagtgagccgagatcgcgccactgcactccagcctgggcgacaaagtgagactctgtctc

SEQ ID NO: 98610 - DNA, 2038 bp, Homo sapiens
ggaacatgggaccttgaggagttccgtaaccaaaaggagaaagtaacaacagccagtggagacaaaaagaactgcttctctttctttccccctccaagttcctagtggagggctgagtccagcatcccagactcgtgtgactatataggtaatgaaagtcttgcggcacaagtacctcatcaacttctatcgggccattgagagcacatctcgagtatacatcattctggaactggctcagggtggtgatgtccttgaatggatccagcgctacggggcctgctctgagccccttgctggcaagtggttctcccagctgaccctgggcattgcctacctgcacagcaagagcatcgtgcaccggtgagggcgctgccacccagactggggcctttgccctcaagggggttttatgcacatctcccatttcctgtccttttttcctctttcgaactccctcctcaatatctagcctattcatgcactctattttaatcatatggtcaaggatactgataaagtactcactgtatgcaaagcattttatgaaatacaatggtgagctcccggtggtcctcagataccatcctctgtctctctccctactttgggctctgctcacaactccatggctttccttcctctctaccttgtgccctcataatggtttctacctcccacttcctctgtcctcatctttaccctctgacccctggcccttcagctcccagtctaaaactaagccctctccccagcctgatgcccagcctttctgctgctggtagggacttaaagttggagaacctgttgctggacaagtgggagaatgtgaagatatcagactttggctttgccaagatggtgccttctaaccagcctgtgggttgtagcccttcttaccgccaagtgaactgcttttcccacctcagccagacttactgtggcagctttgcttacgcttgcccagagatcttacgaggcttgccctacaaccctttcctgtctgacacctggagcatgggcgtcatcctttacactctagtggtcgcccatctgccctttgatgacaccaatctcaaaaagctgctaagagagactcagaaggaggtcactttcccagctaaccataccatctcccaggagtgcaagaacctgatcctccagatgctacgccaagccactaagcgtgccaccattctggacatcatcaaggattcctgggtgctcaagttccagcctgagcaacccacccatgagatcaggctgcttgaggccatgtgccagctccacaacaccactaaacagcaccaatccttgcaaattacgacctgaaaatggctgagggagggggctaagagaggagcaaagcaggaggtcttgggctaaaaatcttttttaccaaaaataaatctaagtctgatttagtttcatcaactagggtcaaagacattcttttctcaaggcaatcttatagcagggaacactgctggagtaagagatagatttctgcccagagcctgtaaccaataatcttgacactgtgttaaatcaatagtgtaattcatgatgtggctcttaggggatggggtgctcagattaacgctctattttgggaagctttattattcaactcaacatatgctcattattttacatctttgtgctgtttaaatgctcaagtagtggggtaaaagccctggttcttccactttgattatggctctgcctgtctatagtccaaagtaatggcactgttagttcttttagaaatgggtattcgagctgggtgcggtggctcacgcctgtaatcccaacactttggggggccgaggcgggcagatcacttgaggtcaagagttcgagaccagactggccaacatggcaaaaccctgtctctatgaaaaatacaaaaattagccgggcatagtggcacctggctgaggcaggagaatcacttgaacccgggatgcaggggttgcagtgagccgagatcgcgccactgcactccagcctgggcgacaaagtgagactctgtctc

SEQ ID NO: 98611 - DNA, 776 bp, Homo sapiens
ggaacatgggaccttgaggagttccgtaaccaaaaggagaaagtaacaacagccagtggagacaaaaagaactgcttctctttctttccccctccaagttcctagtggagggctgagtccagcatcccagactcgtgtgactatataggcaagcatttggggacctacttcactttgataccctagccttcagcagctcaaggtgttggcctttggataggaggcttccaagtagtaaagctccctgctctcagcaagcccaacaccatggggaagggagatgtcttagaggcagcaccaaccaccacagcctaccattccctcatggatgaatatggttatgaggtgggcaaggccattggccatggctcctatgggtcggtatatgaggctttctacacaaagcagaaggttatggtggcagtcaagatcatctcaaagaagaaggcctctgatgactatcttaacaagttcctgccccgtgaaatacagaacctgatcctccagatgctacgccaagccactaagcgtgccaccattctggacatcatcaaggattcctgggtgctcaagttccagcctgagcaacccacccatgagatcaggctgcttgaggccatgtgccagctccacaacaccactaaacagcaccaatccttgcaaattacgacctgaaaatggctgagggagggggctaagagaggagcaaagcaggaggtcttgggctaaaaatcttttttaccaaaaataaatctaagtctgatttagtttcatca

SEQ ID NO: 98612 - DNA, 1433 bp, Homo sapiens
ggaacatgggaccttgaggagttccgtaaccaaaaggagaaagtaacaacagccagtggagacaaaaagaactgcttctctttctttccccctccaagttcctagtggagggctgagtccagcatcccagactcgtgtgactatataggtaatgaaagtcttgcggcacaagtacctcatcaacttctatcgggccattgagagcacatctcgagtatacatcattctggaactggctcagggtggtgatgtccttgaatggatccagcgctacggggcctgctctgagccccttgctggcaagtggttctcccagctgaccctgggcattgcctacctgcacagcaagagcatcgtgcaccggtgagggcgctgccacccagactggggcctttgccctcaagggggttttatgcacatctcccatttcctgtccttttttcctctttcgaactccctcctcaatatctagcctattcatgcactctattttaatcatatggtcaaggatactgataaagtactcactgtatgcaaagcattttatgaaatacaatggtgagctcccggtggtcctcagataccatcctctgtctctctccctactttgggctctgctcacaactccatggctttccttcctctctaccttgtgccctcataatggtttctacctcccacttcctctgtcctcatctttaccctctgacccctggcccttcagctcccagtctaaaactaagccctctccccagcctgatgcccagcctttctgctgctggtagggacttaaagttggagaacctgttgctggacaagtgggagaatgtgaagatatcagactttggctttgccaagatggtgccttctaaccagcctgtgggttgtagcccttcttaccgccaagtgaactgcttttcccacctcagccagacttactgtggcagctttgcttacgcttgcccagagatcttacgaggcttgccctacaaccctttcctgtctgacacctggagcatgggcgtcatcctttacactctagtggtcgcccatctgccctttgatgacaccaatctcaaaaagctgctaagagagactcagaaggaggtcactttcccagctaaccataccatctcccaggagtgcaagaacctgatcctccagatgctacgccaagccactaagcgtgccaccattctggacatcatcaaggattcctgggtgctcaagttccagcctgagcaacccacccatgagatcaggctgcttgaggccatgtgccagctccacaacaccactaaacagcaccaatccttgcaaattacgacctgaaaatggctgagggagggggctaagagaggagcaaagcaggaggtcttgggctaaaaatcttttttaccaaaaataaatctaagtctgatttagtttcatca

SEQ ID NO: 98613 - DNA, 449 bp, Homo sapiens
caaaaagctgctaagagagactcagaaggaggtcactttcccagctaaccataccatctcccaggagtgcaaggtactggctacctaaggagggctgagccttcagggatgacccacagggaggggtgaatatccaacctaggtcacccaacctaggcctcccaaccctggggaaaggctcttcccacaccagagccatctcacacactagctcctgtcctataataaacagtatggaaggcataaagggccaaccactaggctccaaaccttgcctgatacacaggttccagcttctttctctttaggccagaagggaaatatggaaagcattcctcccaaggaactcttcccttcccctccagggagttaactgcctgggtctccaagataaaatcagagccacacccactttgaccagagtggtatgatgggctatcctgcttctt

SEQ ID NO: 98614 - DNA, 1381 bp, Homo sapiens
ggaacatgggaccttgaggagttccgtaaccaaaaggagaaagtaacaacagccagtggagacaaaaagaactgcttctctttctttccccctccaagttcctagtggagggctgagtccagcatcccagactcgtgtgactatataggcaagcatttggggacctacttcactttgataccctagccttcagcagctcaaggtgttggcctttggataggaggcttccaagtagtaaagctccctgctctcagcaagcccaacaccatggggaagggagatgtcttagaggcagcaccaaccaccacagcctaccattccctcatggatgaatatggttatgaggtgggcaaggccattggccatggctcctatgggtcggtatatgaggctttctacacaaagcagaaggttatggtggcagtcaagatcatctcaaagaagaaggcctctgatgactatcttaacaagttcctgccccgtgaaatacagaacctgatcctccagatgctacgccaagccactaagcgtgccaccattctggacatcatcaaggattcctgggtgctcaagttccagcctgagcaacccacccatgagatcaggctgcttgaggccatgtgccagctccacaacaccactaaacagcaccaatccttgcaaattacgacctgaaaatggctgagggagggggctaagagaggagcaaagcaggaggtcttgggctaaaaatcttttttaccaaaaataaatctaagtctgatttagtttcatcaactagggtcaaagacattcttttctcaaggcaatcttatagcagggaacactgctggagtaagagatagatttctgcccagagcctgtaaccaataatcttgacactgtgttaaatcaatagtgtaattcatgatgtggctcttaggggatggggtgctcagattaacgctctattttgggaagctttattattcaactcaacatatgctcattattttacatctttgtgctgtttaaatgctcaagtagtggggtaaaagccctggttcttccactttgattatggctctgcctgtctatagtccaaagtaatggcactgttagttcttttagaaatgggtattcgagctgggtgcggtggctcacgcctgtaatcccaacactttggggggccgaggcgggcagatcacttgaggtcaagagttcgagaccagactggccaacatggcaaaaccctgtctctatgaaaaatacaaaaattagccgggcatagtggcacctggctgaggcaggagaatcacttgaacccgggatgcaggggttgcagtgagccgagatcgcgccactgcactccagcctgggcgacaaagtgagactctgtctc

SEQ ID NO: 98615 - DNA, 1505 bp, Homo sapiens
ggaacatgggaccttgaggagttccgtaaccaaaaggagaaagtaacaacagccagtggagacaaaaagaactgcttctctttctttccccctccaagttcctagtggagggctgagtccagcatcccagactcgtgtgactatataggtaatgaaagtcttgcggcacaagtacctcatcaacttctatcgggccattgagagcacatctcgagtatacatcattctggaactggctcagggtggtgatgtccttgaatggatccagcgctacggggcctgctctgagccccttgctggcaagtggttctcccagctgaccctgggcattgcctacctgcacagcaagagcatcgtgcaccggtgagggcgctgccacccagactggggcctttgccctcaagggggttttatgcacatctcccatttcctgtccttttttcctctttcgaactccctcctcaatatctagcctattcatgcactctattttaatcatatggtcaaggatactgataaagtactcactgtatgcaaagcattttatgaaatacaatggtgagctcccggtggtcctcagataccatcctctgtctctctccctactttgggctctgctcacaactccatggctttccttcctctctaccttgtgccctcataatggtttctacctcccacttcctctgtcctcatctttaccctctgacccctggcccttcagctcccagtctaaaactaagccctctccccagcctgatgcccagcctttctgctgctggtagggacttaaagttggagaacctgttgctggacaagtgggagaatgtgaagatatcagactttggctttgccaagatggtgccttctaaccagcctgtgggttgtagcccttcttaccgccaagtgaactgcttttcccacctcagccagacttactgtggcagctttgcttacgcttgcccagagatcttacgaggcttgccctacaaccctttcctgtctgacacctggagcatgggcgtcatcctttacactctagtggtcgcccatctgccctttgatgacaccaatctcaaaaagctgctaagagagactcagaaggaggtcactttcccagctaaccataccatctcccaggagtgcaaggtccaactgctcattgcctgtgtggcacaatggagaaaaactcaggcaagacctctctctcccctgctctagaacctgatcctccagatgctacgccaagccactaagcgtgccaccattctggacatcatcaaggattcctgggtgctcaagttccagcctgagcaacccacccatgagatcaggctgcttgaggccatgtgccagctccacaacaccactaaacagcaccaatccttgcaaattacgacctgaaaatggctgagggagggggctaagagaggagcaaagcaggaggtcttgggctaaaaatcttttttaccaaaaataaatctaagtctgatttagtttcatca

SEQ ID NO: 98616 - DNA, 631 bp, Homo sapiens
cactcaccttcagtccccaaaaagtaaaggcacaaaacatagcatttgcccacaggccaccagttctctggggttgaggggctgatcctattgcaaagtcctaagtcagtagctgagggtaggagacggctgggagtgcagtcagggttctcccttcccaggtttgatgggtccttcttctggggtcaggtaatgaaagtcttgcggcacaagtacctcatcaacttctatcgggccattgagagcacatctcgagtatacatcattctggaactggctcagggtggtgatgtccttgaatggatccagcgctacggggcctgctctgagccccttgctggcaagtggttctcccagctgaccctgggcattgcctacctgcacagcaagagcatcgtgcaccggtgagggcgctgccacccagactggggcctttgccctcaagggggttttatgcacatctcccatttcctgtccttttttcctctttcgaactccctcctcaatatctagcctattcatgcactctattttaatcatatggtcaaggatactgataaagtactcactgtatgcaaagcattttatgaaatacaatggtgagctcccggtggtcctcagataccatcct

SEQ ID NO: 98617 - DNA, 566 bp, Homo sapiens
atcttaagacacatatggaaaacaatagggtagaacttagtaaactacaagaatataaattggagctagatgaaaaggcagtgcaggcagtagaaaaattagaagaaatccatttacaggttagttttttaaatcaggtaagtttatctgtaatgtgctttcatttatttcaccgcaaattatattttggatatgtatatattatgtttcctctgcctctcttgtagcaatttgctttgtagagttctagaaaaaaaatggcatctgttttttcttttaaatatttacatttccattattattataacaaaatcaatctttcagagtaatgattctcactgtggagtcatttgatgattaagatcagttggcataagaaacaattgtgatttcaaaattatgtgatacttttgaattggtcttaagctacattgttcattaatcactttttaaaattatgaatggattctattactttttatatgaccagattacattaatactaacataattatgatttcaaatttttataaatcagacaattctgaattcagttattagttttg

SEQ ID NO: 98618 - DNA, 828 bp, Homo sapiens
cgacgcctcaaggcctgctcagcgtgcgcgggcatccggtgggtgcgggaggcccgaggccaggcaggcagggatcccgcagcgaggggctggttactgccaggacggagcgcattgcctcgagccgaccccggggtccgcgagggctcctggggacgaggagtgtggggcacctgccgcggggggcccaggcgctaaaggtggagggaaggaacgcactcgcggcgggggcctggccggggcggacgcagccagcctcacccgcgacggtaggggacttccagggcgagggggcccatctgccctcgggcgccaggaggatgctccagctcctggtgctgaagattgaagatccaggttgcttctgggttattataaaagggtgtagtccctttttagatcatgatgtcgattatcaaaaattaaatagtgccatgaatgacttctacaacagcacgtgtcaagatatagaaataaaacccttaacattggaagaaggacaggtgtgtgtggtctattgtgaggagctaaagtgctggtgcagggccattgtcaaatcaattacgtcttccgcagaccagtacctggcagaatgtttccttgtggactttgccaagaacattccagtcaaatctaaaaacatccgagttgtagtagaatcgtttatgcagcttccctatagagcaaaaaaattcagcctgtactgcacaaagcctgtcacattacacattgacttctggcgagacagtactgacattgtacctgccaagaagtgggacaatgcagctattcagtactttcagaaccttctgaaaggtaagccagtgc

SEQ ID NO: 98619 - DNA, 3098 bp, Homo sapiens
  misc_feature (84)..(84): n is a, c, g, or t
gacccgcgcgggatgtgaccccctgaccccctgcctggcctcccctgccccccagggggcccgcctttgcctgcttttgggggngggtggggaggggcgcgcggatcatggcattggagttcccgggcttgcagccgccgccgccgcctcgttcacgcaccccgagcgccccttcttcccagagcagcagcggagaaggcgaagcggccggcgggggcgaggcagatggggctcaaggcgcgcagggcggcgggggcggctggcggcggcggcgacgggggcggcggaggcggcggggcggctaacccagccggaggggacgcggcggcggccggcgacgaggagcggaaagtggggctggcgcccggcgacgtggagcaagtcaccttggcgctcggggccggagccgacaaagacgggaccctgctgctggagggcggcggccgcgacgaggggcagcggaggaccccgcagggcatcgggctcctggccaagaccccgctgagccgcccagtcaagagaaacaacgccaagtaccggcgcatccaaactttgatctacgacgccctggagagaccgcggggctgggcgctgctttaccacgcgttggtgttcctgattgtcctggggtgcttgattctggctgtcctgaccacattcaaggagtatgagactgtctcgggagactggcttctgttactggagacatttgctattttcatctttggagccgagtttgctttgaggatctgggctgctggatgttgctgccgatacaaaggctggcggggccgactgaagtttgccaggaagcccctgtgcatgttggacatctttgtgctgattgcctctgtgccagtggttgctgtgggaaaccaaggcaatgttctggccacctccctgcgaagcctgcgcttcctgcagatcctgcgcatgctgcggatggaccggagaggtggcacctggaagcttctgggctcagccatctgtgcccacagcaaagaactcatcacggcctggtacatcggtttcctgacactcatcctttcttcatttcttgtctacctggttgagaaagacgtcccagaggtggatgcacaaggagaggagatgaaagaggagtttgagacctatgcagatgccctgtggtggggcctgatcacactggccaccattggctatggagacaagacacccaaaacgtgggaaggccgtctgattgccgccaccttttccttaattggcgtctccttttttgcccttccagcgggcatcctggggtccgggctggccctcaaggtgcaggagcaacaccgtcagaagcactttgagaaaaggaggaagccagctgctgagctcattcaggctgcctggaggtattatgctaccaaccccaacaggattgacctggtggcgacatggagattttatgaatcagtcgtctcttttcctttcttcaggaaagaacagctggaggcagcatccagccaaaagctgggtctcttggatcgggttcgcctttctaatcctcgtggtagcaatactaaaggaaagctatttacccctctgaatgtagatgccatagaagaaagtccttctaaagaaccaaagcctgttggcttaaacaataaagagcgtttccgcacggccttccgcatgaaagcctacgctttctggcagagttctgaagatgccgggacaggtgaccccatggcggaagacaggggctatgggaatgacttccccatcgaagacatgatccccaccctgaaggccgccatccgagccgtcagaattctacaattccgtctctataaaaaaaaattcaaggagactttgaggccttacgatgtgaaggatgtgattgagcagtattctgccgggcatctcgacatgctttccaggataaagtaccttcagacgagaatagatatgattttcacccctggacctccctccacgccaaaacacaagaagtctcagaaagggtcagcattcaccttcccatcccagcaatctcccaggaatgaaccatatgtagccagaccatccacatcagaaatcgaagaccaaagcatgatggggaagttttgtaaaagttgaaagacaggttcaggacatggggaagaagctggacttcctcgtggatatgcacatgcaacacatggaacggttgcaggtgcaggtcacggagtattacccaaccaagggcacctcctcgccagctgaagcagagaagaaggaggacaacaggtattccgatttgaaaaccatcatctgcaactattctgagacaggccccccggaaccaccctacagcttccaccaggtgaccattgacaaagtcagcccctatgggttttttgcacatgaccctgtgaacctgccccgagggggacccagttctggaaaggttcaggcaactcctccttcctcagcaacaacgtatgtggagaggcccacggtcctgcctatcttgactcttctcgactcccgagtgagctgccactcccaggctgacctgcagggcccctactcggaccgaatctccccccggcagagacgtagcatcacgcgagacagtgacacacctctgtccctgatgtcggtcaaccacgaggagctggagaggtctccaagtggcttcagcatctcccaggacagagatgattatgtgttcggccccaatggggggtcgagctggatgagggagaagcggtacctcgccgagggtgagacggacacagacacggaccccttcacgcccagcggctccatgcctctgtcgtccacaggggatgggatttctgattcagtatggaccccttccaataagcccatttaaaagaggtcactggctgacccctccttgtaatgtagacagactttgtatagttcacttactcttacacccgacgcttaccagcggggacaccaatggctgcatcaaatgcatgcgtgtgcgtggtggccccacccaggcaggggcttcccacagcctcttcctccccatgtcaccacaacaaagtgcttccttttcagcatggtttgcatgactttacactatataaatggttccgctaatctcttctaggata

SEQ ID NO: 98620 - DNA, 877 bp, Homo sapiens
  misc_feature (13)..(13): n is a, c, g, or t
  misc_feature (39)..(39): n is a, c, g, or t
  misc_feature (42)..(42): n is a, c, g, or t
  misc_feature (97)..(97): n is a, c, g, or t
  misc_feature (100)..(100): n is a, c, g, or t
  misc_feature (117)..(117): n is a, c, g, or t
gaaaggtgatatnttagaggatagcccctcaatgtctantcntcaatttaatgcatattacaagtactgcttatttgttgcaaagaagggtcatttnttntctttcttccttctttntactttctcttttttctcgtgccgaattcggcacgaggtgatagttgccatggtgaccaatcaagataatccagatgacctaaacaaatgtctgtatgcagctgacactgctattctccctcacagtcttgtcaagagccacagtagctatggcagacatttggttgatggtttcatcatttcctaatacgagagtctggcactatgttggagagaggaatcacttcctcagagataggttcctttcaactcacatgtcaacagttactgtacaaaaagctcagaatacagtaatgattagagcttgacccctgactttaggaacttagaaccaaagcccaaagtcccaggccaagggcagacattgtgagcagcagaagggtgttttttatggagagccccataaatggatgggtgtagaccttgaagtctgagatgggaaatataccagaatgctcaatgcatcagacatgaagccccacgggcttccatttgacatgctggcaatctgaaggacaaagggcatgggttatttgggccttttccccactccttcaatatggctgaaagtgccagtggggattacaacctaagaaaccctatgccccttcctgagggcttgattattgaatcctgatcttcctggaatctttcacttgagatgatcacctgcctaacatccaacatgttactatgctcttctttatgtacatgagttactggaaaccaacaataaaggagagtgagtcataaaaaaaaa

SEQ ID NO: 98621 - DNA, 5169 bp, Homo sapiens
  misc_feature (84)..(84): n is a, c, g, or t
  misc_feature (3678)..(3678): n is a, c, g, or t
gacccgcgcgggatgtgaccccctgaccccctgcctggcctcccctgccccccagggggcccgcctttgcctgcttttgggggngggtggggaggggcgcgcggatcatggcattggagttcccgggcttgcagccgccgccgccgcctcgttcacgcaccccgagcgccccttcttcccagagcagcagcggagaaggcgaagcggccggcgggggcgaggcagatggggctcaaggcgcgcagggcggcgggggcggctggcggcggcggcgacgggggcggcggaggcggcggggcggctaacccagccggaggggacgcggcggcggccggcgacgaggagcggaaagtggggctggcgcccggcgacgtggagcaagtcaccttggcgctcggggccggagccgacaaagacgggaccctgctgctggagggcggcggccgcgacgaggggcagcggaggaccccgcagggcatcgggctcctggccaagaccccgctgagccgcccagtcaagagaaacaacgccaagtaccggcgcatccaaactttgatctacgacgccctggagagaccgcggggctgggcgctgctttaccacgcgttggtgttcctgattgtcctggggtgcttgattctggctgtcctgaccacattcaaggagtatgagactgtctcgggagactggcttctgttactggagacatttgctattttcatctttggagccgagtttgctttgaggatctgggctgctggatgttgctgccgatacaaaggctggcggggccgactgaagtttgccaggaagcccctgtgcatgttggacatctttgtgctgattgcctctgtgccagtggttgctgtgggaaaccaaggcaatgttctggccacctccctgcgaagcctgcgcttcctgcagatcctgcgcatgctgcggatggaccggagaggtggcacctggaagcttctgggctcagccatctgtgcccacagcaaagaactcatcacggcctggtacatcggtttcctgacactcatcctttcttcatttcttgtctacctggttgagaaagacgtcccagaggtggatgcacaaggagaggagatgaaagaggagtttgagacctatgcagatgccctgtggtggggcctgatcacactggccaccattggctatggagacaagacacccaaaacgtgggaaggccgtctgattgccgccaccttttccttaattggcgtctccttttttgcccttccagcgggcatcctggggtccgggctggccctcaaggtgcaggagcaacaccgtcagaagcactttgagaaaaggaggaagccagctgctgagctcattcaggctgcctggaggtattatgctaccaaccccaacaggattgacctggtggcgacatggagattttatgaatcagtcgtctcttttcctttcttcaggaaagaacagctggaggcagcatccagccaaaagctgggtctcttggatcgggttcgcctttctaatcctcgtggtagcaatactaaaggaaagctatttacccctctgaatgtagatgccatagaagaaagtccttctaaagaaccaaagcctgttggcttaaacaataaagagcgtttccgcacggccttccgcatgaaagcctacgctttctggcagagttctgaagatgccgggacaggtgaccccatggcggaagacaggggctatgggaatgacttccccatcgaagacatgatccccaccctgaaggccgccatccgagccgtcagaattctacaattccgtctctataaaaaaaaattcaaggagactttgaggccttacgatgtgaaggatgtgattgagcagtattctgccgggcatctcgacatgctttccaggataaagtaccttcagacgagaatagatatgattttcacccctggacctccctccacgccaaaacacaagaagtctcagaaagggtcagcattcaccttcccatcccagcaatctcccaggaatgaaccatatgtagccagaccatccacatcagaaatcgaagaccaaagcatgatggggaagttttgtaaaagttgaaagacaggttcaggacatggggaagaagctggacttcctcgtggatatgcacatgcaacacatggaacggttgcaggtgcaggtcacggagtattacccaaccaagggcacctcctcgccagctgaagcagagaagaaggaggacaacaggtattccgatttgaaaaccatcatctgcaactattctgagacaggccccccggaaccaccctacagcttccaccaggtgaccattgacaaagtcagcccctatgggttttttgcacatgaccctgtgaacctgccccgagggggacccagttctggaaaggttcaggcaactcctccttcctcagcaacaacgtatgtggagaggcccacggtcctgcctatcttgactcttctcgactcccgagtgagctgccactcccaggctgacctgcagggcccctactcggaccgaatctccccccggcagagacgtagcatcacgcgagacagtgacacacctctgtccctgatgtcggtcaaccacgaggagctggagaggtctccaagtggcttcagcatctcccaggacagagatgattatgtgttcggccccaatggggggtcgagctggatgagggagaagcggtacctcgccgagggtgagacggacacagacacggaccccttcacgcccagcggctccatgcctctgtcgtccacaggggatgggatttctgattcagtatggaccccttccaataagcccatttaaaagaggtcactggctgacccctccttgtaatgtagacagactttgtatagttcacttactcttacacccgacgcttaccagcggggacaccaatggctgcatcaaatgcatgcgtgtgcgtggtggccccacccaggcaggggcttcccacagcctcttcctccccatgtcaccacaacaaagtgcttccttttcagcatggtttgcatgactttacactatataaatggttccgctaatctcttctaggatacacatttatctgctgttcttacttttaatcacgattggaccagtacagggagaaattactgatgagccatgctatttgtctgtttggttggctggtttgggttttggtttggtaagcagagaaagtagtttaagttatttctaggatcactgccctcttgtgtaaaacgctccagcaattaactgtttttgaaagcaaggaaataattttctcaacaaaaccacattgtgtatcagtggggctgcctactgagctaacattaggaaaggaatgagatagtcattgtgtctctaaaacaaagaatttaaacaaatatttaaggcaaaaccttttaaaagctctccaaaagacctcacttggcctgatgttacttagtatcatgcctcagtttccttatctgtaaaaagtggtggtaatcccaagtgtagcatttctgatgagttatgaattggcagggagaaaacacacacacacacacacacacacacacacacacacatacacaaagttaaaatagtttccaatttatgtagccaaggacaatggaatttatcagaagtgaagtgcccctctgggcagngagctgagttcagtgcctttaaaatgaatttccaactctcatttcttcccatgatactgaagtacaaaatatccatctaaaatagaaattaaagtcaagaaggcacacagaaattttctagtccaaggacttccttttataaatgaagaatcttaggctcaggtaaagtgacatacccagagtcactcagttgtcccatagagaaccaggactcaaaagtcaggtctgcccactctccctgaccttgtttcccctcaccacaccattcttccatttatataatgcatcctagagattgtgtcaagatatatgactttgtgtcgcgtggaaagcacccagtttatccagcaggagggggatttccacttttattgcaaaacatgcttgcttgatgcaatgcatttcagatctagaaaaaaataatgcaagcaagctacatttacagatgtgtaaacaggcaaaatttccagaaccgtccaattttacttttccaaatttatggaaccaacccagattttttaaatgaaaatactaaaaccatatgtaaccgtaagacaagctaaaatgtaagcagacagcctgggaagcactgccctactgtacaggtgtgatattaagcacaagccatcctctggcctcttatgagatgttgttattctctgaaaaactttgatggaaaaggtttctgttaggcttagactgaattagctaaatgaccatgccacagtattattgtatcactcttctcacacacctaggcactggttgtggatagttgccatggtgaccaatcaagataatccagatgacctaaacaaatgtctgtatgcagctgacactgctattctccctcacagtcttgtcaagagccacagtagctatggcagacatttggttgatggtttcatcatttcctaatacgagagtctggcactatgttggagagaggaatcacttcctcagagataggttcctttcaactcacatgtcaacagttactgtacaaaaagctcagaatacagtaatgattagagcttgacccctgactttaggaacttagaaccaaagcccaaagtcccaggccaagggcagacattgtgagcagcagaagggtgttttttatggagagccccataaatggatgggtgtagaccttgaagtctgagatgggaaatataccagaatgctcaatgcatcagacatgaagccccacgggcttccatttgacatgctggcaatctgaaggacaaagggcatgggttatttgggccttttccccactccttcaatatggctgaaagtgccagtggggattacaacctaagaaaccctatgccccttcctgagggcttgattattgaatcctgatcttcctggaatctttcacttgagatgatcacctgcctaacatccaacatgttactatgctcttctttatgtacatgagttactggaaaccaacaataaaggagagtgagtcataaaaaaaaa

SEQ ID NO: 98622 - DNA, 354 bp, Homo sapiens
ctgatggctgcctctcgttggtcaaatccaaccaaaagctaagagctggagagcttgggtggtgcatccaaggaggcttgcttcctggggcacagaagggagagtggagaaggatggaaagtggctctaggggaggaaatggagaacatccagaactttatgtcacctctggtgcttgaaggcctttctccagggagacaaaaagtttgtgttggctaaagctccctggttgctcaggagccaagggtcacataatgtgccaatgggggtttttgcctctgaaagcctctgaggtataattactgcaatgaaacatcccttttctctctctcctctgcccacctccatgccagg

SEQ ID NO: 98623 - DNA, 1086 bp, Homo sapiens
  misc_feature (392)..(392): n is a, c, g, or t
atttgataatgacttcttcaatcttgttcaggtgatctgtctttctgggaaaataaaaccctgacatctttttttctgaaaaactatacttcctaaaatactaagacttactgtttttatctatgcatatagatctaataagagtagtagggcattgggtactactggcaatagatttgtgaataaataatgctgtgctcttgtatgaaactcttttgttttcctattaagtagtgtatcttctttgaagtttttgtcttcatttatttgttgggggtggatggagggggatgaatttgcactggcctggttcatttttgacatgtcatcaatgtccagtgggcatcggttggaagtccagtcacctttagacctgcagcctttccctgtgncaacatagtgacagtccttgtcctctaggaggagacatggcatgctaaggcagagggctttatggttcctgggggaataaagcagacctctaagtaacttttccaattaagatagaatccagtgcttgttttatgagaacagctgagtaatccggtatatatataacagatctcttttatgggggctctgagagctaagttgtcaggcattccctatatacttgtctggcttccagtattccttcctagtcatctcatgcacattctcgtccccttaatctctcacctccaaacattgtagagggagggaaggcctttattcccattcctaaaataaataaataaaaatcaagtgtcatttatcagttatatggtttaaattattggattattttcccaaaagaattaaaatataaacaaatatgctttcatttgaaaccatagatagtagttcatgtatttttttgtttgtagaggtagagaaggaaaagaagtataaaaagaggtccaggaggccgggcgcggcggctcacacctgtaatcccagcactttgggaggccgaggagggcgaatcatgaggtcaggagtttgagaccatcctggccaatatgatgaaaccccgtctctactaaaaatacaaaaaaattagctgggcatggtggcgcatgcctgtaatcccagctacttgggagg

SEQ ID NO: 98624 - DNA, 450 bp, Homo sapiens
aaaatgattttttctgcaaagacaagattgaattgggcattctgaatacatgttgttgagataagccaaatatttggtcctagaagctgagaggatatgatactgaatgattatttagcactaaaggtttatcttcaaagaggtcttgaaataagaatatgtaattaggctgggcacagtggctcacaactgtagtcctagcacttttggaggccaaggcaggtggatcacttgagctcaggagttgaagaccagactgggcaatatggcaaaaccttgtatttttgtagaaaaagtataaaaattagccaggtatggtggtgtgtgcctgtagtcccagctactcagaaagctgaggtggaaaaattacctgagcctagtggggtcaaggctgcagtgagctgtgatcaggccaccgcactccagcctgggtaacagaaagagtaagac

SEQ ID NO: 98625 - DNA, 440 bp, Homo sapiens
ggcaagcaaaccaatctgattcgatgttaacattggaagtaactatttttaaaattcattcatgtatacactttctccatagctttctattttaaaaagtcaattgaaaacttccaacaaactttatcataatgcaactagtgggaaaatagatttttctataccttcatctgggttaggttttgtgaaaggtggttgggtgaggcgtggatgtggaagagggagatcagttcagtgtaaggtccagaaaaagcaataagatctgggaaagacccagaatgaaagccaagagagtgctaaccagctgtggttcctttctatctaggtaatttctccacaacttctctcatactctctcgtagacaggcagcctttattctgcatcctctccacaggcatgttatttgcatcacattaatttacacatttgcttgttccct

SEQ ID NO: 98626 - DNA, 672 bp, Homo sapiens
atcaggaaagtaacatcttttaaacaaatatttctacattccacatttttaaattaatttgaagttaaaattattgttttaagtactgtcaagtatatcttcaggcaagaatactcaaggtagtatttatattttataagttttgttttttttttttcctcagacctcatgatttctagtgacaaggtactttgtgaatttgtattaacttgaaatttcactgcaactgaattagctaaatacctttcaaaagaaatgactaagcagccagaacagggatagaattacaaagttttcaagaaagtgcattttaaacaactaagttcaaaactatttttcttacactaaaagtagggaacattattattatttttaacatttgaaaatgaggttaataaatagataactacatttttgaaattttatgtaattgttataattaatcatttttcgtggtgagtagttggtttgatttttttttctttttagttagcaagagggattatttttaaggaaacctagctgttaaatatttctaatgtaaatagttgttacagattttagtcatttagagttgttcaccttcaatgaccagatctaaatttgaattaattggtgcctcagaaacttgaaagccgtcaaaattattcctgtaaccagtagcatcttata

SEQ ID NO: 98627 - DNA, 299 bp, Homo sapiens
ttgtgtgatcttagacatgtcccttaacctcttgggcctcagatttctcatatataaaatggagctaataataccagctgggtgcagtggctcacgcctataatcccagcactttggggctgaggtgggtggattacaggcatgagccacctcaccgggccttttttcttttctttgcttttatccttttcaaaacctccagtgacctcatactgcagtgggctacgtgttcttccaagggtgcagtctgatagggccacctttgcagagagactttcccacagactttgatttttatt

SEQ ID NO: 98628 - DNA, 301 bp, Homo sapiens
ccccctgccatatttctggcagcagtcacagcccccatggagcagggcagcccctctctcaacactaccgcctcccctatggctccaggtacatttttggtcccctagtcccctcaggcctaggggtggtgacagctctcagggcttgttagcaccggggaactttgtcctgtgctggctctcgggcctgcccacaccctgtgatggtcccttactaaactcctctccgttgcacccccggaacgcagcagctcttgtctgctggtgtctttaactcctctttcttactgtttgccaggaa

SEQ ID NO: 98629 - DNA, 401 bp, Homo sapiens
atttagcttcaaatacattgaattcttggtaatatagacatgaatattttccattgtataacagagttttcacctgtactatggaaacctattgtgtccttcattcttgcttcttgagtaagatattgacataagaataaataatgtttaggttatttcttctttataaggaagtataacaatatattgtagtatgatccataattcccagagatccatgttaatttaccttgccattacagtgtaacaaataatagtgtagaagttacaaaaagaagggaaaaagcatcagagtgaaagtttagataagagttatttaattattcacaattaagaaaagggctttaccctatagttgtttattatttcatggttttgcccaagtcgtttgggcactcttg

SEQ ID NO: 98630 - DNA, 636 bp, Homo sapiens
tatttccctcttcaatgaactcgcaacctcagaatgcatttgtgagttctcttgcagtgtaaattatgagattattcctaaccttgtcaggttctggtgacatactgcctaccataatataatagaagcaattcataatttttttttttttttacctgaactagtttcaagttctgtggctttgcagctgccattgttcctgcttcacacagaacattcggtacaggggatactttatgggacagaacagatagttgaaagctgattttacttgctaattctcccttgttattctggcattaaggttgcattagaaggatgcaaagatgtttgatgaaagtgatctgtgctggggttggtgctctgcaaatgctttaaaggtgtggcacatgacattgagccagtgcatccaggtggagcctgggacagacataaaaccctaggttggtaaacacctgtcacaggaagcctcatcaaggaattcttggggagtggaacagtggagcaccctgcaatcctcacaggcagcagccatagtaagcaatgttcagcatttgctgtgcctcagagacacacacagcataaccctacttcagcagctcactgcagaaaatgaaccatatcccaccaaacgag

SEQ ID NO: 98631 - DNA, 421 bp, Homo sapiens
ggtcgacagtaaccactccccaggtgtgaacacttctttatgttttcctccagaagtgctttatgtagagtgtggagctcttctttcattcctttgttttagttatcagataattttctttctgaagtaattttctagtggttgtattatttatcaatagtgtcaactatggcttttcttaactttaagatttttttcttaaatcacactttttttctagagcatttacgaaagatttattttttcattttaaaaaataaggaattaggctgggcgcagtggctcacgcctgtaatcccagcactttgggaggccaaggcatgtgaatcacctgaggttaggagtttgacaccagcctggccaacatggaaaaaccccgtctctactaataatacaaaaattagctgggtgtagtggtgca

SEQ ID NO: 98632 - DNA, 705 bp, Homo sapiens
tgatgacattacgctaagggaaagaagccagacacaaaaggacaaatattgtatgactccacttatatgatgtctctagaggaggcaaattaacagagacagaaagaaagtagattttcagctaccaggtgacaaggaaaggagggaatggggagttacagcttaatggttagagttgtttttttgttttgttttgtcttttctttttttttaggtggagttttgctcttgttgctcaggctggagtgcaatggcaccatctcagctcaccgcaacctccgcctcccaggttcaagcgattctcctgcctcagtctcccgagtagctgggattacaggcatgcagttagagtttttaaggtgatgaaaaagttttggaaatagatagtggtgatggatgcaaaacactgtgaatataattgatgtcactgaattgtacactaaaaaaaatggcaggtttatgtcatatatattttaccacaattttttttttttccttgagacagaatctcgctgttgcccaggctggatgcagtggcgcaatcttggctcattgtgacctctgcctcctgggttccagcgattttcccgctcagcctcccgagtagttgggaccacaggggcatgccaccacacttggctaatttttaatttttttttggtagagacgtgggctttaccatgttagccaggctggtctcgaact

SEQ ID NO: 98633 - DNA, 390 bp, Homo sapiens
tgatgacattacgctaagggaaagaagccagacacaaaaggacaaatattgtatgactccacttatatgatgtctctagaggaggcaaattaacagagacagaaagaaagtagattttcagctaccaggtgacaaggaaaggagggaatggggagttacagcttaatggttagagttgtttttttgttttgttttgtcttttctttttttttaggtggagttttgctcttgttgctcaggctggagtgcaggcgtgagccaccgcacccggccagaacttcatccctttttatggctgaatgatgacccattgtatggatatagtacatctggttaatccattcatttgttgatggacacttgagttgtttccaccatttgcctaaagaa

SEQ ID NO: 98634 - DNA, 345 bp, Homo sapiens
ggctagttgaacatttccacactcattgtctttatctatatatattgttatagttggtcttctttcatcatttggtttaatactttctggtttttgtttcctcttttttctatttttcctttatagatggtttgttgactattatctttggtaatttcaaagatacatatgttttatttcgttatataaatagttatcctaaagtttttttaaaaatattccctacttccatagctattaacatttacaatatttataatgtcacttggcattatattgacaactattgacataattttaataacagaattcattttttacttccatttataggaaaaggaaatt

SEQ ID NO: 98635 - DNA, 815 bp, Homo sapiens
caggcgtgttggtgtgcacctgtaatcccagctactcaggaggctgagatggaagaatcacttgagcccaggaggcagaggttgcagtgagccaagatcacgccactgcactccagcctgggcaacagagcaagaccctgtctccaaaagaaataaaattttaaaaaagactaaaaaacaatacaaatgatcagtgaaataaaaagatttgaaaaaataaaattgacaaccactagtaaattttcccagacacatataccaacatagattcaagaggaaatagaaaacctgatcaaacagaccagttatgagtaattaaagtgaatctgtaattaaaagtctcccattaaagaaaagtccagcacttgattccttcactgcagaattctgccaaacatttaaagaagagctaataccaattcttctcatactcctccagaaaactgaagagaagggaactcttctgaactcaatccacaaggccagcattaccctaatagcaataccacatgaggatacaacaaaataaagaaaaatatagacaagtatccttgatgaacataaatttttaaatccccaacgaaatactagcaaactgaatccagcaacacattgaaaagagcattcatgatgaaaaagtgggatttatcccagggatgcaagaatggttcaacatatgcaaatccataaatgcgatgcatcacatcaacagaatgaagaacaaaaaccatgtggtaatgccagtagatgcagaaaaagcatttgataagtggcttcatgatatgaactcttaacaagttaggtatagaaagaac

SEQ ID NO: 98636 - DNA, 242 bp, Homo sapiens
agtagaggtggggttttgccaccttggccaggctggtcttgaacacctgacctcaggcaatctacccactttggcctcccaaggtgctgggattacagacatgggccactgtgcccagccccattttctatttcattgctttctgtttttattttttattatttcctttaatcctgttactctcatcagtaaccattgtttttagattctggtttatcttactattgtttctttttgcaaaa

SEQ ID NO: 98637 - DNA, 252 bp, Homo sapiens
cagagaacatgcatgcccctgctcaccctggctgggagcctctttcctacctaactgtgcacccgcagcacctgttacacttccttcagcaacagcagcccaagaaagctatggcaatgacaccaaggatgttctacataaaaaggcactggcctaaccctacctgctcatggtagaaaaagagaaaattatgtatgcttccctttagaaaatctatgtaataataaactaacgtgtgttgagatttcctga

SEQ ID NO: 98638 - DNA, 376 bp, Homo sapiens
actttcaaaggtccctctggttgctgcatgatggtctaggggtaccagggtgcaagggaaagacaaggtgacggcagtgacctgctgcaggggtggccaggaattggcagtggcaatgaggcagtgggacgtgctcagatctggatgtgttctgaaggtagggctgtcaggatttgcaaaccaaatgggcatggagtgagaggaagagagaagcccaagtgagtcagataattggtccaagcgaacagaaggatgcaggcaggcccaggcacggtggcccaggcacggctcacgcctgtaatcccagcactttgggaggccgaggcgggcggatcacctgaagtcaggagttcgagaccagcctgaccaacatggt

SEQ ID NO: 98639 - DNA, 340 bp, Homo sapiens
tctcacccagcacacaggttttaaaatcgccttctgtactggccactcggtggtttctgtactcagcctggcccttcctccttaaggccagatgtctcagactgactccacatgagtttccacttagatgtctaacaggcatgtcaaactcaaatgaccaaaaatgagctcctggtttccacctgcacctgcttttcttagggttttccccatccttgtaaatggtgctttcattattctagttgctcaggccaagaaccttggaggcatttgtgattctgcctttctgcgattcataccccagtttgtcaagaattctgttggctgtatcttcagagta

SEQ ID NO: 98640 - DNA, 211 bp, Homo sapiens
cctccagggacaccctcccagcagtgtgcttggctcccacatcagcccttccctcttcctggggcgcctgcccatggctcctcccaccctgagcatagcctcctggacccacctctgcccccatttatagcacgacttcccgaccccctctcttttctccccatttcccttgatccgtctattgcatgaggcttctgcggctggcactgac

SEQ ID NO: 98641 - DNA, 1735 bp, Homo sapiens
ccccgcttccagtcagagttcaagttaaaacagaaaaaaggaagatggcaagaatattgttacttttcctcccgggtcttgtggctgtatgtgctgtgcatggaatatttatggaccgtctagcttccaagaagctctgtgcagatgatgagtgtgtctatactatttctctggctagtgctcaagaagattataatgccccggactgtagattcattaacgttaaaaaagggcagcagatctatgtgtactcaaagctggtaaaagaaaatggagctggagaattttgggctggcagtgtttatggtgatggccaggacgagatgggagtcgtgggttatttccccaggaacttggtcaaggaacagcgtgtgtaccaggaagctaccaaggaagttcccaccacggatattgacttcttctgcgagtaataaattagttaaaactgcaaatagaaagaaaacaccaaaaataaagaaaagagcaaaagtggccaaaaaatgcatgtctgtaattttggactgacgttttaagaatttgttaccttacagaagagcaagggcttaggggttggaggtggcagataaaagaggattttcaactcaaatcttgtttcctgctggcctggtctgcccacgagctagagcggggaaatgttgagctcaaatgggtaaattgagaccagaaaattattttttcaacctagagaatctcctcttacagggggatgcatataacagatcatgtatgtgtagttatttctaagtagtaattcttcccagctctttgatttgccatatataaaataggtgggtcgtatgtcttccctttagacatgatgttttctactcatttgtctctctggccaattgaattattaataaaaggtctgtattatcaaagagtattctagtatttttgttacttttaatatttgatgccttttggaggtaaagctgttgggggaagaagagtttttggacccatagatgtttggatgatgtctctaatttgtcatttagaaaaatctcaaaaatgatttcagttgaataacttgccttctaaatgatcaatttacttctcccccaattttaaagaagtatgtgtatatttaataggggaaggtagtttatggaaatatttttaatggaatagttttcccttaatatgtatccttgctggatattattcaagctgcaagtcatcaaaagacccagaaaaaaaaaagtctgtaggttattttctctacttctatttcaactttgaatttcctcttcctgtgcaaattcctctagtcaagtgtgatatatcaagaaatctgaggaggatgcaggttttgtggtcctgatgggcccacaagtttttctatatttaactggaaatatgctttgattttgtgttattaatataattcttttgatgtagtcatgagtttttctttgtttgcatataattaaaatgcctctacttaatgtcacaattctgagttttttctaaaacatttttcaccttagagaatgaaagtgtgggggagttgggaatgaagcttgtttttcagttctctgtgatctggacatcccctaagcatgaagaagagagcagaagagggcatttagggtgagccacagacttggcccagggtcattttttagctctgtcagctgtgattttgggtgaatatctttttaccaaattcttatgtaggtcggtcaagtaaagtaccaaaatgcaaaac

SEQ ID NO: 98642 - DNA, 847 bp, Homo sapiens
ccccgcttccagtcagagttcaagttaaaacagaaaaaaggaagatggcaagaatattgttacttttcctcccgggtcttgtggctgtatgtgctgtgcatggaatatttatggaccgtctagcttccaagaagctctgtgcagatgatgagtgtgtctatactatttctctggctagtgctcaagaagattataatgccccggactgtagattcattaacgttaaaaaagggcagcagatctatgtgtactcaaagctggtaaaagaaaatggagctggagaattttgggctggcagtgtttatggtgatggccaggacgagatgggagtcgtgggttatttccccaggaacttggtcaaggaacagcgtgtgtaccaggaagctaccaaggaagttcccaccacggatattgacttcttctgcgagtaataaattagttaaaactgtgcatgtctgtaattttggactgacgttttaagaatttgttaccttacagaagagcaagggcttaggggttggaggtggcagataaaagaggattttcaactcaaatcttgtttcctgctggcctggtctgcccacgagctagagcggggaaatgttgagctcaaatgggtaaattgagaccagaaaattattttttcaacctagagaatctcctcttacagggggatgcatataacagatcatgtatgtgtagttatttctaagtagtaattcttcccagctctttgatttgccatatataaaataggtgggtcgtatgtcttccctttagacatgatgttttctactcatttgtctctctggccaattgaattattaataaaaggtctgtattatca

SEQ ID NO: 98643 - DNA, 900 bp, Homo sapiens
ccccgcttccagtcagagttcaagttaaaacagaaaaaaggaagatggcaagaatattgttacttttcctcccgggtcttgtggctgtatgtgctgtgcatggaatatttatggaccgtctagcttccaagaagctctgtgcagatgatgagtgtgtctatactatttctctggctagtgctcaagaagattataatgccccggactgtagattcattaacgttaaaaaagggcagcagatctatgtgtactcaaagctggtaaaagaaaatggagctggagaattttgggctggcagtgtttatggtgatggccaggacgagatgggagtcgtgggttatttccccaggaacttggtcaaggaacagcgtgtgtaccaggaagctaccaaggaagttcccaccacggatattgacttcttctgcgagtaataaattagttaaaactgcaaatagaaagaaaacaccaaaaataaagaaaagagcaaaagtggccaaaaaatgcatgtctgtaattttggactgacgttttaagaatttgttaccttacagaagagcaagggcttaggggttggaggtggcagataaaagaggattttcaactcaaatcttgtttcctgctggcctggtctgcccacgagctagagcggggaaatgttgagctcaaatgggtaaattgagaccagaaaattattttttcaacctagagaatctcctcttacagggggatgcatataacagatcatgtatgtgtagttatttctaagtagtaattcttcccagctctttgatttgccatatataaaataggtgggtcgtatgtcttccctttagacatgatgttttctactcatttgtctctctggccaattgaattattaataaaaggtctgtattatca

SEQ ID NO: 98644 - DNA, 703 bp, Homo sapiens
tgtgtgccacatgatattttttattaaattaaaaacatttaaatatgcatatttaggaatgcttataaatacaataacactatataaaaaggaaagcaagggagtggggattcaggttgatggctgcctggcatgggaggagttagggcatggtacgggtaggggcctaatgtggtaggtttatgggtgcttttaatactttaaacaaatggttagctagctagccaggcagcaaagtagacagctctgactgctatgtgaagaatggatcaaaggagtagaagctggagcaggatgaccagttaggaagatgtttagtatccagatgaaggagggtgaggcattgttctcgaatggtggccattgagatggagagtattgaacagaatcagaatctattctggaggtaatggagaacttgctctgatgacttagatgtgggaggcaaggaatattctattgtacaaatattccataattaaactctgctcttatggtatatctaagttgtttacaatattttttgctccaataaaggtctaaaatgaacatccttgtaccttaatcttcatacaaattcaattaatgtctttcttttttatggtgtgtgatgtgatccaattttattatatttaagattgtattttttttttagagcagtgttaggcacacagccaaattgaaaggaaggtacagagatttc

SEQ ID NO: 98645 - DNA, 626 bp, Homo sapiens
acattgtcatagggaagtagagagtagggggaggggccaggcatggggaagaggaggggacaaggggaggagtggggagtcttatgaggaggccaggctggttgaaacaaaaaaggggcatttctttagcactcctaaaaactttcccaaactgacctagcaccctcctcatcttctcatgtcagttctggtgagtcacatggcaaggatagggtgtgtcttccaaagcctttctctactgccaacccattcagtggtacattctgttttcttccacctttaaccattatctagttgttgcatgtcttacctacaatctattcatggtaaaaatttatgctaatatgtcatggccatatttaagtgtctgtggagatgtcaatcatccagttcccacctacaaatcctctaagcattttgaaaaccattaacttcttggcttactaccaagaaacttttttattccacgtaccttttctagtgtccatttagctctcctcagttttctattctccagtctgaaaccaccgccttcagactatgaagacttcagtgaagggctgtacatggtggctcatgcctgtaattccagcactttgggaggctgaggcaggaggattgcttga

SEQ ID NO: 98646 - DNA, 745 bp, Homo sapiens
ttcaagatttgttgctctccatcaaatacaactctcaggaactaagaaatcatttatgaaaaataaaagaagaaagataaaatgaactttgagaatttgaggtgaaggctatccaccttagaatttacagactggaacataccttaagaagaaacacttttatggcctctaagatttatgatctactggtatactgaaaataatcggccgtgggaattcaaaggaagctacttgtagagcacccattgggtgagctaattttattcaagccataaatttcactgaaaaaaatgaatgaaggctgatgaaaaacttcatgctctcaaagaaaagcaaaatcaaataaaacaaaatttgcccagagaacccaatcatcccagagaaaggtaatgtttcaggatcacacagacaaatgccctcatgcagatatcaagaaagagacactgaaggcacatactggtttttcaaagtcaaatcttcaagcccaggaaattgaaacagaagaaatacaaaggagtcccaagagatataggtttatacagagtttcttcgagtggattttgaagttctttgaaaaaaatggcataactgccaggaaaaatacttgtctatctgtgcagattatacttgcaataactcactttaaagtattctattaccaaatgattgattattacttgactttatttcatgataggtataggtcaaagtgcagatgtacatatagatgagcgtgtaatgctat

SEQ ID NO: 98647 - DNA, 342 bp, Homo sapiens
agtgaatttgaactcaggacactctgagtttaaaagtccattctacacttagccgtctcctgttactaaatagaaaaagttcctttagggatcaacaagaatttgttaagtgcctgccttttccatggattactttttaacagaacaaatttacttaattttgttcatttttcttcatgtcttgtcaaaaaatgatttaccatccttatatttcaatcattgacagctgacaagaacaattaaattcttgccaactatagctattttttccttaagatgtggccttaaaaatataaatactgtaaaataataattatttttgtgaaaaagggttttctttgg

SEQ ID NO: 98648 - DNA, 134 bp, Homo sapiens
ggcggcgaggctggcgctgggaagaggaagaagaacattcgccctcctcctaccagcgcgcgggcggcggcggcggcggcaccggggtcacgaactctgacctttcactgacaaaaacaataacaaaccccccc

SEQ ID NO: 98649 - DNA, 490 bp, Homo sapiens
gctatccttacaggcgaaaatctgaaaccatctccagaagacagttcatagcggtgggcctaatattgactggaaattacaccttgacgagttagttttgagtctctgttaacagcacagggtatggctggatggccctcaagactgactgcgacaaattataaagcaacgtcgatgctaacgccagaaacaccaaggacgaaatgcttgagcccctacagaactggcaggaagcagcagcttaggaggctccgaaagatgaaaacacaaagacagaagcacacctagaaactggagggaatccacatggtgtgtttgttaaatgaatgaattaaagagagaataagtagactcagattgccacctggactcaggacatttatagcaacttaatgggctgaagttttgcaaaagttgatcctcagtgctaaacatcaggtccagcagaagggttccccagaggggtgtgggcatgggaggatgagagagg

SEQ ID NO: 98650 - DNA, 280 bp, Homo sapiens
tggctcaggaacacaggttgcatttagttgtcatgtttatttgcttttaaaaagttaacattctcctcgttcaaaattcacatggtgtgggaggatattcagagaagactctgcggctcttgttccccctcctacgctgttcacttcctgagggccaccagggttaccaatttcccatgtgttccccagagatattctgtgttgacacagctagtcatgtatgtactttctccctcttttatgcatacctagtttattctatgctgttctgtactcgctt

SEQ ID NO: 98651 - DNA, 328 bp, Homo sapiens
acaaaggtcttagatgaaatgactacttacaaagataattttccccaaattaatagagaagttcagtgtaacatcgatcaaaattcttgttgtttttgagggactttgataacttttgatatataataaagccccataaatgattaaaccagctttgaaaaataagtgcaaaggagctactaagacattctataaagccataataataaaaacagtaaggtgctggcacaagaatgtgcaaatagaccaatggaacaaatcacatcactcaagacggatccatgtacatgagggaacctgaaatcagatgaggtaccacagatcaata

SEQ ID NO: 98652 - DNA, 318 bp, Homo sapiens
aaggcttctgctccagagcagctgccctgggacaccaagaagacgctgggtctccttcagggatccagggttgcttggatgctgggagccgacctgcattcgctgaaggaagtggagcccagacctcatgacagataattccagcaaaaccagtacctcgcctactgaaaaattaccttcactcatcatctaccttgcttaaactcatcggacatttctcagttttctactccccggtgtgctttaagctttgctataaagcatcaacatctatcatcaccctaacttcttaaatcaattttagtgcctattaaaagt

SEQ ID NO: 98653 - DNA, 1285 bp, Homo sapiens
gaactcttggaatggcataccatttgacctttcaaaggttctccagcagtatttaactgatgcaaaaggaacacacttgcaattttctacttttgacatgacagaccctcctcttagttcacacaatgttcaaaaggcacaagtccctcgcttcggaacgcaagagagcattactttcccaaagagctacacggttcatactgaaggatgatatgagaaattttcactttttgtcaaaacttgtactctcagcgggccctctaagaccaactccagcagtcaaacattcaaaaacgactcactttgagattgaaatatttgatgctcaaacaaggaaacagatatgtattctggataaggtgacacaatcatctactattcatgatgttaagcaaaagtttcacaaagcatgtccaaagtggtacccttctcgagttggtctgcagctagaatgtggcgggccttttttgaaggactacattaccattcaaagtattgcagcttcctccattgtcacactgtatgctacagacctaggtcaacaagtcagttggaccacagtgtttttggctgaatacacaggacctctgctaatatacctcctcttttatttgaggatcccatgtatatatgatggaaaagagagtgctagaagattacgccacccagtggtacacttggcttgcttctgtcattgtatacactacatccgataccttttggaaaccttatttgttcacaaagtttctgcaggacacacacctttgaaaaatttgataatgagttgtgccttttactggggatttacttcttggattgcctactacattaatcatccactatatacaccaccatcatttggaaacaggcaaatcacagtatctgctatcaattttctggtcataaatcacctgccacactttgtaaggagctctcacatgaccctctcttgcttcctctctctctacatatctttagttaagagtttaggtaagaacgtcctccactgtgttggctttgaaaaggagagatctttttttttgtcttttcagcatatagtttggcctagcaagaactcattacttgtttgaatagatagcacagattatttatgtatttggaatttcttcaacaatatgttgaaaatatatcacagccttgtaattttccaattgtgcatactgttcaaggagaggaattctgtgattcacgtgttgtaacagcgttatttaatgttgtatacagcgtactacaacccctgttgtattaagactaatgttctgat

SEQ ID NO: 98654 - DNA, 574 bp, Homo sapiens
ggtttctgtataatgctataatttgattcaaaaaattaaattacataacaaagtcataagaccatgttaaaccataccagagtaatgcaatcgacgaaatccaggatgtagaaagcgtcacagaacaaacagcctggcttcttcaaccaataaattgcaagtaaaggaaacaacaaagagatgggccaatgctatagattaaaagatacttaaaagatacatcaaccaattgcaacgtgtgaagcttttttgggagcctgattcaaataaacaaacagtttatgaaacaatggaaaacaagtaatttatgaaacaatcggaaatttgaatgcagactggatattagatgatattaataaagtactgttaatttttaaatgtatggtaatgctatcgtcgttatgtaaaaataaagaatccttttcttttagagatgggcactataaaattacagatgaaataatatggtgtctgggatttgctgtgaaatagtatgggagagagtatagaaagaagtttgttcatgaattgttgaagttgactaatgagtataccgctctctctttatttttgg

SEQ ID NO: 98655 - DNA, 587 bp, Homo sapiens
aacactatcagaagaaaaagaagaaagcaagtcttaaagcctcagggaggccatttttgcctgaatttgaaatgagggtgggccagatgagtatgtttaagtggagagtgcttccagctgagatgatttgagtctgccctaactgctctattgagttctcgtgccctcatcagctgagagcagggaatggaactttaatgcaagaaccacttttatctactcttttttgtacatgtcattgtttcagttctgatttcaacaaacatgagcaaaccactttgactcaaagcggaaagagtgaaaattctattttgttatgctactggtgttcaattattagtttgtaccatttttaatttatgtcagttgatgcatctgaaaataagtgcttgaagtgttcacacccttactttttttttttaagattcctagaaggaatctttggttaattcagattgagcagttaaagtttttgctatttacctttgtgcaggctggcatatgctaatttgggggtggtaaccaaccaattttatctcatttaagcgttacattttgaagactgtgaatatacttcacagtagatc

SEQ ID NO: 98656 - DNA, 543 bp, Homo sapiens
gaattcttgagcatcatgcctagaacagtttcacagatgcaataaaacacgtctatctggctctcaaaagggaggcctcactgggaggtcagacattggttaagtctcatggttgagggtctggtccttgggaatgcaggtttagaaacatctcaatttattcgttggtgggggtaggaggcagaggaatatcagaagaggggaaggggggcaagccttgaaggtgcattcacttcggtaaaatttacatatctcacaccaaataaaatactgcctgagaaccaaactacttacatgtgtctattcagaatattaaaatgcaaattaggtttttggtaagcatagaacaagggaaagttaatattcttaagggatgtttttgcaaattatagcagcataactctagtaatgctgttaattttgtataaatcagtgttttccaagtttatttgatcacagaacacttgttatcaaaaatatcttttaagaccttgtaaaagatcttggcaaattcctataaaattaacaggaaatttacaaaag

SEQ ID NO: 98657 - DNA, 516 bp, Homo sapiens
acggacccgactcatggtgcccagcatccctcatggaccctacagtgctggcctgtcccctgcaatggcgatgagccctgggagccatgcacccaggtttacacgttagtggcaggaggacagtccgctgtctggggaacaatatgtttgcctgccccttgtagggggagcgagctctgttttctccctcctgtaattgttaccatctgtttccctccatcatgtttgttgatgttttcttgttttaaaactgaaatgagtcagattggaggctgatttaggaaaatgtatctgggaggaaagctcaaagtggccatgggggactctgtgttctggagtcatcggaaaagaaaagattctgtggggccagccgaggggtgtctgccagctactcctgccctgtgggggccggagtccccccgcagtccaagaaggctggggctgtgtgggtttctgtggaatgcatgtgtgtgggctcagttatgtaagtaggtgagtggacatgtgcacacttgt

SEQ ID NO: 98658 - DNA, 360 bp, Homo sapiens
aaggagataattgacatacatgtatatacagacttatgtatctgtatataaaagaaatatcaaaaataaaaatggtacaaataagtctaccctcactacctctcccctccgccacaatcccacttccacctgtgttagtactgacatcagtttgctagtggtttgctttgatttataagtagtatgtacagcatgttgttcagcaccttgctttccccgatcccatttaaaatccattttagacatctttctatgtgagtgattactatacatttcttggtatctgattcaaatgtctctatcctccataaaaaaatctaaaattgttgcttacaaattattttttttccagtttccatc

SEQ ID NO: 98659 - DNA, 340 bp, Homo sapiens
gtgaggtgtgtggctgccctgtctctgtataggtagacacaggcccacaggtgcagtggccatattatcggtgcgtgtttactcccatcgcatgtaccattcctctcacaaacacctgcttcctgatcatttgtctttttaaataaaaatatgatatttgagattcttttattctctttaaatatttgaatacagagtctatttgaaggaccagtatattgaatagcagtaatatttgaaggactagtcagctgtagaagccttgacttcagatcttcacccaagaaactctgtgtatttgcttttcctgggccactcagatagacaattgtgtttttga

SEQ ID NO: 98660 - DNA, 1188 bp, Homo sapiens
aaaaaaaaaaaaaaaaagaatcaccaaaataaaaaatagtaacaatactattgtcaaggatgcaaaggaactgtaccactcaatcactgctgtgagaatttaaagtggtgcagccactctgggaaacagcttggctgtttttttttatgactgaatgtgcaactactatatgatgcagtaatttcatttttgcacatttatcccggagaaatgaaaacatatattcacacaaaacctgtatatgaatgctaataaaagtcaattggccaggtgtggtggctcatgcctgtaatcccagcactttgggaggctgaggcagtggatcacctgaggtcaggagtttgagaccagcctggccaacgtggtgaaaactcgtctctactaaaaatacagcaattagctgggtgtaatagtagccacctgtaatcccagctactggggaggctgaagcagaagaacctcttgaacccgggaggcagaggttgcagtgagctgagatcgtaccactgcactccagcctgggcgatagagtgagactctgtctcaaaaaataaaataaaataaataaaaagattagataatctgcaaagttcctgtgagcgctgtcattttgtcactctggtttttcagattcttcccctggaggctggagtttccaggatgtcaaaattacctctgcttgggtgagctatttcaagcagctgggatacctgtgtcactcctgctgtctgccagtgactgcccaggtgtctgctggttcctccccaggagtagggaggaaccaggtgggctggctgggatgggtggatatttaaagaccaggccttggacgctgcagcacttctatctctgcttgatgcctgctgccacgtggctggtcctcctcctcctgctgtggctgagccttggggtgaagacaggtgaggagctaggctggcatctgtgctacaggtcaaagagaccccagtctctgctctctcattcattcaatcaattaatctgttttgtctctggcatgacccacctcctgtgacccagcattcattaattcattaatcaaataattcatgtattcagacacttattaagtaccgactatatggttgatgtggcttctttgtgtatccagttttatatctggataagatgtctttggatgatcagcttgggagggtctagtatccagag

SEQ ID NO: 98661 - DNA, 271 bp, Homo sapiens
tagatggcactataaggtatcaatattgaagtggatgagatcattcaggaagagtgtaactagagaagtccaaggactgaatcctggcatgctccaacattttagaggccaaggaggtgagaatgtagcaagaaatctgaaaaggagtgggctcagaggtaggaggaaaatcaggatagtgtggtttctaggaagccaagagaaagttgcaagaatgactgtgttgaatgctgctcagagatgaaggaaaaggagtgagcattcgacacaa

SEQ ID NO: 98662 - DNA, 422 bp, Homo sapiens
aagggtttctcttggaggtcatgaaaatgttctaaaattgattgtagtgatggctggagaactgtgaaagtactcaaaacctttgaattacacactttaaatcagcaaattatacagagtattatatgttgataaagttgtccttttaaaaagaaccattaaaaacataagaacgttctgagagataacaaaagtcctgcctcaaaataaagagtaagtgaacactctttctggagattgctcatgcccctcgcgcctggccctggctgtgcggtccacgcaatgatacccaccgcagaggggctggtgttctcttgggctctgctgtggcttagtcacttctttcagtgtggccaattaagtaatgttttacatgtccatgcaaggagctttacaatgaagaaaaccatttcatagttact

SEQ ID NO: 98663 - DNA, 412 bp, Homo sapiens
ggctgtgggtctaagccacagctttcctggtctgaaacccttagcccaggcaaaggagaggcaggcaactcaattaatcctccctggagacctccctctcctcagttcattttgtgtataaagttgtggtcgggagtgtgacctacagtcaccaagaatccacatggaggccctagggtggtatactgataccaccaaacatccacaaacatcaagaccatacagaaaatcacgacctcaacaaagggaccaaaaatcatgacctcaacaaagggaccaaataaggcaccagtggccaatcctggagagagatatgtgacctttcagacagagaattcaaaatagctgtcttgaggaaactcaaacaaattcaagataacacaggaagggcattcagggtggtatagggtgg

SEQ ID NO: 98664 - DNA, 263 bp, Homo sapiens
ttttccctcggtgcccatgcgaatctgttttctgaggctctttggatcattttaacaaaacctaggtagatgccatgtctcttctgatcactcagaaaatataaagtcctctaatcacttttagttacaaaaagcttgatttcggtattcaaaatattctgaagtaatagttaaagcgccaaacttcatttaaagtttatcctctcctggctcaggctaaggaataggttgctagactgcagagtggaaagggcaacgttttt

SEQ ID NO: 98665 - DNA, 706 bp, Homo sapiens
aaatggaaatttaggtcagctaacatttctgaatgttatttaagggatcactgaaattattgaaaatgtgtttcatatttcatcatgcaaatgtcaaactcaatttctcatttatttatttacagtaatcttcccaatgttacttgaatatctgtcatttaataaagttttactcccctcacatttctggttctcaacaattgaggtaaatcactatatctcatgtccttgaataaactctcacacacacaaatatgtatgcacattatatatacataaacacatatcgtggggactaaatacatgtaagtctaagtatttatgactttttttccctctcatgcctttttaaaaaaatgtatgatctacaatgcattatgggtgaagatacaaatggcagaagtaccggagcccccaactgccttacagctttgtcagggtgaccaaagagcaaaagatgttatacaataagaaaaaggagtgaactagcatagatgggaaaggcagttaagggaaaaaaaatgaacaaaaatgtaatttaagggaacttttagaaacttttgatgaaggttgtgtgctgtacttcctttgatataatattcttcaagaaaacctggatttaaaagtttctgcattcttcaatgttttcagagtcagagtttctttgcatgtgtcaccatgctgacattggacatggcataagaaa

SEQ ID NO: 98666 - DNA, 590 bp, Homo sapiens
ctcttcctcaaacaaacacacaaactaacatttattattttgaatatgaagagggaggagacactgagaagaaaattaaaaggagaaaaggtgaggatattgaattggaaaaagtattctaaaaatatctgtactaactttaaaatgggggtgattttaaaaaatgaaaaatccctctcctttatacacatatcgcctgtgtgatagaaaaaaaacccctaaaatttatataatttcattctaaaggaaagagctttgttgctctcgccttctagttatcagtttagaaatcctgctccattagggttggaatgttaaaaccaagaaaatcattgctgccttttcaagagttgagactttagctttacttttctatgagtctttatttatcaaaggtattctcaggaggtaatgatgaacctgaaactgttccagcctgtgctgaaatactcccacaccatgttgttggaatagatgtaagcactctttgtaaatccatgccagaaagttcttcccatttgaagtttttgccatcagattaagaggaggaaattcccatctgttcagaggcaacagtgaccaaaaaaaaa

SEQ ID NO: 98667 - DNA, 251 bp, Homo sapiens
tctggttttcggacatagcaaatacatgatcacatatcctcagggaccagtaactgatatacatttatagtgtatcagtgtgtggttacgtgtttgatgactagtccttttgtgaaattagttggtaatgtagcagtgtggcatagtggatgttagttgttaaaactgaaaagtggttcattaaagacaatttgtttttttgtgataaaattgtgtaatttttttagggttttagtctgaggatacaagag

SEQ ID NO: 98668 - DNA, 200 bp, Homo sapiens
caccattgccatgtggcccatgtaatgatgggaagatatgtgggctaaaggggaaagagggagatatttgtcatgtctacctgctcatggctcctagacaggatcctttctttccgcctattctagacaagatggctatgaaaatgtttatggttttggttgaattattttaaatttgctggggaaaggccattaaacac

SEQ ID NO: 98669 - DNA, 990 bp, Homo sapiens
tcctccttgaaactgatggcttggaaggcaaaggatttgcttgtagacagtacactttctcctttatatcaggaataatacatctttcttctgaaagtgttggttttgtttactgttttgggagaattctatgaaagtagatgatgttctctatgctttcctaagccttgtcttgtttaatcctcacaataccctcacataatggggtaaaatttatatttcacagacaaagaaatagcagctcagagaatttgaacagactttccaaaggcattctaagaactgcaagagctaggattcacacccaagccttctgcctcctgagccctcgctcttcccaaggcattaggcaccctttcattatttccttaatcatttacccattagtctgatcttcttgccaaaccaaacacctcattgttcagttttatgattaaataaaatttcttgaatagtaattggatatttggctcctggtctttaaattttatgtactagtttttgtttatttttgctttagcaggtttttacaaatttgtatcagcaggacatacaaattcttttgtaattggagctttggtttttatttctttaccaattattcagtttctttgatacatatccaggactgtaaaatatctacttttaaaagtaacagtgaggcaggacttatttcccagtctcaattgataaagtgaaaaaactggcagctgggcgcggtggctcacgtctgtgatcccagcactttgggatgtggaggcaggcagatcacaaggtcaggagatcagtaccatcctggctaacatggtgaaaccctggttctactaaaaatacaaaaaattagccgggagaggtggtacgtgcctatagtcccagctacccaggaggttgaagcagaagaatcacttgaacccaggaggcggaggttgcagtgagctgggatcgcggcactgcactctagcctgggcgacagagtgagactcaatctca

SEQ ID NO: 98670 - DNA, 493 bp, Homo sapiens
atgcaggagagagcactggggttttgtgtgacttaacaatgcacctggcccagtgctgtgcacctgctaaagccctgaaggtctgttagataggaaggctgggtggaggttgtttaaaatagcctatagttatttaaaaagtggcatgcacaggagagggaaatctagaagagggattcattgaattgaaagttgttatatgcagtaaaggatgttggttgtatcagagtctttctttcttcttttcctcgtttgtttaaaacataaaagggattcctctgacctaccccataggtagaaggactttaagtttcacgagcaagcctaactttcaattccttttgaatgagctatgtgacatttactcactgggtacgttccccctcctcagtgactgcaatttgaaaccctgggggtcttttaaaagcgaacagaactctgggccgtgttaatattcagagctgtttacaatggatgcagtttcaaaggctga

SEQ ID NO: 98671 - DNA, 594 bp, Homo sapiens
gacataaatgaccagacacaagatccactggccatgtgagaaacgtttcctgacatccaattcccagggacaccctcttatcacaggctctgtggctgctagaggtaaaggctcatttgggcttagaagctaatgctcttccccagtctaaactgacttcgtatgatctcacataaatctaagcataaagccaggacaacttcttcctacctaagtcagaagagagatgatgatttataacctgggtgggggagaacagtgagccacttcaccaccttcaggatgatccaactatttcctcactctctaaggtggagaaagcgtgtagaggccacgtgctttatacgctgaaggctatttaaaggattacaaagaatgtaaagtcatctgtgatatggctttcgagttataaatgtcaatggcagttaagtctgctgctctgggaactcctccaacaacaggttgacaacagcccaagccgacggctctggaggaggctgacagacagctgctctttcggtagttattcctgagagcgccaagaggcctctccaaaggcagctaggtatattacatgctggagggggaaagcga

SEQ ID NO: 98672 - DNA, 346 bp, Homo sapiens
ttgtgttattttctttggttttacagctgaggaaatggagtcctagggaatcatattacacagatctagaaagtgctgagaacacattttaaaggagaagggcaggacgtttatgcaaactgcttgtacagtctttatgtcttgttatcccccacagtagccttgtgagattaagtggtagtagtagtgatactcctaattttagttaaaggaattgagatacatggggataaataacttgaccaaggtcacactgcaaaggggcagctgctagaacagtctgattccaagttgcttgcacttagtcttggcaaagaaataataaataccgtatttccccccaaaa

SEQ ID NO: 98673 - DNA, 356 bp, Homo sapiens
cctctggcttttcaaggtttggtaagagctaggggtcccggtgctcctctggcttttgtaggtttggaaggaggggatccatctggcctcactctgcctcacccattaaatgctttgcccataggaaagtctgaagataacaccagcatgggaatttatttaaggggtgggaaccacaagctgggacaacctttgcccaagcaggaagcttataaaattcatctcagacagagggatggcaggctgctgccgggggtgggggccgccctcttctcccacccacccctgctggcatcagcagctgcaacagaatcctcctcacacctggtgcttatttataaactacccccttgcct

SEQ ID NO: 98674 - DNA, 864 bp, Homo sapiens
agttcagtgcaggtctgcaggaagggcctgcctccactcatgcaggtacctgggatcacctgtccattggctacactgccctttagggcctccaaatccccagctgaattattcccatccatctagtaggaaaggaaaaaagaatgttgaaggatcatgcaaaatgttttaggggccagtcctggacgtaaaatatgttacattggctagaatgctgttacacattgccacctatttcaagagatgctgagatttggagtcttcttgggtgcccagagatttgagtatcacctagcactgtttctgcttcagggaaatggaagtagaactctgaagctaaatcagaggactccaagcaaatgaagtgactgaaagcaagaatggctcattgcccttgagctacacagaaatgtataggtgggtgtattgggtcggttccctggaagcacaacctcagatggggattcttgtgcaaaagatacacggaggaagagctcaaggaagtaacttgcaatgaagcaaggggagcaagctggagcaggagaaaagatcaggcaaaggcatgctttcagaagtctagcctcggcctcatccacagggagctccagagagtgaatggtaccatgcagctggtcaaccttcttggaggagggagctgctgatagccttcagtagacagcacttgcactagccaagggatgagtgcaccagcccagtggaggggatctgggtagagcacctatgccatctgctataatagactctacgtgtcttctaggaaggacatgcttttccttttcgtatcctctacctgaagcaatatatcacgtactcagcagacgctcaataagtgtttgagaaatg

SEQ ID NO: 98675 - DNA, 234 bp, Homo sapiens
ttgatgcagtgaccacaaatttcttaacactgtataagtcttaaattaatcataacccaacctccgcaaattctgtagaaatagcctcaaagtaggtaatgcagttgggcgtggtggctcacgcctgtaatcccaccactttgggaggccgaggcgggtggatcacctgacatcaggagttcgagaccaggctgaccaacatggagaaaccccctctctactaaaaatacaaaa

SEQ ID NO: 98676 - DNA, 441 bp, Homo sapiens
gaccaccctcccacccaccattggatgagaaaacttttactatgactttagaatgtctcctgttctttaaaaagtatctttattttaaaattaatttttctaactgaagaatattttaggggaatgacttaaatagctataaggaaggatatatttataggggctataaatgcatcatttgtatttgaaatttctagcatccactacagtgtacgaagtgtattttagatggactggtaaaaaccagcagttgcaactgtctgttttgcattccttatgctctgcatctggccacacgtgacttgaacagctgaagcttctctttccaaagctagagccatcatcgtatttatgtctagcctgagatgttttccgatggtatacattcgaattgtaaagcagtgtaatttgtggctctcaacatgccttaaaagtcatttc

SEQ ID NO: 98677 - DNA, 499 bp, Homo sapiens
cacatctcagtgaagtttttcagaatgtttctgtatagttcttgtgtgaagatatttctttttccaccattgcctcaaagcgccaaaaatgtccacttgtagatactacagaaagagtgtttcagagttgctcttgtccgattgcttctgtctagattgtatgtgaacatagttccttttctaccataggccactaagtgctccaattgtccacctgaagattcttcaaaaagtgtgtttccaaactgctcaatcaaaagaaaggttcaactctgtaacatgaagacacacatctcaaagaagtttctcagaattcttctgtctagtttttatgtgaagatattacattttccaccattgcctcaaagcgccaaaaatgtccacttgcagatactacagaaagagtgtttcaaagtggctcaatcaaaagaaagtttcaactctatgagatgaatgcacacatcacatagaagtttctcagaatgcttctgtctagtta

SEQ ID NO: 98678 - DNA, 413 bp, Homo sapiens
ggcctctcctactttttgtagttgttgttgttttaaaccatcgaaaatatgttttggtctaccccgtgcatggtatggggatataaagaagtagaagactagttcctgccctcgaggtccaaacaaactaatactgaggtactgttacaaggcagtgtttgatttgttgtctaatgagtggttaaaacagtaactgctttgactctaaaggaaggtaacatcatcagaggcatattaagtcttttcaggaaaaggtgagacttgagtattaccttaaaatcagtgattctcggcaggacgcagtggctcatgcctgtaatcccagcacttttgggaggccaaggtgggtgaatcgcctcaggtcaggagttcgagaccagcctgaccaacatggtaaaaccccatctctacta

SEQ ID NO: 98679 - DNA, 279 bp, Homo sapiens
aaaaagcgtggatgacatctttctatattgtgcagtgatcttctggatatacttactattaagtgaaaaaagcaaagcagggaaatgtgtattctactgtttaagaaagaagagaaatgttggctgggcacagtgggtaatcccagcactttgggaggccgaggcaggcggattacgaggtcaagagattgagaccatcctggccaacatggtgaaaccccgtctctattaaaaatgcaaaaattagctgggcatgttagcgcatgtctatagtcccag

SEQ ID NO: 98680 - DNA, 163 bp, Homo sapiens
atgcatatcctccaagttgacagtccctaaagcaacccaactttcctttttctatgttcattgcctaattttttaggctatttcataagtatccttgtgaattcactatcaacattcagtatcagtgtgacctgcactccactgcactccagcctggacaaca

SEQ ID NO: 98681 - DNA, 474 bp, Homo sapiens
ttgacctatcttcactttttacatgccttcctcactaagcttaatcattcctagttttttatttaccagcgagagatatgtgactcctttttttcacttgaacactttttagaggctattgttgggttataaattggtcctaacttcgatattgttgtgtcctaacatcccatatggtccttagggaacagggaggcctgaagagagcaacagagatgggggaatgcccacttgctcaagcagtcagaatacacacaacattgataatttaagttagccatcttatatgagcatagttcatagcatcccaaaacaattacaatagtaacatcaaagatcactgaccacagaacaccgtaatagactgaaaagtttaaaatattgagagaattaacaaaatgtgacacaaagtgagcaccacagacttgctcacccagggttgccacaaaccatcaatttgttaaaaaaaaaaaa

SEQ ID NO: 98682 - DNA, 258 bp, Homo sapiens
acaaatgacaggtggctgctgacagaataggaggcaggaagaagatgagacctgcctggggtagtgcacatgttttgttccagccaaacagtcagatgaggtcttggtcttggacccgctgccagggaattcacaagcccgcttctgctgtggcctgggagctgaggtctttggttctgaaaccaaatgtaaattttggactctgaaatgcctgtctgtttagccagtttctctataatggtgattccaggaaaggaa

SEQ ID NO: 98683 - DNA, 451 bp, Homo sapiens
  misc_feature (62)..(62): n is a, c, g, or t
tatttgaaatttttataacccaagccctttaaagggacaagtcctggtcggccttattatanggtatcaacaattggcctcaaatgggaagagccagttgttgtagactgaattgtgtctctcccccaaatccatatgtagaaactctaacacaccatatgactggatttggagatcgttcctttaaagagatgattaaagttaaatagggtcataaggatgggttcttaatctgataggactagtgtccttataataagaggaagaaacatcagggatggacactctcacttttttaaagatcacatgatgacacagcaagaaggaaaccatctgcaagtcagaaggaggcctcaggaggaaccaatcctgctgtcattttggacagctgatcttggactttcagcttccagaactgtgagaaaataaatttatcttgctccagaaacac

SEQ ID NO: 98684 - DNA, 290 bp, Homo sapiens
aatagtagtacattcacggccactcatatccacaacacacaaacaaaaaacttttggtggactgttcacaatatgtgcctaaatcttttcagaggacaactttgactttcaagaggagattccaagtgacatcttgaaaccacctcaccagaaccattggagcacctgtggcctcggcacactgcttatcacttgaaaaatggaggaacaagtgttatatttatctgtgtgtctgacagtgtgagatgttagaccgagagaaaagcaaacaaataaatcacttaatcttg

SEQ ID NO: 98685 - DNA, 2660 bp, Homo sapiens
agccagcaccagtatgcacagcccccggccccagagacccgggaaggagtagggaggccgggccgtgcgcggaggagtggccgctgggttggaaacccggcccggcagggagcggggaaggcgcgctttcccggagaagaggactgtcagaaggacgtagaaggcacggttttactgtgaggagcaaagattctttacctacgcattttacaagaaatgtgcagaaagccattgataaatatacctgcaaatccttgtcatccttttcctccagcggaagccatacacccacgggagcccacacctcttggtctgggtcggccacacagagctctaccaccggctcatccacggagaggggctccgtttattcctggagagatgacgaatttgacgaagccagttcacagtcagtgcagcggttactctgggaggtggaggaaatgttatttgaagggaaagtgaaccctcagacccagagtctgctggccgaatgcggggagtggacaagaagatccctccatttgagagtattaggaagacagctgatcctgcccactgacgaaggcgtccagcatttccagggcagcactcctgcctccgcagtccacagacccccgctcagtgcctgcggacacagcagcaacatcagagagttgtgcatttctggctctcaaatagtcccagcagcactctcagcctctgccctgccaggccctgatgacacaggggttgctgacctaacggcacgttcatccctggaagaagaggtttaccatgtggatggaaagattgaggagtatttcgcttttgacagaaaagaggatgatgatgaatgtcttgaacaaaaaccagctcagcccggtaggaaatggcgcgaactcggacttcctcctgtttccccgcgtgactgtgtcaaagatgccgtggcagcagaagtgtttgatcacgtctggacaaatatggtagaacttttggaagagctgattagaaaacactgggaaactacactcacagaagggaaaaaacagagagaaacattgaaagtggctggaaacagatttccgcacgtcctcgttccacgcgctcacgccgatggagccagtggccccccgtccggacacgccgaggctcacggcatctccctggcttctcgtctgaacccgccccagattcatcacttctccagcagtttttatagtgacatgaatggtgtcatgacaattcaagcaaaaccgcttcagcggagacctgcctattttgctgacagaacgcagaatgagaaggaggacaaagcatcgggtggaggggcaggtgctctctcctccgcaccgcacagactgggacgggcctcagacactcatggattatcaccttctgcaaagaaaacaccagtgccctggaggctgccttctcttgcttcagattcacagagactaaaaactcccaacatctatagtgacgaagttcttcggggaacaaaactgccgactggcgtggaccacatggcttccccactggttcaaacgtcacggagcaggttccccccgctagtcacggagaccagggggcagaatacagcagttcctggatgccgccttgtttcttacagaggaaggcatctacaaaaccgtgtgttgagtgccatgcctgacggtacagaacgatcgcgtcttcgagaaagaacagccaccctggaacggttgtcaaggcccagcacaacccacacgttccggcagtcggatacgcctcgaaaaagttcattgacacaaatggaatttgctgctcacacatggacaggtcaaagtattttgacaggtcagcttttctccatatgtaaataaagtgatgtagtaagtgagatttcaagtttcagacagtgaaatggaagatgatctaccttgataagcctattttgctgtaggagggaatagcaaatgtttggggcctgtggcctgacctcagaaacctcgatcacagagcacacctgcagagacttacttacctgctgtgaggtcaagaagaggggaatgtccaaaagctctcaatgaactgggggcctcactcaaaaaaaaaaaaaaaaaatgctgtcttaggagcagtgagtacctctgtctgctatagcgttttcatgctctatttctaagtgaaactctactctcagattctctttgaaaatctgatgataaaaatgcttgagaaaattaacacagatttgctaattactttataacacaaggttttacagataaataggtattctcagcctggtatgctgtttgcaggatattctagtttgaatacgggccagtgatgtttccagttccagaacagtctccaacactgttttcaaggcgttagtgtggcctctggagtctgacgttggatttccaccctcgctctgccaccggctgtgcaaccctaggaatgtcccaacctctctggccctcagcttcctcttttataacaagcagggtacataaaatcattattggaaaactgtgaaaaggatctagctagataccaggcatgtattgctcagaaatgatgaattatgaaccatttgtattataaataacctgaaatttcagggataatttattgttttacagggaattttaaacatataattctaaaaataaatttcgtaacatgtaagc

SEQ ID NO: 98686 - DNA, 1431 bp, Homo sapiens
ttatcacagcactcgcagctgagtagctcacaggatttccttcccaggaatgagaaggaggacaaagcatcgggtggaggggcaggtgctctctcctccgcaccgcacagactgggacgggcctcagacactcatggattatcaccttctgcaaagaaaacaccagtgccctggaggctgccttctcttgcttcagattcacagagactaaaaactcccaacatctatagtgacgaagttcttcggggaacaaaactgccgactggcgtggaccacatggcttccccactggttcaaacgtcacggagcaggttccccccgctagtcacggagaccagggggcagaatacagcagttcctggatgccgccttgtttcttacagaggaaggcatctacaaaaccgtgtgttgagtgccatgcctgacggtacagaacgatcgcgtcttcgagaaagaacagccaccctggaacggttgtcaaggcccagcacaacccacacgttccggcagtcggatacgcctcgaaaaagttcattgacacaaatggaatttgctgctcacacatggacaggtcaaagtattttgacaggtcagcttttctccatatgtaaataaagtgatgtagtaagtgagatttcaagtttcagacagtgaaatggaagatgatctaccttgataagcctattttgctgtaggagggaatagcaaatgtttggggcctgtggcctgacctcagaaacctcgatcacagagcacacctgcagagacttacttacctgctgtgaggtcaagaagaggggaatgtccaaaagctctcaatgaactgggggcctcactcaaaaaaaaaaaaaaaaaatgctgtcttaggagcagtgagtacctctgtctgctatagcgttttcatgctctatttctaagtgaaactctactctcagattctctttgaaaatctgatgataaaaatgcttgagaaaattaacacagatttgctaattactttataacacaaggttttacagataaataggtattctcagcctggtatgctgtttgcaggatattctagtttgaatacgggccagtgatgtttccagttccagaacagtctccaacactgttttcaaggcgttagtgtggcctctggagtctgacgttggatttccaccctcgctctgccaccggctgtgcaaccctaggaatgtcccaacctctctggccctcagcttcctcttttataacaagcagggtacataaaatcattattggaaaactgtgaaaaggatctagctagataccaggcatgtattgctcagaaatgatgaattatgaaccatttgtattataaataacctgaaatttcagggataatttattgttttacagggaattttaaacatataattctaaaaataaatttcgtaacatgtaagc

SEQ ID NO: 98687 - DNA, 2549 bp, Homo sapiens
agccagcaccagtatgcacagcccccggccccagagacccgggaaggagtagggaggccgggccgtgcgcggaggagtggccgctgggttggaaacccggcccggcagggagcggggaaggcgcgctttcccggagaagaggactgtcagaaggacgtagaaggcacggttttactgtgaggagcaaagattctttacctacgcattttacaagaaatgtgcagaaagccattgataaatatacctgcaaatccttgtcatccttttcctccagcggaagccatacacccacgggagcccacacctcttggtctgggtcggccacacagagctctaccaccggctcatccacggagaggggctccgtttattcctggagagatgacgaatttgacgaagccagttcacagtcagtgcagcggttactctgggaggtggaggaaatgttatttgaagggaaagtgaaccctcagacccagagtctgctggccgaatgcggggagtggacaagaagatccctccatttgagagtattaggaagacagctgatcctgcccactgacgaaggcgtccagcatttccagggcagcactcctgcctccgcagtccacagacccccgctcagtgcctgcggacacagcagcaacatcagagagttgtgcatttctggctctcaaatagtcccagcagcactctcagcctctgccctgccaggccctgatgacacaggggttgctgacctaacggcacgttcatccctggaagaagaggtttaccatgtggatggaaagattgaggagtatttcgcttttgacagaaaagaggatgatgatgaatgtcttgaacaaaaaccagctcagcccggtaggaaatggcgcgaactcggacttcctcctgtttccccgcgtgactgtgtcaaagatgccgtggcagcagaagtgtttgatcacgtctggacaaatatggtagaacttttggaagagctgattagaaaacactgggaaactacactcacagaagggaaaaaacagagagaaacattgaaagtggctggaaacagatttccgcacgtcctcgttccacgcgctcacgccgatggagccagtggccccccgtccggacacgccgaggctcacggcatctccctggcttctcgtctgaacccgccccagattcatcacttctccagcagtttttatagtgacatgaatggtgtcatgacaattcaagcaaaaccgcttcagcggagacctgcctattttgctgacagaacgcagaatgagaaggaggacaaagcatcgggtggaggggcaggtgctctctcctccgcaccgcacagactgggacgggcctcagacactcatggattatcaccttctgcaaagaaaacaccagtgccctggaggctgccttctcttgcttcagattcacagagactaaaaactcccaacatctatagtgacgaagttcttcggggaacaaaactgccgactggcgtggaccacatggcttccccactggttcaaacgtcacggagcaggttccccccgctagtcacggagaccagggggcagaatacagcagttcctggatgccgccttgtttcttacagaggaaggcatctacaaaaccgtgtgttgagtgccatgcctgacggtacagaacgatcgcgtcttcgagaaagaacagccaccctggaacggttgtcaaggcccagcacaacccacacgttccggcagtcggatacgcctcgaaaaagttcattgacacaaatggaatttgctgctcacacatggacaggtcaaagtattttgacagaggacaactttgactttcaagaggagattccaagtgacatcttgaaaccacctcaccagaaccattggagcacctgtggcctcggcacactgcttatcacttgaaaaatggaggaacaagtgttatatttatctgtgtgtctgacagtgtgagatgttagaccgagagaaaagcaaacaaataaatcacttaatcttgaacactttgcactgtaaagagagtgaaagtcaaacccaccaagctgccttgctgaaagcatctccaaggttctgtaggctttgttcagaagcccctgatgtgtgtttgcagtccgtcattttatcaatgatacgcaaacataattagcatgtgtatgtactcacacactaattacatgtaagaatatattatctaggaatatgtcatttgtaactttgtactctgacgtattttctagtctcaccctattagtaattctgtcaaaatcctagacgctagtagatattagtatttgagacaatatgtcagagtctgaataagactcagcttgttctagtcatgctgagtttctcatatattttttaaaagtgcttccgccatgaacctctttgagaaatgtcagtggcaaaatctcccaagctaattttctttttctatgttccatcttcaaattcagacagttcacgtgaagtaccccacatttattgatcttagggttgaatataaacgcaattaaaagctatggcaggtga

SEQ ID NO: 98688 - DNA, 886 bp, Homo sapiens
agccagcaccagtatgcacagcccccggccccagagacccgggaaggagtagggaggccgggccgtgcgcggaggagtggccgctgggttggaaacccggcccggcagggagcggggaaggcgcgctttcccggagaagaggactgtcagaaggacgtagaaggcacggttttactgtgaggagcaaagattctttacctacgcattttacaagaaatgtgcagaaagccattgataaatatacctgcaaatccttgtcatccttttcctccagcggaagccatacacccacgggagcccacacctcttggtctgggtcggccacacagagctctaccaccggctcatccacggagaggggctccgtttattcctggagagatgacgaatttgacgaagccagttcacagtcagtgcagcggttactctgggaggtggaggaaatgttatttgaagggaaagtgaaccctcagacccagagtctgctggccgaatgcggggagtggacaagaagatccctccatttgagagtattaggaagacagctgatcctgcccactgacgaaggcgtccagcatttccagggcagcactcctgcctccgcagtccacagacccccgctcagtgcctgcggacacagcagcaacatcagagagttgtgcatttctggctctcaaatagtcccagcagcactctcagcctctgccctgccaggccctgatgacacaggggttgctgacctaacggcacgttcatccctggaagaagaggtttaccatgtggatggaaagattgaggagtatttcgcttttgacagaaaagaggagtaaatagaatcttatttgacattgacctcataaaataatattaatttatttgacattta

SEQ ID NO: 98689 - DNA, 281 bp, Homo sapiens
ctaactaagcccatcacggcgaaatcgataccaccacccaaaacaaaaaacctagttcacaatatgtgcctaaatcttttcagaggacaactttgactttcaagaggagattccaagtgacatcttgaaaccacctcaccagaaccattggagcacctgtggcctcggcacactgcttatcacttgaaaaatggaggaacaagtgttatatttatctgtgtgtctgacagtgtgagatgttagaccgagagaaaagcaaacaaataaatcacttaatcttg

SEQ ID NO: 98690 - DNA, 422 bp, Homo sapiens
attagggagactcgtcatgttttattttatttccagaagaggactgtcagaaggacgtagaaggcacggttttactgtgaggagcaaagattctttacctacgcattttacaagaaatgtgcagaaagccattgataaatatacctggtaagaattcaccttgcttcagattacaaaatcacaaaatgcccgtaacaaatgtgggaaggaagttagtgactggccatgaatttctaaaagtaagatgcagttttatttttaacctagtgtaaacatcacactgtaaaaatatttcaaaattagtatactgtgaaattaataaatatatttaatgaaagaaagaggaagcaggctcagaaaagtgaagccacttagccatccaagcccttccagcaaatgtgatttctttgctcatgttcatt

SEQ ID NO: 98691 - DNA, 468 bp, Homo sapiens
tgggcttgactgtttgattactgacagggaaaaccttagccctctgcctgtggatgattcttcattgaaacagaaacagaaatgatgggtcttttcattcattcaacccgtgcttaggagtatgttctaggtgccagactgttctaggcagtgctcaactaagcacagacaggtgcgttccctgttatcacagcactcgcagctgagtagctcacaggatttccttcccaggaatgagaaggaggacaaagcatcgggtggaggggcaggtgctctctcctccgcaccgcacagactgggacgggcctcagacactcatggattatcaccttctgcaaagaaaacaccagtgccctggaggctgccttctcttgcttcagattcacagagactaaaaactcccaacatctatagtgacgaagttcttcggggaacaaaactgtgagtctcatttctttcatagtaaac

SEQ ID NO: 98692 - DNA, 2045 bp, Homo sapiens
agccagcaccagtatgcacagcccccggccccagagacccgggaaggagtagggaggccgggccgtgcgcggaggagtggccgctgggttggaaacccggcccggcagggagcggggaaggcgcgctttcccggagaagaggactgtcagaaggacgtagaaggcacggttttactgtgaggagcaaagattctttacctacgcattttacaagaaatgtgcagaaagccattgataaatatacctgcaaatccttgtcatccttttcctccagcggaagccatacacccacgggagcccacacctcttggtctgggtcggccacacagagctctaccaccggctcatccacggagaggggctccgtttattcctggagagatgacgaatttgacgaagccagttcacagtcagtgcagcggttactctgggaggtggaggaaatgttatttgaagggaaagtgaaccctcagacccagagtctgctggccgaatgcggggagtggacaagaagatccctccatttgagagtattaggaagacagctgatcctgcccactgacgaaggcgtccagcatttccagggcagcactcctgcctccgcagtccacagacccccgctcagtgcctgcggacacagcagcaacatcagagagttgtgcatttctggctctcaaatagtcccagcagcactctcagcctctgccctgccaggccctgatgacacaggggttgctgacctaacggcacgttcatccctggaagaagaggtttaccatgtggatggaaagattgaggagtatttcgcttttgacagaaaagaggatgatgatgaatgtcttgaacaaaaaccagctcagcccggtaggaaatggcgcgaactcggacttcctcctgtttccccgcgtgactgtgtcaaagatgccgtggcagcagaagtgtttgatcacgtctggacaaatatggtagaacttttggaagagctgattagaaaacactgggaaactacactcacagaagggaaaaaacagagagaaacattgaaagtggctggaaacagatttccgcacgtcctcgttccacgcgctcacgccgatggagccagtggccccccgtccggacacgccgaggctcacggcatctccctggcttctcgtctgaacccgccccagattcatcacttctccagcagtttttatagtgacatgaatggtgtcatgacaattcaagcaaaaccgcttcagcggagacctgcctattttgctgacagaacgcagaatgagaaggaggacaaagcatcgggtggaggggcaggtgctctctcctccgcaccgcacagactgggacgggcctcagacactcatggattatcaccttctgcaaagaaaacaccagtgccctggaggctgccttctcttgcttcagattcacagagactaaaaactcccaacatctatagtgacgaagttcttcggggaacaaaactgccgactggcgtggaccacatggcttccccactggttcaaacgtcacggagcaggttccccccgctagtcacggagaccagggggcagaatacagcagttcctggatgccgccttgtttcttacagaggaaggcatctacaaaaccgtgtgttgagtgccatgcctgacggtacagaacgatcgcgtcttcgagaaagaacagccaccctggaacggttgtcaaggcccagcacaacccacacgttccggcagtcggatacgcctcgaaaaagttcattgacacaaatggaatttgctgctcacacatggacaggtcaaagtattttgacaggttcacaatatgtgcctaaatcttttcagaggacaactttgactttcaagaggagattccaagtgacatcttgaaaccacctcaccagaaccattggagcacctgtggcctcggcacactgcttatcacttgaaaaatggaggaacaagtgttatatttatctgtgtgtctgacagtgtgagatgttagaccgagagaaaagcaaacaaataaatcacttaatcttg

SEQ ID NO: 98693 - DNA, 2526 bp, Homo sapiens
gcgcggcgggcgcgggcgcgggcgcgggcgcgggcgcgggcgggtggggagccccagccccggggccgcgggggcgcgtgaccggctgtctgcgtggggcccgcgcgcggtgcctctgcctgacggtgcccgagcctagcgcggagcctggcgcgggggctgcgagcacaggcccggggctgatcgtaatcggaagaggactgtcagaaggacgtagaaggcacggttttactgtgaggagcaaagattctttacctacgcattttacaagaaatgtgcagaaagccattgataaatatacctgcaaatccttgtcatccttttcctccagcggaagccatacacccacgggagcccacacctcttggtctgggtcggccacacagagctctaccaccggctcatccacggagaggggctccgtttattcctggagagatgacgaatttgacgaagccagttcacagtcagtgcagcggttactctgggaggtggaggaaatgttatttgaagggaaagtgaaccctcagacccagagtctgctggccgaatgcggggagtggacaagaagatccctccatttgagagtattaggaagacagctgatcctgcccactgacgaaggcgtccagcatttccagggcagcactcctgcctccgcagtccacagacccccgctcagtgcctgcggacacagcagcaacatcagagagttgtgcatttctggctctcaaatagtcccagcagcactctcagcctctgccctgccaggccctgatgacacaggggttgctgacctaacggcacgttcatccctggaagaagaggtttaccatgtggatggaaagattgaggagtatttcgcttttgacagaaaagaggaaagggaaaaaacagagagaaacattgaaagtggctggaaacagatttccgcacgtcctcgttccacgcgctcacgccgatggagccagtggccccccgtccggacacgccgaggctcacggcatctccctggcttctcgtctgaacccgccccagattcatcacttctccagcagtttttatagtgacatgaatggtgtcatgacaattcaagcaaaaccgcttcagcggagacctgcctattttgctgacagaacgcagaatgagaaggaggacaaagcatcgggtggaggggcaggtgctctctcctccgcaccgcacagactgggacgggcctcagacactcatggattatcaccttctgcaaagaaaacaccagtgccctggaggctgccttctcttgcttcagattcacagagactaaaaactcccaacatctatagtgacgaagttcttcggggaacaaaactgccgactggcgtggaccacatggcttccccactggttcaaacgtcacggagcaggttccccccgctagtcacggagaccagggggcagaatacagcagttcctggatgccgccttgtttcttacagaggaaggcatctacaaaaccgtgtgttgagtgccatgcctgacggtacagaacgatcgcgtcttcgagaaagaacagccaccctggaacggttgtcaaggcccagcacaacccacacgttccggcagtcggatacgcctcgaaaaagttcattgacacaaatggaatttgctgctcacacatggacaggtcaaagtattttgacaggtcagcttttctccatatgtaaataaagtgatgtagtaagtgagatttcaagtttcagacagtgaaatggaagatgatctaccttgataagcctattttgctgtaggagggaatagcaaatgtttggggcctgtggcctgacctcagaaacctcgatcacagagcacacctgcagagacttacttacctgctgtgaggtcaagaagaggggaatgtccaaaagctctcaatgaactgggggcctcactcaaaaaaaaaaaaaaaaaatgctgtcttaggagcagtgagtacctctgtctgctatagcgttttcatgctctatttctaagtgaaactctactctcagattctctttgaaaatctgatgataaaaatgcttgagaaaattaacacagatttgctaattactttataacacaaggttttacagataaataggtattctcagcctggtatgctgtttgcaggatattctagtttgaatacgggccagtgatgtttccagttccagaacagtctccaacactgttttcaaggcgttagtgtggcctctggagtctgacgttggatttccaccctcgctctgccaccggctgtgcaaccctaggaatgtcccaacctctctggccctcagcttcctcttttataacaagcagggtacataaaatcattattggaaaactgtgaaaaggatctagctagataccaggcatgtattgctcagaaatgatgaattatgaaccatttgtattataaataacctgaaatttcagggataatttattgttttacagggaattttaaacatataattctaaaaataaatttcgtaacatgtaagc

SEQ ID NO: 98694 - DNA, 2578 bp, Homo sapiens
agccagcaccagtatgcacagcccccggccccagagacccgggaaggagtagggaggccgggccgtgcgcggaggagtggccgctgggttggaaacccggcccggcagggagcggggaaggcgcgctttcccggagaagaggactgtcagaaggacgtagaaggcacggttttactgtgaggagcaaagattctttacctacgcattttacaagaaatgtgcagaaagccattgataaatatacctgcaaatccttgtcatccttttcctccagcggaagccatacacccacgggagcccacacctcttggtctgggtcggccacacagagctctaccaccggctcatccacggagaggggctccgtttattcctggagagatgacgaatttgacgaagccagttcacagtcagtgcagcggttactctgggaggtggaggaaatgttatttgaagggaaagtgaaccctcagacccagagtctgctggccgaatgcggggagtggacaagaagatccctccatttgagagtattaggaagacagctgatcctgcccactgacgaaggcgtccagcatttccagggcagcactcctgcctccgcagtccacagacccccgctcagtgcctgcggacacagcagcaacatcagagagttgtgcatttctggctctcaaatagtcccagcagcactctcagcctctgccctgccaggccctgatgacacaggggttgctgacctaacggcacgttcatccctggaagaagaggtttaccatgtggatggaaagattgaggagtatttcgcttttgacagaaaagaggatgatgatgaatgtcttgaacaaaaaccagctcagcccggtaggaaatggcgcgaactcggacttcctcctgtttccccgcgtgactgtgtcaaagatgccgtggcagcagaagtgtttgatcacgtctggacaaatatggtagaacttttggaagagctgattagaaaacactgggaaactacactcacagaagggaaaaaacagagagaaacattgaaagtggctggaaacagatttccgcacgtcctcgttccacgcgctcacgccgatggagccagtggccccccgtccggacacgccgaggctcacggcatctccctggcttctcgtctgaacccgccccagattcatcacttctccagcagtttttatagtgacatgaatggtgtcatgacaattcaagcaaaaccgcttcagcggagacctgcctattttgctgacagaacgcagaatgagaaggaggacaaagcatcgggtggaggggcaggtgctctctcctccgcaccgcacagactgggacgggcctcagacactcatggattatcaccttctgcaaagaaaacaccagtgccctggaggctgccttctcttgcttcagattcacagagactaaaaactcccaacatctatagtgacgaagttcttcggggaacaaaactgccgactggcgtggaccacatggcttccccactggttcaaacgtcacggagcaggttccccccgctagtcacggagaccagggggcagaatacagcagttcctggatgccgccttgtttcttacagaggaaggcatctacaaaaccgtgtgttgagtgccatgcctgacggtacagaacgatcgcgtcttcgagaaagaacagccaccctggaacggttgtcaaggcccagcacaacccacacgttccggcagtcggatacgcctcgaaaaagttcattgacacaaatggaatttgctgctcacacatggacaggtcaaagtattttgacaggttcacaatatgtgcctaaatcttttcagaggacaactttgactttcaagaggagattccaagtgacatcttgaaaccacctcaccagaaccattggagcacctgtggcctcggcacactgcttatcacttgaaaaatggaggaacaagtgttatatttatctgtgtgtctgacagtgtgagatgttagaccgagagaaaagcaaacaaataaatcacttaatcttgaacactttgcactgtaaagagagtgaaagtcaaacccaccaagctgccttgctgaaagcatctccaaggttctgtaggctttgttcagaagcccctgatgtgtgtttgcagtccgtcattttatcaatgatacgcaaacataattagcatgtgtatgtactcacacactaattacatgtaagaatatattatctaggaatatgtcatttgtaactttgtactctgacgtattttctagtctcaccctattagtaattctgtcaaaatcctagacgctagtagatattagtatttgagacaatatgtcagagtctgaataagactcagcttgttctagtcatgctgagtttctcatatattttttaaaagtgcttccgccatgaacctctttgagaaatgtcagtggcaaaatctcccaagctaattttctttttctatgttccatcttcaaattcagacagttcacgtgaagtaccccacatttattgatcttagggttgaatataaacgcaattaaaagctatggcaggtga

SEQ ID NO: 98695 - DNA, 353 bp, Homo sapiens
caccccttttttttggccttattacattagttatttcctcaagaatatttagtgaatggctggtatccttaactctcccacccttctaaggaaagctatcaattgttccccattagtaatgtagcttgccgtgtgtgtgtaaatactctgttattatgccctttgattcacagtttttgtaggtgttccttttaaaaataattgcaagtgctttttctctatctatgtatatgaccataagggctttctcttattaaacatcaatatgatgaactatactcatttcttacattaaaaccacccatattgtcttagaacacaacccacttggttttaatgttattattctttta

SEQ ID NO: 98696 - DNA, 508 bp, Homo sapiens
agacacatgccaccatgaatgccatgttggccaggctggtctcgaacttctgacctcaggtgatccacctgcctcagcttcctaaagtactgagattacaggcatgagcctttgcgcctggcctcacccaagaagcattttatcatctgtgtcaacttcctccagggcctgtgtgggtaactcttactttgcctggccatcctacttactgcacttagaaaaagttttggatgataattgactttaagcatatataaatcagaaacttgatttcatttatctttgtgtccccagtgttgaacattgtgcctgacacatagtaactgcttattaagcacttattgaattataagttgaatacgttggattcatagagtttattgtttgtcctgaagatgtaaaatttttaaaaattcgatccccagagggcgctccagtggcagttggctctcccattttaaggaccagaagtgtttgaatgtcttcctctgatttctttttctttctt

SEQ ID NO: 98697 - DNA, 498 bp, Homo sapiens
cctagctgaagtgtagttgaccattcctgaaacacctgtcaggatacattaaactaaagccattgaatcattattttcatatatatccaatttctgttatgaaacagtactttgtttctaccctaagagctgaaatgtgaagtttagctgactgctttcaaatttggatatccatggaaacccaggtctaggaatgaattgaaataatttttaagattgcttttatttttattattattttaagtgtatttgaacatgcaataattgacatatttaaagtaagcaatttgataagttttagtacatgatacagcagtgaaaccatcaccgcagtgaagatagtaaacctatccctcatccccggggtgtccatgcccctttgtgatccctacccgccaccctccccacagcctcacctaccccccaggcaacaatttatgtctgagactataggttattttgcaatttttaaaataaatgcaaaatctataaaaatgg

SEQ ID NO: 98698 - DNA, 511 bp, Homo sapiens
aactgtcccctgcagatgggaacattctctctattttaatgtttccaaacaacagataggttcacttttttgcaggactgtaaggaggggttcattcatgatttttctttattgctgagagacaaaaaacctagatacctagatacatatatcttacccataagatactataagatcttcgtgaacagaaatgacttatccccataaaagctaagtctattctgtccctattcaatagccaatattaaagatgataatcaaatctatactacttacagctaaaattacaaataggtaaatctaaacgtgtcattgtagtagagccgcctctccaataccatgaactttatttggcttagttgggtatagaaaatagaaatatacagtggcaatgcagatatatatggctctttcctgatggtgttttgaggacagtactatttgtccctgagatctttcttctgcctggctgatctggtagcctgtatattaatttcaacttatttattgt

SEQ ID NO: 98699 - DNA, 350 bp, Homo sapiens
tcattctgccacctttgctatttctataacatgccaccattctctgacatcaaagtcactgcccttgttattccctccacttgaaatcctcttcctcagagagccccatagctagttcctcatgtccttcagaccttgactcaaatgtcagcttcttggtgcactcttctctggccatcccatctgcaatttcaactcaccacctcacacttcctatcccttttccatgctttgttttcttctccttagcactaagctttatctaatgtattatatgttttacttatttatctgattattgtccattttctcagtggaatatgagctccatataggcaaaagattttgcc

SEQ ID NO: 98700 - DNA, 578 bp, Homo sapiens
gttggttgagggttggagcacgaatcaaaagggtgtttggagttgctttaagagggttatgttgtaccaggttcagggactttgttatttttcatcctgggtggatctggaggtctcacagagcctccccaccggctctgacctccccagagagctaaaaccccacaggccccatgaccttgccccctgtcccatcccttcctggtagccagttacaccgtctgctcagagcgccaagttcagctgccagaatgaggattgcacagatcagggctgcagggaacttaaaggtggtctaacccagcaattttcgaactgtgctccttagcaccctgattctcagacatgtcccaggctctctgttggaaggaatgcaataggtctctgggtcccccttcctctgtgtcccctgactccactgcaatcaaatagacagacacatgttttctgtgttagtgttccatgtacttcattctcctgcttaaaaggagctttcatcgatctgctccagccacgccattttacagatgaggacactgaggcctagagaagtcaaatgacttgttttaggtcaccca

SEQ ID NO: 98701 - DNA, 672 bp, Homo sapiens
gagcgatagatgagctaattccttgctacagttacattttagttccatgccctctgtcacatgactttgcagtttctttcactagaggcagggcatgttgtcctgcctctttgatgttaggcctagtcatatgccttgctttagtccatcctgctccaataataagtgctccagttctgatactagttttaagaggccatgtaagtttccacccatcttaattgtgtttcttccattgccataagaaaatcgtgctctagctagatcaggcaactccaggtgaagggtgtcagagtatacatttttgctgtttaaagccactgaattttgggatggttgcttacacagcattgctatgccaatagctaactggtacaacacaacaaatttcactgtgtggcaaactcttcaagagtgcctacccataaacatttctctctttataaacacttttaatagacattttacaaaagatgatatataatgtccaacaagcacattaaaagatgttcaaaatcactgagtcgtcagggatatgcaaaccaaagctacaatgaaatggcatcacatacctactagaatagttagaattaaaaagacaattaccaaatgttggtgaggatatagaacaacttgaactctcgtgcaccactggtgggggtataaaatggt

SEQ ID NO: 98702 - DNA, 375 bp, Homo sapiens
ccctgggcatttggatgctgttgttcctgggttcaaagagtttgtgagtgtcctgtccagtttcatactccttgctttgacacagacatcccattagacctttctttcctgatgtgattgctcttctttgctatgcaaatttaaaacgtgtgaggagaaagctgtgttcatgcatgtgaatatgctgaactcctcctctggtctccctcacatctaccacatccaggaatggaagatcaagcttggtgactattttcactgaaagagacttttcacatcccaagcagaacaggcatctttcctggttaggtgctgttcaagtctgctgtgtgttttaaaccatgttccctgaagctgctttaggtaaatattggc

SEQ ID NO: 98703 - DNA, 296 bp, Homo sapiens
atgctgcgcagttcttgttctcaacacaaattttcgacaaatattgactcatgtgatagacccaatcagggtatttctcgatgcaagtgagtcctctgaagatggctcagttacaaatgagtatgaaggtgccagtgtccatgtctctgccctaaggcactgtcaaatggacttcgctgtttcacccaggggcacacacttgctcccagctatgacaatcaagttctcatccccagatttaagagatgtggaatggagagagagaaagcctggtgtctcttatgaggagtctcaga

SEQ ID NO: 98704 - DNA, 439 bp, Homo sapiens
tgtagatatttattttcccccaagactctaaaaagaggttttgtaagccaagaaaagtttttcctgttaaagaccagagcttttccagcctctacttatctatgaaaacttttttaaagatttgcacacacgctaagaatgaaggatgtaacgatgtatttcatgttgcaacccccaggggatcgggaccatccgattaaccatttagtatctaatattttactgaaggagttttcttctcaggttgctgaacaactttgtttccgtcttcgtcttctctgtggaaatcgtattctacagattgtgaaggtcttttctttttttaattaaaaaaggggtttatatttgggctgaacatgggggctcatgcctataatcccagaactttgagaggccggggcgggaaggttccttgagcccaggaattggagaccagcct

SEQ ID NO: 98705 - DNA, 809 bp, Homo sapiens
cctttttaaggctaaataacattttattgtctgtgtagatcaccttttgttgatccattcatacatcaaaaggcacgggttatttccaaaaccttttgcctatcatgaataatgctgttatgaacatggatgtctaaatatctcctcgagaccctattcccagttgttcagggtatatacctataggtggtattgccagatcatagggtacttctatttttcattttttgaggagccatccctactgttttccatagcagctgcaccattttacatttctaccaacagtgcccaagggttccagtttctccacatcctctccaacatttgttattttctattttgctttattaaattgatgaccatcccaatgggtgtgaggtgtatctcattgtggttttgatttgcgtttccctgtagactagtgatgttgagcatatgtccacatgctgttggccatttgtgtatcttctttacaaaaatgtttgttcaagagatgattcctaattgagagcgacagccccttgtcctgtatccaattgctccataagcttgtagtgcctccttttgtgggatgacccaaaatgcctacacccctttacagcactttgggaggcagaggcgggtggatcaagaggtcaggagttcgagaccagcctgaccaacatggtgagatgccatctctactaaaaatacaaaagttagccgggcgtggtggcaggcgcctgtaatcccagctactcaggaggctcactcaggagaattgcttgagcgaacccgggagctgaggttgcagtaagccgagatcg

SEQ ID NO: 98706 - DNA, 601 bp, Homo sapiens
aacctggaaccctaaggctttttccttttctttttagtgctagaaatctcctgttatgacatttatagtggctttttaaaaaattgtcttcagagtggcttcattgttccttaatcttttggtctgctttttcagaaaatctattacaaaatgaatatttaaactagaattgcttgggatagttgtattaaatggtcagttcttctaagaacatctaagattgtgctgattgtgattattttagtaatgctgaatttggaagcacagcatttggaaagatgaaacaaatgtggaataaatttttttgtttttgtttttgttttttgttttttttttttttgaggcagaatctcactctgtcacccaggttgtagtgcagtggcaagatttcctctcactgcaacatctgcctcctgggttcaagaaattctcctgcctcagcctcctgagtagctggggtcacgggcatgcaccaccatgcccaactaatttttgtatatttagtagagacggggtttcaccctgttggcctcgaactcctgaccttaagtgatccacccaccttggcctccaaaagcgctgggattatagcatgagccac

SEQ ID NO: 98707 - DNA, 226 bp, Homo sapiens
gaaccatgttttccaatgtgtggtgcctgaatcagcattgagatcagcattaaccgggaacattttcagaaagcaaattttcaagctgccttctttcctcctcacccatcgagacctgtgaagtcagcgatatgtgttttgcgaacacataaatctccttctaggagattcggtatgtgatatacctgtaaaacactgcttagactattaaacatattgatccatc

SEQ ID NO: 98708 - DNA, 770 bp, Homo sapiens
ccttggtgagacctcgctaccttataagcctcagataaaccgtatagaaagatgaataacacagagattataagttggtttagaatgcaaagatatataacgaatatcaaagaagcatcaattcctggtatggaaataatggcattaagcaaacttactccttttcctttcagtaggttaaaaatggacacattgtaattaaaattatttgaaatggaaaacgaacttaaatcttctgtcctaaaagttgactatgagtttttctatgaatactagttttcaccgtctcgaaaactttcacattaagagcatttgaaagcaaataaacagtaattattattgacctttttataatggtcagaatctggaagtaataaactctgtttaaatctttataggaactgaagtaactaaggagtttcatcctaattaggatgttttcgttgtgtagttatatatgttgattctgaaaacattgatcttgccgaaagaaaggaaaagaatggtagagatgcaggcagactgaagcaacagagcaacacatttccataactaataatctttcatagatatattggttctgataggagtccagatagacgcctgaaaagattgaatcaaattgggccagtttaaagtggggagtgggtatcactgcaagttggactagatcattatggttgatgacaagttactgttattttgactgagaatatcattatgtaatatattacttaaattgttgagccttttatttaactttcatcagt

SEQ ID NO: 98709 - DNA, 478 bp, Homo sapiens
cctaaactgtggtctttctgagatgtcaatggagtgtccaaggagttcagtaaggtttccactcgcttgtccagaacttttatctcctagtaatctataaaatctccagttcacctctcctttgcagctcttttctactaggccttgtaagctgttatctacaagcttagtatttgatcaaagacttaaggggaaccttttgcagatttctggagctctttttttcttctcccccttattctgccccacaaactccagccatctcagaagccccaaattctctgcttcttcagatcactgagaccactgtttccagcttaggctctgcctctccataacacagtttgggaagtgccctgggtagagacagtgacagtggggttttcccttctctcaaggatctcagtcttacatgagtattagtcaaaacctgacatacataaaacagtggctttatatattttcacaagttttatgc

SEQ ID NO: 98710 - DNA, 666 bp, Homo sapiens
ctaaatttaatgttttatttgcaaagaaatatttgccaaatggggcatacaggaaaactcagtggtcttcaatatgttggaagaacaaagagaaatttagcattttatgaaaaagggaaaatgttacctatggctcttttgagaaagctcattggcactaggaagggttgggagctggcaagctcagactggtaagcagtggtggacaaagtgaatcctagaattatatcaagttatctcagaagttttggataaatttgatttcaggttacaataaaccaaaacggtgaagcttgcagagaattttgttactgaaatgccagggattcggtgtagatcctgcagctcgtcacacagaaagccaatcactaagacaagtattttcaaggaacaggctttaatcaggtgctgcagctgaggagatgggatgccattctcaaatgtatctctctgaccaactgaaattaggggtttatataacaaggaagaaatgtggaaaaacaggagttagggagggttaagaaagataattgggtcaacaggaagcaggaggtcagttaggcaatcataatgggtgaagggtctgatgtctcactgtcccgattcagtgatatataagtttcagcaaattgatagtatctgggaggcctgatggttgctttcctg

SEQ ID NO: 98711 - DNA, 105 bp, Homo sapiens
tgtaggcaatggggtgtaggtgattggggtcaaggagatagaggtgtaggtgatggggtgttggtgattggggtgtaggtgatcagggtgtaggtgattggggtg

SEQ ID NO: 98712 - DNA, 151 bp, Homo sapiens
tcttaatgaagagaatataaggtctgtccctttctgcctgctgtgtagatatattgcccatatgaagtagtatttctcagtataaattttttttccctgcaaaaataaggatgtaagatgccactaatgtttagaggcatggagctcaata

SEQ ID NO: 98713 - DNA, 398 bp, Homo sapiens
atgagactatagaaagaaaaaattcagccgggcgtggtggctcacgcctgtaatcccagcactttgggaggccgaggcaggcggatcacgaggtcaggaaatcgagaccatcctggctaacacggtgaaaccccgtctctactaaaaataaaaaaaaattagccgggcgcggtggcgggcgcctgtagtcccagctactcgggaggctgaggcaggagaatggcgtgaacctgggaggcggagcttgcagtgagccgagatcgcgccactgcactccagcctgggccacagagcgagactccgtctccaaaaaaaagaaaaaaaaagtcaggaaatgtattagctcattcaacagatacctatactgagaactatactgagaatgtaccatatactag

SEQ ID NO: 98714 - DNA, 343 bp, Homo sapiens
gctgtttcaaattacctgtattgcacaggccattttaatggaaagaaaattagcttaaagataggaagtgccttattagctcagtaaagccatggtctgttcaattaaagtgttaacaaatatttcagaggaaagaatgtttagggtcataaatgaattcaacacagttgttcctaagcacttactatttacctgggaatgtgtactgtgtttggtgctttgaagataaatgttatttacaaaacacctagctaataaaaccttgcttcagaatgctgtgtttgacatcaaagatctttatactgaactttatggttgacaaggtttaatttcatttaagtat

SEQ ID NO: 98715 - DNA, 238 bp, Homo sapiens
gctttcctgccctggccttctccccactcagtgcctaggtcctccataatcgacccaacagctccgctctgaccttcctggtgcagccttttcaactggggctctgattcatacacgcactgccctagagctgcctgtactgcttacgagcaaaatgcttcacagagaggtgtgtggcacagcagaaaggaccaagggacaaaggaggtggactagggtccaaacctgataaacatct

SEQ ID NO: 98716 - DNA, 734 bp, Homo sapiens
gcttacagggctaaggaatatttatttcaaaaaggataactaaaagtaaaaaactgtatcactttcttaaaaaaaatgtgtatctggcacaaaatagaccttaatttagaactaaattttattcagagcatcctggcaacagagtgaaaaggaaagcacgtcagtttttatgattctgcaggtcagttaaagaaaatactcaagtcatcaacaatgtgtttttttctgttatcgaattctgtgagaaataaagcatgaagtgacgtcatagacaatgttcttgattatagtcttacaaaagacacagaagaattcttcaaatgcaccttctaaaagtcacccctctgtaaaagcaaaaagtaaaacagtgacccctaactgaataaagccactgctaaaatactcacgtcaggttgtttctggtgatctgctatgaaacaaggtagagcctaagtaacggttgtccatttctgtgtaacaaattacatcacaactttgctgcctaatatagcaaacatttatgatctcacagtttctaaagatctctttaggctgactggttctagttatggtctctcatgaggttgcagacaagctgttggccaggattatagcctctgaagacttgaccaggaccaaaggatccacttccaagcttgctcatatggctgttgagtgagaacttcagtttcttgccacagacttctctacagggctgcacaagagtttgcttt

SEQ ID NO: 98717 - DNA, 408 bp, Homo sapiens
ccaggctggagtgcagtggcacaatcacgggacctcctggattcaagcaatactctcatctcagcctcctgaatagctgggaccatagcacaagccctgtaagaatgtgagagcgctcaaggatgttggctactgggaataaacatttgtgactacaacccacaaaacaatctgcacatggctaatcaagagaagactgcattttcctatttttgtttatatcataccagtagaacattgtacattaaatctataatgatgataaactgcccattgggattttcttcattcttgtaatcacccttaggactcaaaaaaatcccgtgagtttgcacttttcaaattctgttgtgggaaatgctgcaattaggtgctattgaaccaatctttgaaaattaaaaatgctgt

SEQ ID NO: 98718 - DNA, 623 bp, Homo sapiens
cgcagagcggcacacagggcgcgccgcgctcgctcggcacgggcagctcagccggcctcacgccgccgtccgcaacagcagccgcgggcggggtgcagccacctccgtgagcgccgcagcccgccccactcggggcggggcccgcgggcaccggagagcggacggccgagcacgagggggctgcgcgcagctccgggcagggaccccgtctgcaccgggtggcctgcaagattgccggggtaggcagggggaggagaacgctcacccgttccggtctggcgctcccttttctccacacccacacgcctcccgctccacgctggcggcgcagctgctcccgctgccacagccgccaccgccgccgaagctcgcgccgccgccgctgccgccttggctgagcgcggtcacgtgacgcgatccgcggggagcctgggggcgggcgagtgcgcgcgcgcgcgcgcggaggaaccgcggctcggaccgggactgggagctgagcggcactgggagggcgtttaaggggaggacccggcgagcgcgccctcggctggcgagcgcgcgcctggcgattagaacttgccgcgcggtcgggaaagggtggccggagtgaggggcggaggtgg

SEQ ID NO: 98719 - DNA, 4833 bp, Homo sapiens
gtgtgacgaaacctgcttcggcggcccgaggtgggggttttgagtcggttagtggaggcagtgggagcaggatgggcggagcttctgttccaaaaatttcccctaagtgcggttgacagtgtgcaggcaggcgggggtgcgcggggcggtcagcgatctgcagcttcgcggggacagagatgtaacccaactcgttcacggatgttccgcgcgccgtgtcaccggctgcgggccagggtactcggaaggcgcgggcaggagcctggcgaggatgcaccttcccctgccttggaaagggaatggagaggccggcggcccgggagccgcatgggcccgacgcgctgcggcgcttccagggactgctgctggaccgccgaggccggctgcaccgccaggtgctgcgcctgcgcgaggtggcccggcgcctggagcgcctgcgcaggcgctccctcgtagccaacgtggccggcagctcgctgagcgcaacgggcgccctcgccgccatcgtggggctctcgctcagcccggtcaccctggggacctcgctgctggtgtcggccgtggggctgggggtggccacagccggaggggccgtcaccatcacgtccgatctctcgctgatcttctgcaactcccgggagctgcggagggtgcaggagatcgcggccacctgccaggaccagatgcgagagatcctgagctgcctcgagtttttctgccgctggcagggctgcggggaccgccagctgctgcagtgcgggaggaacgcctccatcgccctgtacaattctgtctacttcatcgtcttctttggctcacgtggcttcctcatccccaggcgggcggagggggacaccaaggttagccaggccgtgctgaaggccaagattcagaaactggccgagagcctggagtcctgcaccggggctctggacgaactcagcgagcagctggagtctcgggttcagctctgcaccaagtccagtcgtggccacgacctcaagatctctgctgaccagcgtgcagggctgtttttctgagaacatcctttccccctaatgaccgaggccagcaaatcatcctcatgggatgctccagaatttgtagctcccttaggaaaacaccaagctgggttaggagccgaaggcaaaggatgagaaaaactgtttttgaagtgggcaggtccccaaagcccttcttttcccatcactgtgacatctgcctgggcttgagtgctacggacttttcagtcttcctagtggaaaaatgtgacccaaaaactccttttcctttatcaaaaactttctgtctaaacacagctgggcaggcactcctgttttaaagttatttcggggtccctgaccctgccctggtggcttggcctgagactggagagagtgccatcctctgggtcctctccaagtcctactagtctttgaagtcctcaaaatgtgcgtgaggaaggcatttgcctctattccagaatttctgatacaaagaactccagaatccagagcaaatcagcccttctctgaacgttgtaggatggttcagaacccagagaggaccctggtgctgatatctcctcctcttccctttcccctcagcttacttactcccagatgcggcctgggtatgaagtaggcctttcctgagtggctcccaatccagtcctccaagtactcagaggggaagcccgtgaagccgtcatctaagtcctgctccctcacatgaagctgagggccagatagatggagcgactgccaacttcatttcccgacatcattgtgttcagaagagagtgatgggttttgagttagacagtcctgggcttgagacaggctttgtcactactgtgtgagtgtagccacctaatctctctgagactgtgtaaaacaaagatgataaaatctcaccctgttgtgagatattaaatgagccaaagtgcctagcatgatggtgctggctcatatagtgtagtccctggaatggcaaattaacatcacccaggaacttgttagaaaggcaaattcttggacacaaccctcctgatttatggaatcagaaactctggctgtggggcccagcaacctgagtttaaacaatttctctgggtggttctgcggcacactaaggtttgaaaatcactacaacaaatgctaacttctaatccccttgatgagctttcacgaagtctcacggcttctctagggactccatggtcttcagagtcgttcacagatgaccaaggacagactgtgtcccagaagccaaaatgagagagagagagagagcacgcgtacgtgcaccctggggcagtgtctcaccgtatgaataagggatgtaacactaaaagcccattagggggcagtgtttcccgcctgttgtagaaactggtacagaaaggaatatgaagttcctgaaactgacctttgtctattattaccttctctgaaaagtgccagtccatgtattttttatttattttaagtttgtaatttaatttttaattattgtttagtgtttgcatttaattttatttaatcaccacatttagaaaataataagagcaagtttctaaatgggagactgctgaggctctttgcaagagatgagattaagtttgagtttctaaggcagggcatgagctggaaatagcattgctttccttgattgtctctctccttcagggagattctttttctctagtgttttaagtgatcctttgaagtaagtgtggagagtcttgaatggcaagaccaggagctgagtttaagcttgtaatggaagcttgcattgtgggatatataactgaggaagcatatttatcctgaaggtattttgccagaaggtatcacttgacctggaaaaggaatctatttagttcaggaaagataaaaagtttagaggtatgtgaaggaagcacttagaacttgcaagcctgatgtcctatcaagttatgtcttctgggtgacagacaaaatagcttgtcttatggtggtgatgtgttgcattttcactttggggtctgtaagaaactgtcagtgaaaatatgtacaattccttcaatttccattcttaacaactgtaatgttgaaaaataagttgaaaagtctttgggaccatacatgcaaaaacggtgcctctgttacttaattatttaatattctataaatgtacccaatctgtccgcacccttcccagtgatggggcagtatgtctgaggaagtataatttcagtactggggtcggggagaggaggtgatgtttctacatttttattttttctataaattgcaattggtctgtatgctggtttattttgaaatttatattggtttcttttcaagctggtgtcatctcctagactgtttcacccagatgctagcattttttttttttttttgagacagagtctcactctgtcacctaggctggagttgcagtggtttgatctcggctcactgcaacctccgactcctgggttcaagcaattcttctgcctcagcctcctgagtagctgggattacagatgtgcaccagcacacccggctaattttttgtatttttagtagagacagggtttcgccatgttggccaggctggtcttgaactcctggccttatgtgatccgcccaccttggcttcccaaagtgctgggattacaggcatgagccacctcgcctggccagatgctagcattttagatcaaacaattcattttagatgaattgttttgtttcacaatcattttaaatcattttagaatgtacttcacattattagttgtgttatggcataaaggtacaaccattccctaactccatcttttattaatgcttaagtttaaattatattcttccaatgcctaagctattccctagaattaaactgggcacttttggaagcagcaacagtaacagcagcagcaaacttttcctctcatattttgggtgtatcaaaagttctagacttttgaagttatgatttcagtggcccactttatttctaaggaagagtgtctactttggaacgatactttgcacatagtaggaactcaagaaatacatttgaataattataattaactgtttagctatcttaatgagaatttgttgacaacaaaagatcatccatcgccttatgtgtgagtaagattggagcctctatcaagatttagtcaagttcagttagattgattctagaaacaaatatttatttctttcttttacggggatgtgaataaggcttttccttaaggccttcattctttaaacaaacaggttgaaatggtatgttgtaaaagagaagacgggagagaggtatttagatgataagtgtacttcacaaaaatgccaaagtttgaaaaataggtatgtttgttctaaatgtttaagtgcttctctgttaggttctggggcttgcaatcatttgaattgttctgtttcacaataaaggagattcactgggttctgcattttcaggattcaatagaactgctccattaaaaaaataatccttagcaagcattcgaatcctaactgctttgatgcacttgccctcgggcacctgtcatttccaatatggtaggtgtcaaagtcaaaagtatttactgggagaaaaaagagaggagtggttgtagaagtctccctaaatcagacatgtcaagcaatcagccaacgtggtgtatttctcattcaatattttagtgtgaattgagacactgagataaagacatcgtgcagagataaatggggatacagttaaatgtagcaactcttgagttcattttttcccactgtagcaaaattaatgctttctctttattgaaat

SEQ ID NO: 98720 - DNA, 1145 bp, Homo sapiens
gtgtgacgaaacctgcttcggcggcccgaggtgggggttttgagtcggttagtggaggcagtgggagcaggatgggcggagcttctgttccaaaaatttcccctaagtgcggttgacagtgtgcaggcaggcgggggtgcgcggggcggtcagcgatctgcagcttcgcggggacagagatgtaacccaactcgttcacggatgttccgcgcgccgtgtcaccggctgcgggccagggtactcggaaggcgcgggcaggagcctggcgaggatgcaccttcccctgccttggaaaggtagaactggggagtgcgggagggtgaaggtggcccggaaaagaacacctcttcgcaaccaaaaaaaaaaaaaaaaaaaaaaaaagaggggaattaggggaaaattgtgttttatttcaaagcggcacacttcagaaacccagttcattaattcacgagcccagtgtgggtgtgtcaatatttagtgggaattcaagattttgaagaagatgtttacaaagataagaaagaaaagaagagaaataatagtagagaaaagaaaaaagacagaggggggggaggggacagtagcaaagatatcaccccaaaaggggggcggcacacgaactacgagggaggacacaagaggttattagtaagaaaaaaggggggggcgccccataatagcggtgaggaggacatctaataatcaaagagcaaagaagaggaagtagcgggcgcagataaaaacaacagcagggggcagagagagggagagaaaacacctgattaagcccaatgctggggagactacacctgttgtggaggacagaagaggacacacccctatcaaaaccgcatggggggggggaggcagaaaaacaaaatcaagatgggggacgaaaccagacacaaaaccacgcacaacaaggaggagagatatattaaaccgacgacccacagagaggagcagacgataatctaacaagagactagacaagaagagactcatacgacacgcgggtctaaaccacagaacacgcgacgcgacaagaataaagcagctgcgacgagagacgtcaataagaaaatagatggaaccccacaaaggaggagaagatggaataaatgaaggaacacaattatatt

SEQ ID NO: 98721 - DNA, 4784 bp, Homo sapiens
gtgtgacgaaacctgcttcggcggcccgaggtgggggttttgagtcggttagtggaggcagtgggagcaggatgggcggagcttctgttccaaaaatttcccctaagtgcggttgacagtgtgcaggcaggcgggggtgcgcggggcggtcagcgatctgcagcttcgcggggacagagatgtaacccaactcgttcacggatgttccgcgcgccgtgtcaccggctgcgggccagggtactcggaaggcgcgggcaggagcctggcgaggatgcaccttcccctgccttggaaagggaatggagaggccggcggcccgggagccgcatgggcccgacgcgctgcggcgcttccagggactgctgctggaccgccgaggccggctgcaccgccaggtgctgcgcctgcgcgaggtggcccggcgcctggagcgcctgcgcaggcgctccctcgtagccaacgtggccggcagctcgctgagcgcaacgggcgccctcgccgccatcgtggggctctcgctcagcccggtcaccctggggacctcgctgctggtgtcggccgtggggctgggggtggccacagccggaggggccgtcaccatcacgtccgatctctcgctgatcttctgcaactcccgggagctgcggagggtgcaggagatcgcggccacctgccaggaccagatgcgagagatcctgagctgcctcgagtttttctgccgctggcagggctgcggggaccgccagctgctgcagtgcgggaggaacgcctccatcgccctgtacaattctgtctacttcatcgtcttctttggctcacgtggcttcctcatccccaggcgggcggagggggacaccaaggttagccaggccgtgctgaaggccaagattcagaaactggccgagagcctggagtcctgcaccggggctctggacgaactcagcgagcagctggagtctcgggttcagctctgcaccaagtccagtcgtggccacgacctcaagatctctgctgaccagcgtgcagggctgtttttctgagaacatcctttccccctaatgaccgaggccagcaaatcatcctcatgggatgctccagaatttgtagctcccttaggaaaacaccaagctgggttaggagccgaaggcaaaggatgagaaaaactgtttttgaagtgggcaggtccccaaagcccttcttttcccatcactgtgacatctgcctgggcttgagtgctacggacttttcagtcttcctagtggaaaaatgtgacccaaaaactccttttcctttatcaaaaactttctgtctaaacacagctgggcaggcactcctgttttaaagttatttcggggtccctgaccctgccctggtggcttggcctgagactggagagagtgccatcctctgggtcctctccaagtcctactagtctttgaagtcctcaaaatgtgcgtgaggaaggcatttgcctctattccagaatttctgatacaaagaactccagaatccagagcaaatcagcccttctctgaacgttgtaggatggttcagaacccagagaggaccctggtgctgatatctcctcctcttccctttcccctcagcttacttactcccagatgcggcctgggtatgaagtaggcctttcctgagtggctcccaatccagtcctccaagtactcagaggggaagcccgtgaagccgtcatctaagtcctgctccctcacatgaagctgagggccagatagatggagcgactgccaacttcatttcccgacatcattgtgttcagaagagagtgatgggttttgagttagacagtcctgggcttgagacaggctttgtcactactgtgtgagtgtagccacctaatctctctgagactgtgtaaaacaaagatgataaaatctcaccctgttgtgagatattaaatgagccaaagtgcctagcatgatggtgctggctcatatagtgtagtccctggaatggcaaattaacatcacccaggaacttgttagaaaggcaaattcttggacacaaccctcctgatttatggaatcagaaactctggctgtggggcccagcaacctgagtttaaacaatttctctgggtggttctgcggcacactaaggtttgaaaatcactacaacaaatgctaacttctaatccccttgatgagctttcacgaagtctcacggcttctctagggactccatggtcttcagagtcgttcacagatgaccaaggacagactgtgtcccagaagccaaaatgagagagagagagagagcacgcgtacgtgcaccctggggcagtgtctcaccgtatgaataagggatgtaacactaaaagcccattagggggcagtgtttcccgcctgttgtagaaactggtacagaaaggaatatgaagttcctgaaactgacctttgtctattattaccttctctgaaaagtgccagtccatgtattttttatttattttaagtttgtaatttaatttttaattattgtttagtgtttgcatttaattttatttaatcaccacatttagaaaataataagagcaagtttctaaatgggagactgctgaggctctttgcaagagatgagattaagtttgagtttctaaggcagggcatgagctggaaatagcattgctttctcttgaatggcaagaccaggagctgagtttaagcttgtaatggaagcttgcattgtgggatatataactgaggaagcatatttatcctgaaggtattttgccagaaggtatcacttgacctggaaaaggaatctatttagttcaggaaagataaaaagtttagaggtatgtgaaggaagcacttagaacttgcaagcctgatgtcctatcaagttatgtcttctgggtgacagacaaaatagcttgtcttatggtggtgatgtgttgcattttcactttggggtctgtaagaaactgtcagtgaaaatatgtacaattccttcaatttccattcttaacaactgtaatgttgaaaaataagttgaaaagtctttgggaccatacatgcaaaaacggtgcctctgttacttaattatttaatattctataaatgtacccaatctgtccgcacccttcccagtgatggggcagtatgtctgaggaagtataatttcagtactggggtcggggagaggaggtgatgtttctacatttttattttttctataaattgcaattggtctgtatgctggtttattttgaaatttatattggtttcttttcaagctggtgtcatctcctagactgtttcacccagatgctagcattttttttttttttttgagacagagtctcactctgtcacctaggctggagttgcagtggtttgatctcggctcactgcaacctccgactcctgggttcaagcaattcttctgcctcagcctcctgagtagctgggattacagatgtgcaccagcacacccggctaattttttgtatttttagtagagacagggtttcgccatgttggccaggctggtcttgaactcctggccttatgtgatccgcccaccttggcttcccaaagtgctgggattacaggcatgagccacctcgcctggccagatgctagcattttagatcaaacaattcattttagatgaattgttttgtttcacaatcattttaaatcattttagaatgtacttcacattattagttgtgttatggcataaaggtacaaccattccctaactccatcttttattaatgcttaagtttaaattatattcttccaatgcctaagctattccctagaattaaactgggcacttttggaagcagcaacagtaacagcagcagcaaacttttcctctcatattttgggtgtatcaaaagttctagacttttgaagttatgatttcagtggcccactttatttctaaggaagagtgtctactttggaacgatactttgcacatagtaggaactcaagaaatacatttgaataattataattaactgtttagctatcttaatgagaatttgttgacaacaaaagatcatccatcgccttatgtgtgagtaagattggagcctctatcaagatttagtcaagttcagttagattgattctagaaacaaatatttatttctttcttttacggggatgtgaataaggcttttccttaaggccttcattctttaaacaaacaggttgaaatggtatgttgtaaaagagaagacgggagagaggtatttagatgataagtgtacttcacaaaaatgccaaagtttgaaaaataggtatgtttgttctaaatgtttaagtgcttctctgttaggttctggggcttgcaatcatttgaattgttctgtttcacaataaaggagattcactgggttctgcattttcaggattcaatagaactgctccattaaaaaaataatccttagcaagcattcgaatcctaactgctttgatgcacttgccctcgggcacctgtcatttccaatatggtaggtgtcaaagtcaaaagtatttactgggagaaaaaagagaggagtggttgtagaagtctccctaaatcagacatgtcaagcaatcagccaacgtggtgtatttctcattcaatattttagtgtgaattgagacactgagataaagacatcgtgcagagataaatggggatacagttaaatgtagcaactcttgagttcattttttcccactgtagcaaaattaatgctttctctttattgaaataaattgctcattcctcaaaaaaaaaaa

SEQ ID NO: 98722 - DNA, 341 bp, Homo sapiens
gatgaagcccatcgttaacgttccctgggagagaagcagaagatagcattattcctatttccatatgcagagataaggtcctgagaacttgtgtggctccccccggattccagaacaggtctttgagaactcgtctcatgatccactggaaacagacccgttcccctagcgtggcagtggctgctccgctgaactcgtgccaagttcccgctggcgtccgggcagcagggcgggagcggcggctggcacggagactccaggctgaccgcgtgtctatgtccccgcagggaatggagaggccggcggcccgggagccgcatgggcccgacgcgctgcggcgc

SEQ ID NO: 98723 - DNA, 4860 bp, Homo sapiens
gtgtgacgaaacctgcttcggcggcccgaggtgggggttttgagtcggttagtggaggcagtgggagcaggatgggcggagcttctgttccaaaaatttcccctaagtgcggttgacagtgtgcaggcaggcgggggtgcgcggggcggtcagcgatctgcagcttcgcggggacagagatgtaacccaactcgttcacggatgttccgcgcgccgtgtcaccggctgcgggccagggtactcggaaggcgcgggcaggagcctggcgaggatgcaccttcccctgccttggaaagggaatggagaggccggcggcccgggagccgcatgggcccgacgcgctgcggcgcttccagggactgctgctggaccgccgaggccggctgcaccgccaggtgctgcgcctgcgcgaggtggcccggcgcctggagcgcctgcgcaggcgctccctcgtagccaacgtggccggcagctcgctgagcgcaacgggcgccctcgccgccatcgtggggctctcgctcagcccggtcaccctggggacctcgctgctggtgtcggccgtggggctgggggtggccacagccggaggggccgtcaccatcacgtccgatctctcgctgatcttctgcaactcccgggagctgcggagggtgcaggagatcgcggccacctgccaggaccagatgcgagagatcctgagctgcctcgagtttttctgccgctggcagggctgcggggaccgccagctgctgcagtgcgggaggaacgcctccatcgccctgtacaattctgtctacttcatcgtcttctttggctcacgtggcttcctcatccccaggcgggcggagggggacaccaaggttagccaggccgtgctgaaggccaagattcagaaactggccgagagcctggagtcctgcaccggggctctggacgaactcagcgagcagctggagtctcgggttcagctctgcaccaagtccagtcgtggccacgacctcaagatctctgctgaccagcgtgcagggctgtttttctgagaacatcctttccccctaatgaccgaggccagcaaatcatcctcatgggatgctccagaatttgtagctcccttaggaaaacaccaagctgggttaggagccgaaggcaaaggatgagaaaaactgtttttgaagtgggcaggtccccaaagcccttcttttcccatcactgtgacatctgcctgggcttgagtgctacggacttttcagtcttcctagtggaaaaatgtgacccaaaaactccttttcctttatcaaaaactttctgtctaaacacagctgggcaggcactcctgttttaaagttatttcggggtccctgaccctgccctggtggcttggcctgagactggagagagtgccatcctctgggtcctctccaagtcctactagtctttgaagtcctcaaaatgtgcgtgaggaaggcatttgcctctattccagaatttctgatacaaagaactccagaatccagagcaaatcagcccttctctgaacgttgtaggatggttcagaacccagagaggaccctggtgctgatatctcctcctcttccctttcccctcagcttacttactcccagatgcggcctgggtatgaagtaggcctttcctgagtggctcccaatccagtcctccaagtactcagaggggaagcccgtgaagccgtcatctaagtcctgctccctcacatgaagctgagggccagatagatggagcgactgccaacttcatttcccgacatcattgtgttcagaagagagtgatgggttttgagttagacagtcctgggcttgagacaggctttgtcactactgtgtgagtgtagccacctaatctctctgagactgtgtaaaacaaagatgataaaatctcaccctgttgtgagatattaaatgagccaaagtgcctagcatgatggtgctggctcatatagtgtagtccctggaatggcaaattaacatcacccaggaacttgttagaaaggcaaattcttggacacaaccctcctgatttatggaatcagaaactctggctgtggggcccagcaacctgagtttaaacaatttctctgggtggttctgcggcacactaaggtttgaaaatcactacaacaaatgctaacttctaatccccttgatgagctttcacgaagtctcacggcttctctagggactccatggtcttcagagtcgttcacagatgaccaaggacagactgtgtcccagaagccaaaatgagagagagagagagagcacgcgtacgtgcaccctggggcagtgtctcaccgtatgaataagggatgtaacactaaaagcccattagggggcagtgtttcccgcctgttgtagaaactggtacagaaaggaatatgaagttcctgaaactgacctttgtctattattaccttctctgaaaagtgccagtccatgtattttttatttattttaagtttgtaatttaatttttaattattgtttagtgtttgcatttaattttatttaatcaccacatttagaaaataataagagcaagtttctaaatgggagactgctgaggctctttgcaagagatgagattaagtttgagtttctaaggcagggcatgagctggaaatagcattgctttccttgattgtctctctccttcagggagattctttttctctagtgttttaagtgatcctttgaagtaagtgtggagagtcttgaatggcaagaccaggagctgagtttaagcttgtaatggaagcttgcattgtgggatatataactgaggaagcatatttatcctgaaggtattttgccagaaggtatcacttgacctggaaaaggaatctatttagttcaggaaagataaaaagtttagaggtatgtgaaggaagcacttagaacttgcaagcctgatgtcctatcaagttatgtcttctgggtgacagacaaaatagcttgtcttatggtggtgatgtgttgcattttcactttggggtctgtaagaaactgtcagtgaaaatatgtacaattccttcaatttccattcttaacaactgtaatgttgaaaaataagttgaaaagtctttgggaccatacatgcaaaaacggtgcctctgttacttaattatttaatattctataaatgtacccaatctgtccgcacccttcccagtgatggggcagtatgtctgaggaagtataatttcagtactggggtcggggagaggaggtgatgtttctacatttttattttttctataaattgcaattggtctgtatgctggtttattttgaaatttatattggtttcttttcaagctggtgtcatctcctagactgtttcacccagatgctagcattttttttttttttttgagacagagtctcactctgtcacctaggctggagttgcagtggtttgatctcggctcactgcaacctccgactcctgggttcaagcaattcttctgcctcagcctcctgagtagctgggattacagatgtgcaccagcacacccggctaattttttgtatttttagtagagacagggtttcgccatgttggccaggctggtcttgaactcctggccttatgtgatccgcccaccttggcttcccaaagtgctgggattacaggcatgagccacctcgcctggccagatgctagcattttagatcaaacaattcattttagatgaattgttttgtttcacaatcattttaaatcattttagaatgtacttcacattattagttgtgttatggcataaaggtacaaccattccctaactccatcttttattaatgcttaagtttaaattatattcttccaatgcctaagctattccctagaattaaactgggcacttttggaagcagcaacagtaacagcagcagcaaacttttcctctcatattttgggtgtatcaaaagttctagacttttgaagttatgatttcagtggcccactttatttctaaggaagagtgtctactttggaacgatactttgcacatagtaggaactcaagaaatacatttgaataattataattaactgtttagctatcttaatgagaatttgttgacaacaaaagatcatccatcgccttatgtgtgagtaagattggagcctctatcaagatttagtcaagttcagttagattgattctagaaacaaatatttatttctttcttttacggggatgtgaataaggcttttccttaaggccttcattctttaaacaaacaggttgaaatggtatgttgtaaaagagaagacgggagagaggtatttagatgataagtgtacttcacaaaaatgccaaagtttgaaaaataggtatgtttgttctaaatgtttaagtgcttctctgttaggttctggggcttgcaatcatttgaattgttctgtttcacaataaaggagattcactgggttctgcattttcaggattcaatagaactgctccattaaaaaaataatccttagcaagcattcgaatcctaactgctttgatgcacttgccctcgggcacctgtcatttccaatatggtaggtgtcaaagtcaaaagtatttactgggagaaaaaagagaggagtggttgtagaagtctccctaaatcagacatgtcaagcaatcagccaacgtggtgtatttctcattcaatattttagtgtgaattgagacactgagataaagacatcgtgcagagataaatggggatacagttaaatgtagcaactcttgagttcattttttcccactgtagcaaaattaatgctttctctttattgaaataaattgctcattcctcaaaaaaaaaaa

SEQ ID NO: 98724 - DNA, 4858 bp, Homo sapiens
gtgtgacgaaacctgcttcggcggcccgaggtgggggttttgagtcggttagtggaggcagtgggagcaggatgggcggagcttctgttccaaaaatttcccctaagtgcggttgacagtgtgcaggcaggcgggggtgcgcggggcggtcagcgatctgcagcttcgcggggacagagatgtaacccaactcgttcacggatgttccgcgcgccgtgtcaccggctgcgggccagggtactcggaaggcgcgggcaggagcctggcgaggatgcaccttcccctgccttggaaagggaatggagaggccggcggcccgggagccgcatgggcccgacgcgctgcggcgcttccagggactgctgctggaccgccgaggccggctgcaccgccaggtgctgcgcctgcgcgaggtggcccggcgcctggagcgcctgcgcaggcgctccctcgtagccaacgtggccggcagctcgctgagcgcaacgggcgccctcgccgccatcgtggggctctcgctcagcccggtcaccctggggacctcgctgctggtgtcggccgtggggctgggggtggccacagccggaggggccgtcaccatcacgtccgatctctcgctgatcttctgcaactcccgggagctgcggagggtgcaggagatcgcggccacctgccaggaccagatgcgagagatcctgagctgcctcgagtttttctgccgctggcagggctgcggggaccgccagctgctgcagtgcgggaggaacgcctccatcgccctgtacaattctgtctacttcatcgtcttctttggctcacgtggcttcctcatccccaggcgggcggagggggacaccaaggttagccaggccgtgctgaaggccaagattcagaaactggccgagagcctggagtcctgcaccggggctctggacgaactcagcgagcagctggagtctcgggttcagctctgcaccaagtccagtcgtggccacgacctcaagatctctgctgaccagcgtgcagggctgtttttctgagaacatcctttccccctaatgaccgaggccagcaaatcatcctcatgggatgctccagaatttgtagctcccttaggaaaacaccaagctgggttaggagccgaaggcaaaggatgagaaaaactgtttttgaagtgggcaggtccccaaagcccttcttttcccatcactgtgacatctgcctgggcttgagtgctacggacttttcagtcttcctagtggaaaaatgtgacccaaaaactccttttcctttatcaaaaactttctgtctaaacacagctgggcaggcactcctgttttaaagttatttcggggtccctgaccctgccctggtggcttggcctgagactggagagagtgccatcctctgggtcctctccaagtcctactagtctttgaagtcctcaaaatgtgcgtgaggaaggcatttgcctctattccagaatttctgatacaaagaactccagaatccagagcaaatcagcccttctctgaacgttgtaggatggttcagaacccagagaggaccctggtgctgatatctcctcctcttccctttcccctcagcttacttactcccagatgcggcctgggtatgaagtaggcctttcctgagtggctcccaatccagtcctccaagtactcagaggggaagcccgtgaagccgtcatctaagtcctgctccctcacatgaagctgagggccagatagatggagcgactgccaacttcatttcccgacatcattgtgttcagaagagagtgatgggttttgagttagacagtcctgggcttgagacaggctttgtcactactgtgtgagtgtagccacctaatctctctgagactgtgtaaaacaaagatgataaaatctcaccctgttgtgagatattaaatgagccaaagtgcctagcatgatggtgctggctcatatagtgtagtccctggaatggcaaattaacatcacccaggaacttgttagaaaggcaaattcttggacacaaccctcctgatttatggaatcagaaactctggctgtggggcccagcaacctgagtttaaacaatttctctgggtggttctgcggcacactaaggtttgaaaatcactacaacaaatgctaacttctaatccccttgatgagctttcacgaagtctcacggcttctctagggactccatggtcttcagagtcgttcacagatgaccaaggacagactgtgtcccagaagccaaaatgagagagagagagagagcacgcgtacgtgcaccctggggcagtgtctcaccgtatgaataagggatgtaacactaaaagcccattagggggcagtgtttcccgcctgttgtagaaactggtacagaaaggaatatgaagttcctgaaactgacctttgtctattattaccttctctgaaaagtgccagtccatgtattttttatttattttaagtttgtaatttaatttttaattattgtttagtgtttgcatttaattttatttaatcaccacatttagaaaataataagagcaagtttctaaatgggagactgctgaggctctttgcaagagatgagattaagtttgagtttctaaggcagggcatgagctggaaatagcattgctttccttgattgtctctctccttcagggagattctttttctctagtgttttaagtgatcctttgaagtaagtgtggagagtcttgaatggcaagaccaggagctgagtttaagcttgtaatggaagcttgcattgtgggatatataactgaggaagcatatttatcctgaaggtattttgccagaaggtatcacttgacctggaaaaggaatctatttagttcaggaaagataaaaagtttagaggtatgtgaaggaagcacttagaacttgcaagcctgatgtcctatcaagttatgtcttctgggtgacagacaaaatagcttgtcttatggtggtgatgtgttgcattttcactttggggtctgtaagaaactgtcagtgaaaatatgtacaattccttcaatttccattcttaacaactgtaatgttgaaaaataagttgaaaagtctttgggaccatacatgcaaaaacggtgcctctgttacttaattatttaatattctataaatgtacccaatctgtccgcacccttcccagtgatggggcagtatgtctgaggaagtataatttcagtactggggtcggggagaggaggtgatgtttctacatttttattttttctataaattgcaattggtctgtatgctggtttattttgaaatttatattggtttcttttcaagctggtgtcatctcctagactgtttcacccagatgctagcattttttttttttttttgagacagagtctcactctgtcacctaggctggagttgcagtggtttgatctcggctcactgcaacctccgactcctgggttcaagcaattcttctgcctcagcctcctgagtagctgggattacagatgtgcaccagcacacccggctaattttttgtatttttagtagagacagggtttcgccatgttggccaggctggtcttgaactcctggccttatgtgatccgcccaccttggcttcccaaagtgctgggattacaggcatgagccacctcgcctggccagatgctagcattttagatcaaacaattcattttagatgaattgttttgtttcacaatcattttaaatcattttagaatgtacttcacattattagttgtgttatggcataaaggtacaaccattccctaactccatcttttattaatgcttaagtttaaattatattcttccaatgcctaagctattccctagaattaaactgggcacttttggaagcagcaacagtaacagcagcagcaaacttttcctctcatattttgggtgtatcaaaagttctagacttttgaagttatgatttcagtggcccactttatttctaaggaagagtgtctactttggaacgatactttgcacatagtaggaactcaagaaatacatttgaataattataattaactgtttagctatcttaatgagaatttgttgacaacaaaagatcatccatcgccttatgtgtgagtaagattggagcctctatcaagatttagtcaagttcagttagattgattctagaaacaaatatttatttctttcttttacggggatgtgaataaggcttttccttaaggccttcattctttaaacaaacaggttgaaatggtatgttgtaaaagagaagacgggagagaggtatttagatgataagtgtacttcacaaaaatgccaaagtttgaaaaataggtatgtttgttctaaatgtttaagtgcttctctgttaggttctggggcttgcaatcatttgaattgttctgtttcacaataaaggagattcactgggttctgcattttcaggattcaatagaactgctccattaaaaaaataatccttagcaagcattcgaatcctaactgctttgatgcacttgccctcgggcacctgtcatttccaatatggtaggtgtcaaagtcaaaagtatttactgggagaaaaaagagaggagtggttgtagaagtctccctaaatcagacatgtcaagcaatcagccaacgtggtgtatttctcattcaatattttagtgtgaattgagacactgagataaagacatcgtgcagagataaatggggatacagttaaatgtagcaactcttgagttcattttttcccactgtagcaaaattaatgctttctctttattgaaatggtcgccgatccgggatcctctgaa

SEQ ID NO: 98725 - DNA, 290 bp, Homo sapiens
ttcctccatgttcaaaataaaaattaaacatattgctgaatttttatttattttatgataattaggaaaaagaaatgtgaaaaaccctgttatatataactgttatgcagcaattatatttacttattaaatctattcaattaaatgtggaatgattcatttaaacaatgagcatcataggtatttttatctggtcttacttttatttcataccattattgtcatggatttagtgaataggagtaaaactatttattcaaaatcaagggtacaaaataaataaatacata

SEQ ID NO: 98726 - DNA, 618 bp, Homo sapiens
aaattttctaattaccacattaaaatagtaaaaaccaggtgaaattaattttaagaaaatactgtattttatatatatatctccaaaatattatttcagcatataaccagtgtaaaaactataaatgagatcattgacattttttttcataccacatttttagaaccctgtgtgtgtttacactgacagcacattccacttgagaccagtgctgcgggactggggagtgcaagcgtcagggtcccagccgaagccctttagcttgggacttcacagccacagcctgagtcccagctcacaactccagaccaaattcccctcccagctcatgtgctgcgatcaagacagatgccacacatggcctggatccccacccccctggcctgctgtgttggctgggcttttccttggagcatggcccctggtgcttctgccactcctacctccctgcccacccccgaaaccccatccctcagagggaccgggtatttttcaacatcctcatccagatcaaggccccattgacattggagagaattcaagcccaacagggaattccattacttatcattgagcactgactaagatttttttttttaactagactttttctgaaac

SEQ ID NO: 98727 - DNA, 248 bp, Homo sapiens
gcataagtaagaactgcagtataatgaacacttgctatgagccagacacagtgttggaggtggtataggtactccaggaggaagacgtctccagccagttagctcaggtgtgtttgtatggcaccagtgccccaagatgacaatattcaaaaatgccagacttcttgaagtttagacttgagagtctcccagtgtcatttctactacattcttttggttaaagcaagttacctggctaaacctagagt

SEQ ID NO: 98728 - DNA, 902 bp, Homo sapiens
cccagctacttgggagggtgagatgggaggattgcttgatcctgggaggtggaggttgcagtgagctgtgtttgtgccactgcactccagcctgggcaacagagcaagaccccatctcaaaaaaaattaagcaggtatggaggccagaatgtcacaagacagagaggacttgaaagtagggaaaaaagggacaatatttacttttgtcaaaaagtaacaattactttttaaagaagtataacaattataggaaggagagagaaaaaatagttcaagggaagaggccaagttaaggaaaggtttttgtcttgttttgttattgttgatttaagacagagaagacctgcagctatgtagaggtggaggaaagaaactacagtatctactaccctattcttctaacctattcttctaatttgctcactgtaaaaagagaaaccgaagactagaaattaaacagggtggaatatggtcttagatgggaaggaatgaggtcaagaacacaaagagaagcatgtcttagaaaagggggatgcatggctgaaaagaggtaagtcttgaaggtagatgggaagaagttttgggaatggtcatatctaataatttagttttttctctatgaaataggaggcacagtcaactttgacagttctaagaggcttgagaagaataaaacgtttgtaatacctcttccagggaacacaatagtaaaccacttaggaaccagtagaaggattgctaagcagtattaggaagcctgtgtagcatatggccctctcaaataggtagagatgtttttagatatttaagaggaattaacattaacaaaaccaagggacaaagccaagctcaagtcccataaaacatggatattttattccagctctaggaaatgggaaaaa

SEQ ID NO: 98729 - DNA, 185 bp, Homo sapiens
acgacccgctgcccccacgggcagcccgtcctgtctcacaggcccgctgccccacaccggtcggagacggcagcagctcccgacgctgctgggacaacgggcgggtgaacctgcgaccagtggtgcagctgattgacatcatgaaggacctgacacgcctctcccaggacctgcagcacagtggt

SEQ ID NO: 98730 - DNA, 241 bp, Homo sapiens
agtgagaccctgtttcaaaaagaaaaaagaaaaaaaaatgagtttttgaaattactgtgttatatatacttgtattgttttaaaagaaaacttgaatatagaaataaatgggtctacagttagagagactgggtatttataaataaacataatatatttgtttgtttgttggaggccaactgactggaatttgcttttgcaacatgctgttaaagctaaactcttttctacctaacctttt

SEQ ID NO: 98731 - DNA, 290 bp, Homo sapiens
  misc_feature (24)..(24): n is a, c, g, or t
  misc_feature (46)..(46): n is a, c, g, or t
  misc_feature (58)..(58): n is a, c, g, or t
cactgtcctttttccatatttttntccaggaatctttgaatttttntaagtaactttntttttcagagtcttccttccatattccttctccaaagagtgaaatatgtaaatatatggacgtttttcattgaatcaaaatggaagttttgccaaatgatcaaagtgttagtccaatggtatttaaatattaaaaagagatgattattataagcataatgtcagaattaatttaaacaaattataattaatgtaatatgattttaggaaggatgaaacactttatgagaagt

SEQ ID NO: 98732 - DNA, 1148 bp, Homo sapiens
gagctcagggccgctcgcaggaggccgggaacatggcggggcagcccgcggccaccggctcgccgtctgccgacaaggacggaatggagcccaacgtcgtggctcggatctcgcagtgggcagacgaccacctgcgcctagtccggaacatcagcactggaatggccatagctggaataatgttacttttgagaagcattcgactgacatcaaaatttacaagctcttcggatattccagtagaatttataagaagaaatgttaaactacgtggacgattacgccgaataactgagaatggtttagaaattgaacatatacctattactttacctattatagcttcattgagaaaagagccacgtggtgctttgctggttaagttggctggagtagaactcgctgaaactgggaaggcatggttacaaaaagagctaaaaccttcccaattactatggttccaacttcttggaaaggagaattcagcactcttttgctatcttctggtgaataagggtggatatttcagcgtgaatctgaatgaagaaattttgagaagaggccttggcaaaactgttcttgttaaagggcttaaatatgattctaaaatctattggacagttcacagaaacttacttaaagctgaattaacagccttaaaaaaaggagaaggaatatggaaggaagactctgaaaaagaaagttacttagaaaaattcaaagattcctggagagaaatatggaaaaaggacagttttttaaaaacaacaggatcagatttcagcttgaaaaaagaaagttattatgaaaaacttaaaaggacttatgaaatatggaaagacaacatgaacaactgctccttaatactgaagttcagagaacttataagtcgcataaactttcgtagaaaagggtgaaacggtcaagaaatctagaggtaaccttctccaaagagtgaaatatgtaaatatatggacgtttttcattgaatcaaaatggaagttttgccaaatgatcaaagtgttagtccaatggtatttaaatattaaaaagagatgattattataagcataatgtcagaattaatttaaacaaattataattaatgtaatatgattttaggaaggatgaaacactttatgagaagt

SEQ ID NO: 98733 - DNA, 458 bp, Homo sapiens
ctgtgttatatatacttgtattgttttaaaagaaaacttgaatatagaaataaatgggtctacagttagagagactgggtatttataaataaacataatatatttgtttgtttgttggaggccaactgactggaatttgcttttgcaacatgctgttaaagctaaactcttttctacctaacctttttagaagagccacgtggtgctttgctggttaagttggctggagtagaactcgctgaaactgggaaggcatggttacaaaaagagctaaaaccttcccaattactatggttccaacttcttggaaaggagaattcagcactcttttgctatcttctggtgaataaggtaagcaatgtgaagaaataactagcaatatcttattcttcttattacttatatgtaaacacttatttaattagaactttggatatataatgggactgacttttttt

SEQ ID NO: 98734 - DNA, 198 bp, Homo sapiens
cccatcagttgttgatgcttagaatggttagcagaagtaggtaggaaacactcagacctcaattttcatgaacttcacttttcacagtattttaaacaattagagatgttggaaagaggtaaggaagaattttactatttagtctgctgcacatattcttttgttgttgtttttttgtttgagacagaatttcactct

SEQ ID NO: 98735 - DNA, 478 bp, Homo sapiens
tgttggagagaaaatgatgttggaagaggaatagacttatgatgctggagagaggggaaaaaacatggaaataaggctgaaggttccttacaagtcaccagaaaacagcaaccagaatacacagaaaaggaaggtaactcttaagagaaaggatacttcttggaattgggaaaaagggaggagaaaagagacaaaaggattttgatattaaagaagaaggtttactcaagatagtctagatattactggtaaaagggaacttctcttgaaacagtagaaaaagaaatgtggactggggatgtgtgaaaagaagacattttagaaacagtcactaaggtaaggctcaagtcagtgagacagcccagatatgaaaatgtgcttcattttcaaggcccaaaaaagagtttccaaattttaacattcctttctctccggaaattcttttttattttgagacaagagtcacactctgttgccc

SEQ ID NO: 98736 - DNA, 334 bp, Homo sapiens
actttttctacaatagaaaaaggaaattgccttaagagaaacatatacaaagtttatgagaatactggagaagaaggccttttgtctgtctatgattaagatggcaaaggttagggaagtctttgcagaagaaggatttgagctaagaatttgccatgaacaaacagtgcaagggtgttagtgtaaagatatatacaaaagcatagtatgttctggatactgaattcttgagcattcctggaatgtagtatgaggcagagagttgcaagaaatgatgttggacaagaaatcagaaatcatatgtcatctagaactttatctctcttttacagta

SEQ ID NO: 98737 - DNA, 129 bp, Homo sapiens
accaggcagatctactcaagtgccaaggtagttggtggattatctgcatagcttggatttaacctgttctccgtgtccaggatggtgtctgattctctcaaaacgcatgtcagaagacggtgctgacca

SEQ ID NO: 98738 - DNA, 375 bp, Homo sapiens
atctcgccatgttgcccaggctgggctatatgtatatatattttaaagtattggtaaggatgtggagaaatcggaaccctcctatgttgctgatgggaatggaaaatggcacactcattgtggaaaataatttgggagctcctcaaaaagttaaacatgaagcccccatatgacccagcaattccactcctaggtatttatccaagagaaagaaaaacgtgctcccacataaaaacgtgtatatgaatcttcacagcagcattatttgtaacagccaaaaggtgaacacaacccaaatgtccgtctgtagatgaatggatacagaatgtgatctgtccatgcaatgaaatgtggctcagccacagaaaggaatga

SEQ ID NO: 98739 - DNA, 267 bp, Homo sapiens
actaatgtagatgacaggttgatggctgcagcaaaccaccatggcacgcgtatacctctgtaacaaagctgcatgttctgcacaggtatcccagaaattaaagtatgattaaaaaaaatttctagtaatagtaacactactagtaattcaaatgaagtgtgtgtaacagaagaaataaaaaaaaaattaaaatgctacatctgaaaatacctatttcatacaaagcaaggaggtaaagaagggatagaacatatttttttaaaatat

SEQ ID NO: 98740 - DNA, 309 bp, Homo sapiens
gagagggaaatttttttgagaagtatgatctgtgagagtctaacttttctgtaagaagattctgttagaggcttttgtaaagaaaaagtaattacttgaaggacagtgtgtttttctttcgtaggaatctcatagctcttaccaaattgagtaggaaggaattaataaagcattcgagtatacttttttgggttgtttttttctcccatttctgttcgttttaatttttgaagtttcaccttgtcatttgtataaattatagtttgagacattagatgtaaaagatgtagagttgaaactgaaagtaaa

SEQ ID NO: 98741 - DNA, 1659 bp, Homo sapiens
  misc_feature (694)..(695): n is a, c, g, or t
  misc_feature (715)..(715): n is a, c, g, or t
  misc_feature (795)..(795): n is a, c, g, or t
  misc_feature (812)..(812): n is a, c, g, or t
  misc_feature (815)..(815): n is a, c, g, or t
  misc_feature (824)..(824): n is a, c, g, or t
  misc_feature (878)..(878): n is a, c, g, or t
  misc_feature (1325)..(1325): n is a, c, g, or t
  misc_feature (1398)..(1398): n is a, c, g, or t
  misc_feature (1400)..(1400): n is a, c, g, or t
  misc_feature (1492)..(1492): n is a, c, g, or t
  misc_feature (1495)..(1495): n is a, c, g, or t
  misc_feature (1549)..(1549): n is a, c, g, or t
ggccgagggaaacacaaccccaagcagcctggagtaagtggtcccgaggcagctcaagacagtttggttttattcatttcagagagacaggaattgcagggaaaatcatgaatcagtgcctggaaggtgtaagttccattggcagaaagggtgggacctgtggaaggggggttagaaggcacaggtagttgagggattctgtaggtggcagctggttgagagtgttgaatctttgtctaaagtttggaggaggtaggaaggaatgctgaaggaagggggtctgttatctgccacttcattccatcccagccaaaaaacagacctgtttctcgagattttatgaattctaaggcgtaactttacctttgccttgcgtggccttaggtcttgtttgtaatttggtatcttgttgccacaaggagtctgtttttccagtcagataatgtctgtttttacatgaatgtgcgtcagttgctgcatgtaaactcctaaagggagagggtataaggagacctgtctcacctcccatcctgtcatacagaggcactcaattttcagggttttttgggggttcccttggccaagagccagtcacttcacttagctgggaaggtactttgtttttgtttttgtttgagacagagtctcctgtagcccagggtggtgtgcagtggctctatcttggctcactgcnncctccaccttccgggttcangcgattctcctgcctcagcttcccgagtggctgggattacaggcatgtgccaccacacccggctaatttttgtatttttngtagagatggggtttcnccntgttggccnggctgttcctgaactcctgacctcaagtgatccactggcctcggcctcccaaantgctgggattacatgtgtgagccacctcaccaggccagaaggtatgtttttatttttagtttacaggttgaaggctggacttttataaggtacatgaggagacaaaccagataaatgcttgattggttgcagagatgcagtcaccttatttggacttgtcaacccgaaataatcgaaagtttcagatttcaactggaagagtttattcaagcaaaaagatagcaatggcccatttgggaaaaacacagactccagagaaatggactcagtactccaaaattggaagttaagttcttgcttatattactgggaaaagaggtcctgatcagatcccaagagagttcttggatctcatacaggaaggaattcaagacgagtcggaaagtacagtgcaaagagagtttattgaaagctactctgggccagcatgatggcttaggcctgtantctaagcactttgggaggccgaggtgggaggatcacttgaggtcaggagtttgagaccagcctgggcaatatngngaaaccccatctcttccaaaaataacaaaaattagccgggtgtggtggcctgcacctgtagtcccaggtactcgggaggctggatgggacantcncttgaacccgggaggcagaggttgcagcccagctgaggacacgccactgcactncagcttgggtaacagagtgagaccccatctcaaaaaacaaaaacaaaacaaacaaacaagacagagttcaagaccaacgtggccaacacagtgagaccctgtctctattt

SEQ ID NO: 98742 - DNA, 612 bp, Homo sapiens
tgatacttgactgcggttcctctttgcctgtgccgtcacctgggattggaattctgcatttcccacccccaattcccttctccagtcatctaactcctctgcttcctccaatactcagctaaggcattacctcctcctagaagccttccctgaaatcctcaagcagttctctttctttgacttccctctttggagcctcaactgtctctttgggtttgtctgtcctgctagactgaacgtaaataactaatgagggtatctgcatggaaagaaacagacccttctaagtgctgtgttaagtaacttcactgaaccagatgagagcattagagcagctgctttctagggttttgccagctcctgtatgcggacgtgaggctgctggggatgttgctattagtgataaagttaagggtccaagaggttctttgcttcacgactacgtcattggaggctgataagccatggccaagtgtgttcaaggtctccagctgtcataaaagtgtctgcttgtttattttaggtagataagtgttgctattattcctgggatggtaggaaaagccgggggcaagaaatcactctgtgaagatatattgagatccctggaac

SEQ ID NO: 98743 - DNA, 259 bp, Homo sapiens
gaaacatgcccacctcagggtggggccttctgctgccttcctactcagattttctaagcccattctgtaaaattaatagcaagctaaaggtaggtgagataggcctatggagacattttttctacaaagggacatgcagcatttatgaaaactgttggcccacatgtgacagtgtttaggtcctgagtacttgaaaagtatttggtggccactcaaaaagcataccttgccccttacctgcatgatttggatttgctgt

SEQ ID NO: 98744 - DNA, 485 bp, Homo sapiens
acatactgccatgggggagggtggggacactgaggaaagataaggcaagggctgtggaagctgccccaggctgccccatttcactactgtggttaactggcaaaggagtccatgcaaatgagtgcaggatgtccaaatcgcagcactgtttcacacatcatcatttcaagtcaccgactgacaggatttagcactctgtgtctggcagcaaccagcagtgaagcagagagaattccactggattatccaaagcatctgacccgcaaatgaggagtgagcagaacatttttaaaaaacaactcttgagtggttcagtgagccaatttgacatcgaagagagacacacaaacatccagccacctctgaggcaaaaggtcaatttcttctgcttgtcctcggtcctcagaatccaagttactgatgtgagctctgtccctcattttcctagccaaaggggtagatgtgaagcacagacaggccagata

SEQ ID NO: 98745 - DNA, 746 bp, Homo sapiens
tgcttgaactctggaggtggaggttgcagtgagctgagatcatgccactgcactccagcctgggtgacagagtgagactatgtctcaaaaaaagaaagaaagaaagaaagaaaaatttgaagtatagaggggaatcacaaaaattctaaatggtaactcatgtcaggaacctgaaagtcaagtcttcacttcagcattgggaagtatatgaaactgttttcggaccacacaactctgtgagctcatcgctaagaattggtatgcaaggtcttcagaagggtaggcaatttgtaaactccttttgacttagctggtaagacagaaagttcttttttcatggctaaatgatacttgagaaaagaaaaaatgtggtgaagctgaatgtatctagttgaaataaaaatgcctacctttctcctgcataggcaaaatatactacttacaagaaaaaaaggaatttatgaatagaaatagaatcaggtcacagtgcatttcctaattctccactggattttattactcaagcactgtatttttaccttttatcatagctgtcattcgtccttgtactttagatagcagcttatcaacccttgttatatccttaccttctttagggtgatgatcttatctttatttttgaccacacttcctgtgcctgccccttttcttacatcaatttctgttccacttgggattttgtactcacagatgtgacatgaatatttatgagattaaagtgaatg

SEQ ID NO: 98746 - DNA, 448 bp, Homo sapiens
atcatgctcccctttccccagtcttctttatcatctcccctcttcctgcatcccctgtctccccccacagctcggcagttggcagtagcgtaggagttggagtagatgcagggggaagggcatggacgtcatcacagggcagggtgagcagagcgtgggcagagatgtggatgcaggaatgcctggcacatgaggagggtccagcattgatgagctagatagagccaaaagcctgtttctgggctggtaggagctgaggtgggcagggtgagatgatggtgggccttcagagttcagcagtctgggttcgagggagtaggaactaggaagggcctgaggtttcttgtgcagatatcttgtgatgaaaactaccaaaccgtatccctttttgaagttaagatttttgtttaagttttttctttcatcttgtgatgaaaactgtgattca

SEQ ID NO: 98747 - DNA, 199 bp, Homo sapiens
caagttgacaaaagtaggcttcagaagatcagtaataacaaacttctccaatctaaagcaggatgttcgaacccatcgcaaagaagctaaaaaccttgaaaaaagattagacgaatggctaactagaataaacagcatagagaagaccttaaatgacctgacagagttgaaaaccatggcacaagaactacgtgacaca

SEQ ID NO: 98748 - DNA, 663 bp, Homo sapiens
ttttttttttcaaaacagttttgcttttggttgatttgccttggggaatattgctcactggggtcctcatgcatcagtttagaaataaagacttaaattcttttactttaattaatcaactctaattttcacatttgattatggtgttccacgaggctcacacgggtatccaatgtccagctccccaggctggcatgtcaaacgtgacttttttaaccctttgctttcctatggcctcaggtcaaataattccaagagaatcaacctctgaaaattggaatggctgttcccttgaaatgctggtggccctgttcttttcaggtcccctcacctaccagaaagctaacagcaatctaatccattctgctaccgcatatcatgttttcagggttcttggggtcaatggtctcccaggaaaaatccagtcccaagggaccatctgtaagtgacaggagggtgatgctctcatcactgtcccccgtttccaattctgtcaccatcaaaatgggggtcgtagtgttaagttggaaagtactgttgatgtacatgtggcctctcacttgggaagccaaacatttgtacccaatctagttttctttaatctgtgtttaaaactatctgctagataagctttaaatcagtcttattttaagaaaacactac

SEQ ID NO: 98749 - DNA, 1610 bp, Homo sapiens
  misc_feature (1251)..(1251): n is a, c, g, or t
ggtctttcaggcagtgcaggtcagcctggagcctggagatccctgtgtagaacagagactccctctcagaagccacagagacatttgtgaagcagctcagtagctttcttacagcgtctttgaaagtgactggggccttctgatccacatgaacacagtagatgttttggggagtgtagatggccctcaagagtctttcaaatgtatcagtctttgcggatgaccatgacataggccaaagggaactcggcttcgtctttggacacaggttccattatgcagtgattttggatcaagtatcgctggcaggttattatttctcaatggcgtcactgttatattttcatccaagaacattttcttgcctgtcacaatcatgccacacacttctgcaaggactgaagagtttgagatcttcccccatggaagatatttttgcgggacctaatagttactatacaggaataaaagagttatggacgtggccataagccctaggaccaacccaaatgcctctacctttatttttcctatggtcttttctggattcatcactcacctgattttatgccattgctgaagtcagtctgcaggtccctgcccagacttgagaaatgtgctctagcaacttatttgcagcaagaagtgcaatatgaccatttacttaaaagaaggaggatcaaccacaagtcggtagctcttctatttaaaaaatcaggtgactctttgaacatgagccagtggggccagctgaccacttcacaaaagccaggcacagttgggcacctctgtctaggtcaaccacaaattaagaccctagcaaattggccacagctgccagctcagggtgtttttcccatgtggagtacaggtggaatgtgtgttcatttggcacctctttttcccatgcagagccaccatcaccatcactgatgtcacctttgaatgcaagggacactatatttcttcaacttcaggcaatcacagttgtcctgaagtaggtcaccatttacgtggacagcacccagaactcctcgatagtggggtctctttacttaaaaataaagatcaagaatttatagtatttcaggattgaaaggaatcttgcagattattctcaccaattgattcagttacaaataaagaacactgacaatgacccataacgactattctatcacattttgtctccattttctcactgatggcctgagagggcctatggctgctttcacgttacaatggcagggntaagttgttgccacatctgaccaccgaagcttaaaatgttttccatctggcctttaccagagaaggtttgctgaccctctcctctgtatctacggatgtcccttgtataccactgtgcttgcactacatcaagacagcgattgtggacttgataccattttacaactttttgctttattttcaagatttcctcgtgaatgccagaatgacacgatatttggtagcaaagcatgagcttcaaagagaggtttgcgtgggtctagatcctggctttgctagtcctagttgtgtgacgttgggcaaatcacttttcctatctgtcttaatttctttgtcagtaaaataaagataataccagt

SEQ ID NO: 98750 - DNA, 383 bp, Homo sapiens
tcacagaacatgacataggtttcaaatggaagaactcttctaatgaagatggagaataacacattgtaaactagtatctttcacaacctaattgacactttcggtgactttttttggtgaataaacatcttaacatattcattttcccctatacacattttgattacacctcataatgcaacacggtaaaaaggacgtgattgacttttctgtgcaacctactaaaatatgtcctttcttataaggaaattaattttggttgcaacttttacctgtcacttttcatgaacctcaccaccacataattcaagacagagatatattaactatatactgaagtcttaagtatttgggggtagaagacacctttgaaaacctgaata

SEQ ID NO: 98751 - DNA, 731 bp, Homo sapiens
tgttcgttggtacccctacgtgctgaaatgaagagttctggagagaatctgagggatttgaggaatttcagatgttggggattttttcccccgcacagggagcggtattctgccctgtctacacattagaatcacttggcctggacaaaagcttttttaaaaaagcgttcccctcatctcctccccccaaaccccgcatttccatccactagattctaatgcgtaagcaggagtgacaactactgcccttgtgcttttttgggaacaagaaattgtccagggaaaagataaacgccaatcagtctctgatctcagtactagtctattttaagctaattaagcattgatttttttttttaagtttatgacaaactgctattttccattcagttaaactaaatgcgttttaatgataggacggtaattaatctaacctattaatgaaaagctgtatgtctcgcagaactatgataaactacctaatgacgtcagctaagggtctagaaatggaagaatgatcgctatatcttttttaaaaaatagaatttaggcatcttgggaaaaaaagaagctaatctacactggatttctgttagtgtgaagacttttgtccctgtacctgctagggcttacctgtaaatgaagtaagatggtcaacaccagggaaacaagtgttcctggtgcctggcagtggaacaccttgactatcttggaaagaattaactggcccc

SEQ ID NO: 98752 - DNA, 688 bp, Homo sapiens
ttttcataccaagaaaaaaaccagatgtcttaagatttgcaggcttttttttctttcattacatggattagacatcatttataacagagagaaggctaaagcaaagaactagactatgaagcagtagatgtgcagtggtatccctgccaatctgtgtcatgggcttcccattctttccatggtgctgcatgttgcagaagtgagcatggtcctttctttcagatctctgggtcagagctgggaatctgcagtaggcagtgggatcttgaaaatacaatgccaacactagaaaagagtttggaaagctttccagaggtactaaatttgagctcagcgtaaagaatcttcaaccctctgattttcatgcattcttttggagaccaaatctgaaagcacctcttgggagagcccattagcaggtcgtactacttttaccttaattctcacatggaggaatctacaaagcacttttattacctcatagaatcttctccaaagcttatgtcgagatcatttttcccacttgacagataaggaatctctggcttcgagttgttttcccaaagtccaagacctcattcattggtattaagttgatccagaatttgatagcaatttcacgcaatgatgaaaaccagggtgaactagaagaaggtctacaagaacaaagcgggaatgagcttttata

SEQ ID NO: 98753 - DNA, 348 bp, Homo sapiens
ttgcacaatatttccctaataatttgcagtgagctgagagtcaaacttaaaactgtaaactccggggtctgccatccttccctggtactgtcagagaacactcctccgccttgtcattttaaaacttcttttcggccgggcgcggtggctcacgcctgtaatcccagcactttgggaggccgaggagggcggatcacgaggtcaggagatcgagaccatcctggctaacacggtgaaaccccgtctctactaaaaatacaaaaaattagccaggcgtggtggcggcgcctgtagtcccagctactcgggaggttgaggcaggacaatggtgtgaacctggagggcagc

SEQ ID NO: 98754 - DNA, 305 bp, Homo sapiens
cactttcaacatccatatttctaccagtagccttcaagataattgtcttagtcatttggactgctctgacaaaatactataaactgggtagcttataggcaactgaaatttatttctcacagttctggggtctgggaagtccaaaatcaaggtgttggcaaattcagtgtctagtgagggcctgcttcctcacagatggctccttccctctgtacccttatatggtgggagggtagaactccggtcccttcatcccttataagggaatgacctaatcacctcccaaaggccccacctcctaatat

SEQ ID NO: 98755 - DNA, 337 bp, Homo sapiens
ctattgtgaatagtgttgctatgagcattcatttgcaagcttttgtttgaacctcagttttcaattctttggggtgcatacttaggaggggcattgctgggacatacggaaacgctatgtttaacttactgaggagccaccaaattgttttcccagcagttgcaccattttacatatccaccaaaagcaatgcgtgagtgttccaatttcctaacatcctcaccaatacttattttcaagtttttttttttttgacactcgctctgttgcccaggctggagtgcagttgtgcaatcttggctcctgcaacctccacctcctgggttcaagcgattct

SEQ ID NO: 98756 - DNA, 796 bp, Homo sapiens
aaaaaaccatacatacagtgagatatcacttcatatccactagtctgggccatcatttttaaaatggaaaatcacaagggctggtgaggatgtggagaaattgtaacactcatgcaatgttggtgggaatgtaagatggtactgccactttggaaaagagtgtggaggttcctcagtaaggttaaacacagaattaccatatgatctagtaattctactcctaggtacatacctcagagaattgaaaacaggtgttcaaacagaaatttggacttaatgttcatagcagctccatccacaatagccaaaaggtggaaacaacccaagtttccatgaacagataaacagatcaacaaaacgtgctatgttcatacaatggaagagtattagctccaaaaggaagcactgatgcattctacaacatggttgagcctagaaaacatgctaagtgaaagaagccagacacaaaagaccaatgtatgactccactgatgtgaaatctccagaatggaccaatccctacagaggggagcagatcagtggctgcccagagcttggaggaggggaatagggagtcactccttcctgggcaccaggtttcggtttggggtgatgaaatgttctataaccagacagtggtgatggttgcataacattgtaaatatgcttaatgccactggattgcacaatttaaaatggttatgatggtaaattttatgttatgtgtgttttaccacgtacacacataaaacttattttgtgccattaaaaagaaaaagctctatgaagcaaaaaa

SEQ ID NO: 98757 - DNA, 337 bp, Homo sapiens
gcatcttccaagcacagctccctgccccacagttcctccctcgcacctactgaggttctgagctgtcagccccccagtattgaaactcaaaaaattagggaacatgataacgcattctgccctaatattgtccttttaatgtctaattatcattgtagacaaagtggcttgaacttaggctttcatcctagaagctttaccacttttactgtttctatacttttgtagctaataagtcaaatgtagaacaaagagaaggctgcatttgttcaggaaactgtaaatctgtcccatttgatcacaatcctgttgaaaggaagaagccttacgaggacag

SEQ ID NO: 98758 - DNA, 136 bp, Homo sapiens
cgtccgcgctgactctatgagtatcccttcgactgtggactcagaggggcccggatggaggccctgggacacggggctgggactgatgcacgccaggcagccctgggcaacgtcaggatcttggtcaagttctttc

SEQ ID NO: 98759 - DNA, 418 bp, Homo sapiens
ccatatctaactcaagctctaacaacttctttaaaaagaagcttttgctgctacagaaagaatttctgcaaagcaggaagcctgaagtcagcaatgattaaactgccccttgaaacccttagctacttgcacgtctctttgtctttggggtctcatctcagcaattcgtttcagcttcagtctgcaccaggatctcaaatctgtcatggcgagggcaagaagaaatgccctcctaacaagactctgggcatcgctggagctgcctgcaatccagacttccaaagactcatattcttcatgagcaggtaacgaagctcataggaacaggagaaactgcacaaaagcagaaaatgacaattcagaacacacacccatccagtgatggcattaaggaaatcctcaaagcccttagcaatgt

SEQ ID NO: 98760 - DNA, 622 bp, Homo sapiens
aagtgctgggactacaggcgctcatcaccacgcccggctaacttttttgtatttttagtagagacggagtttcctcgtgttagccgggatggatgtcctgtctttctattgtatcctctccctcacttggggaggaggcagtgatgttcctgttttgcagaagagccggatcgggcagccagagagttgaagtgacctgcccaaaaagggttcaacctaaatccttgggcttcctgtccagggctctgtaggatgtcagccatccccagaatcaggcattctcaggatgtcctgtgaagaaacacacttctccatcccctgctggaaaaaccatgacaatctctccgcagggaagaacgcggctttgaggtggggagtggctgaccgaggccctttgtggtttctaaatggcagaatgagagaggtgggggcgttgagggtgtcacgcccaggaagcagttggggagggcagggctggacactgaccaagcctagcctgggtgcaggaactgagcttgggatttttgcttggggccctctagggattaggatgaattgtcagatgagttctcagcagacagggctttagggaactggtccagggaaataagacgtagagcca

SEQ ID NO: 98761 - DNA, 406 bp, Homo sapiens
acaaggggaagaatttgtctattgaagaaaaacattatgtgcagttgcttaaagttctgtagagacagtctggagcttaggttaattcgcagacactaacctcctgcagaagccacaaaaggttattacgcataacccatggttcccacaggcaggcatccttgatatggaaaattgagacaaagcaggagaaggattaaaacaggctcatcaaaaaggtcttagctgattcttagttgattcttctgttttctccacttggagtttagtttgtactgtacttctaccattatctccttattattctgtgggacaacagcctgaatctaaaaatctgaaagaatatgttgtcccacccacagctccaattgaaaataaaaaacagagaggataaaaattggcctat

SEQ ID NO: 98762 - DNA, 384 bp, Homo sapiens
actgagaggtggcttctgggctaaaggaaaggttcaaagtggggtagggctgtttaccataaacataggtgggttagtggggactgccttttgcagggggctgtccactccacactgcaatgagccagtcaaatgggagttccaagaccagaggaaacctagcccagagcttgagtcttccaggctaaccctgggtcctggggggaccaggagatgagacccagggaatagtagtgtccatgtcggtcatctcaaaggttcaaagcaggctgggaggtcaagtctgcagatgggctgactgggcagtggaagtgataaggttggccagttaatgatgggttgatatattcatctgttttcacactgctatgaagaactatgtgg

SEQ ID NO: 98763 - DNA, 350 bp, Homo sapiens
cagcctgggcaacagagctagactctgtctcaaaaaaataaataaataaaaagaatggttacccaggtgcggtgctgtgcacctgtggtcccagctacttgggaggctaaggtaggagcatcttttgggtctgggaggtcgaggctgcagtgagccatgattgcaccgtagtgctacagcctgggtggtggcgtgagaccctgtcttcaaaataaaaataaaaataatgtttgggggctgggcaaaatgattctcacttgtaatcttagcactatgggaaattggggaaggcagatcacttgagcccagaggttcaagaccaccctgcacaacatggcaaaaccctctct

SEQ ID NO: 98764 - DNA, 701 bp, Homo sapiens
aatatgaggaggcctcccggccccagcctcctgcctgcctctccaaggactccacgcctgacgaacccgacgtccatttctccaagaagttcctgaacatcttcatgagtggccgctcccgctcctccagtgccgagtccttcgggctgttctcctgcatcatcaaccgggaggagcaggagcagacccaccggaccatattcaggtttgtgcctcgacacgaagacgaacctgagctggaagtggatgaccctctgctagtggagctccaggctgaagactactggtacgaggcctacaacatgcgcactggtgcccggggcttctttactgcctattacgccatcgaagtcaccaaggagcccgagcacatggcagccctggctaaaaacagtgactgggtggaccagttccgggtgaagttcctgggctcagtccaggttccctatcacaagggcgatgtcgtcctctctgccgctatgcaaaagattgccaccacccgccggctaaccgtgcactttaacccgccctccagctgtgtcctggagatcagcgtgcggggtgtgaagataggtgtcaaggccgatgactcccaggaggccaaggggaataaatgtagccactttttccagttaaaaaacatctctttccgcggatatcatccaaagaacaacaagtactttgggttcatcaccaagcac

SEQ ID NO: 98765 - DNA, 228 bp, Homo sapiens
ctaagaaaggcctggacaaaatattgcttaaaggtgttctagaagagaaaaatgagagaggtaaacaaatcggggggtgagtggaaaagagataatatcgttatgttgctagttaactgtttcccaaacatgtggttaactttcatacctacttgcctttcctcctgcttttctcttggtcctctctctggctggctgagccccattcagcaactgtgggtgcgagtc

SEQ ID NO: 98766 - DNA, 1033 bp, Homo sapiens
ctaagaaaggcctggacaaaatattgcttaaaggtgttctagaagagaaaaatgagagaggtaaacaaatcggggggtgagtggaaaagagataatatcgttatgttgctagttaactgtttcccaaacatgtggttaactttcatacctacttgcctttcctcctgcttttctcttggtcctctctctggctggctgagccccattctttgacaattcagcttttatatgttgttatagcttttcctcattcctttatgcagaatttcttatttatccatgtcctcatagcacctaatgtacctgtagacagtgtttctaaatggagttgcagacctctttgagaataaatatgaaatgtgtgaatcctcttcctagaaaaatctacattttactcttttgcaaataatttcagagaaagcctggattcctagaggcctgttccatagaccccagattaagaacccctggcttttgtttgtttgttttactttaaaaaattacttggctaggcacagtggctcatacctgtaattctggtactttgggaggctgagatgggaggattgcttgagcttgggaggtcagggttgcagtgagccatgattgagccactgcgctctagcgtgcgagacagaacgagactctgtctcaaaacaaaaatccagggttctaggtagttaaaaaaagaaaaaagaattatttcaactttattcatatttctttggctggggtgtagggggctgggggcgcatatttgcaaaaacttgaaactaattccattaaagtgacaaaaatgtaaataatctctctctttttgccatactgtataattaaaaatatgtagcagttaaaagtcttaccaaaattggccggtgcactggctcacacctgtaattctagcactttgggagactgaagtggattgacaaaaggattgcttgaggccaggagtttccgaccagcctgggcaacatggcgagaccctgtccctacaaaaaaaaattttttttaattacttgggcatggtggt

SEQ ID NO: 98767 - DNA, 1522 bp, Homo sapiens
aaccccctttccccggctcccccgcagtttcccgggccggcagaggcgccgcagcgtcggagcaatgcaaggctaagccgggaagatctgcctgcactgcaagtgtccccaggaggagcacatggtgacagtgatgccgctggagatggagaagaccatcagcaaactcatgtttgactttcagaggaactcgacctcagatgatgactcaggctgtgctttggaagagtatgcctgggtcccgccgggtctgaagcctgaacaggtaccattctggatgggagcatgctggtggtttgggtgtttcactttgccttactggtccttcctcattccagttctgtaggaagagtagactttgctgattcagagaagtggtagggctaaatatgttgaagatgccaggggccccagtggaaaatgaggaagggaaatgaaattgagccaggagtgatccattgctaattcattctgtattgtcattattaactgttaccaggagaatcacttgaacccaggaggtggaggttgtggtgagccgagatcgtgccattgcattccagcctggatgacaagagcgaaactcagtctgaaagaaagagacagagagagagagaaaagaaaaagaagaaagaaagaaggaaagaaaagaaagaaagaaagaaagaaagaaagaaagaaagaaagaaagaaagaaagaaagaaagaaagaaagaaagaaaatatgtatgttagataatcttcagtcaggcatgagttatagtgctgttgggcatgagttatagtgcttgttggccataagttaaatgttaatgaatcaacaatacatattaagtaagttgcccttaaaaagaaacacacatgaaacaaggttatggattaatgggttaacgaaaatgttgggaccagaggctcacaggaacctaaccccatatttctcctaggaggaatgtttagtattcagaaattcagtgtttgctgtgattttatagcacataactgccatgaataaagagaatcacttgtgtttacctttgcaaaatgtaatatcctgtttacatagtactctcttctttccctgctgtggcagggattatggctatttacaaatggttggttccttcttcttccaggcacaaagggggaatgtactttctcagtccgtttaaagttaggcatgtccatgagacttgctttcaccaatgaaacctgaacagaagtcacatgtatcatatccaggaaaaaagcttttcactgccagtgttcagctccaaccatccttttctctgctgccatcctcatggaggcatatctccatatggagcccccatcacctgggtctctgcctacctataggaggatacagtgtgagacagaaataaaatcatggtatagataagggtttaagatacagaatatatacggttcaacaagaagacaactcagttaaaagatgactgaaggacttcaatcaacatctctccaaagacaatatacggtcggctgataagcacatgaaaag

SEQ ID NO: 98768 - DNA, 1081 bp, Homo sapiens
ggcacgtcatatgctggagactaacagagaaaatggtaaagccagctctcaggggagtctgccgagaaagccctaccctctggttcaccagcatgtctgctgaattctctgtttctaggaaaatttactagctttatttttccctcacagagagagggaaaaatcccagatatggatgatttgcctgactcttgctttaaggatgaatttctctgcttaccataggaaactcatctgctgttgactttcataaagagtcaggactgcagaagtcagttacatcctgctgggggaatcatcttcccagtaagtgggaataggcacatggtttgagtaatgggcaagtcatctatatgctttctgtccttcaggtacaccagtactatagctgtctcccagaagagaaagtcccttatgtcaacagtcctggagagaaactgcgaatcaagcagctactacaccagctgccgccacatgacaatgaggttcgatattgcaactccctggatgaggaagagaagagggagctgaagcttttcagcagccagaggaaacgcgaaaacttgggccgcgggaatgtcaggcctttcccagtcaccatgacaggagctatttgtgaacagtgcggaggccagatcaatggtggagacatcgctgtgtttgcgtcacgcgctggccacggcgtttgctggcacccgccgtgcttcgtatgcactgtctgcaatgagctcctggtggatctgatctacttttaccaagatgggaagatatactgtggcaggcaccatgctgagtgcctgaagccgcgctgtgctgcctgcgatgagatcatctttgcagatgaatgcacagaagctgaggggcgacactggcacatgaaacacttttgctgcttcgagtgtgagacagtgctgggcggccagcgctacatcatgaaggagggaagaccctactgttgccactgcttcgagtccttgtatgcagaatattgtgacacctgtgcccaacatataggtatcgaccaaggtcaaatgacctatgatggccaacactggcatgccactgagacctgtttctgctg

SEQ ID NO: 98769 - DNA, 660 bp, Homo sapiens
ggcacgtcatatgctggagactaacagagaaaatggtaaagccagctctcaggggagtctgccgagaaagccctaccctctggttcaccagcatgtctgctgaattctctgtttctaggaaaatttactagctttatttttccctcacagagagagggaaaaatcccagatatggatgatttgcctgactcttgctttaaggatgaatttctctgcttaccataggaaactcatctgctgttgactttcataaagagtcaggactgcagaagtcagttacatcctgctgggggaatcatcttcccagtaagtgggaataggcacatggtttgagtaatgggcaagtcatctatatgctttctgtccttcaggtacaccagtactatagctgtctcccagaagagaaagtcccttatgtcaacagtcctggagagaaactgcgaatcaagcagctactacaccagctgccgccacatgacaatgaggttcgatattgcaactccctggatgaggaagagaagagggagctgaagcttttcagcagccagaggaaacgcgaaaacttgggccgcgggaatgtcaggcctttcccagtcaccatgacaggagctatttgtgaacaggtaagcatggattcaggggagtgaagaggcattgttc

SEQ ID NO: 98770 - DNA, 975 bp, Homo sapiens
aaccccctttccccggctcccccgcagtttcccgggccggcagaggcgccgcagcgtcggagcaatgcaaggctaagccgggaagatctgcctgcactgcaagtgtccccaggaggagcacatggtgacagtgatgccgctggagatggagaagaccatcagcaaactcatgtttgactttcagaggaactcgacctcagatgatgactcaggctgtgctttggaagagtatgcctgggtcccgccgggtctgaagcctgaacaggtacaccagtactatagctgtctcccagaagagaaagtcccttatgtcaacagtcctggagagaaactgcgaatcaagcagctactacaccagctgccgccacatgacaatgaggttcgatattgcaactccctggatgaggaagagaagagggagctgaagcttttcagcagccagaggaaacgcgaaaacttgggccgcgggaatgtcaggcctttcccagtcaccatgacaggagctatttgtgaacagtgcggaggccagatcaatggtggagacatcgctgtgtttgcgtcacgcgctggccacggcgtttgctggcacccgccgtgcttcgtatgcactgtctgcaatgagctcctggtggatctgatctacttttaccaagatgggaagatatactgtggcaggcaccatgctgagtgcctgaagccgcgctgtgctgcctgcgatgagatcatctttgcagatgaatgcacagaagctgaggggcgacactggcacatgaaacacttttgctgcttcgagtgtgagacagtgctgggcggccagcgctacatcatgaaggagggaagaccctactgttgccactgcttcgagtccttgtatgcagaatattgtgacacctgtgcccaacatataggtatcgaccaaggtcaaatgacctatgatggccaacactggcatgccactgagacctgtttctgctg

SEQ ID NO: 98771 - DNA, 103 bp, Homo sapiens
cctgctccatgacctcagtgcattcttagaaagtctgcgagcctcagtttcctcacctggaaaatgggtacaatactaccgaaaagagaaaaatagctcagag

SEQ ID NO: 98772 - DNA, 273 bp, Homo sapiens
gtatcattggcaaacttccctctacacagctgaggcttaacaacaatttttgttattttcacgtttccaagttccaaatgttagcaccccctttttctttacttttgttagtgtgacagtggatataagggaagtgctcaatttaagaaggattcaaagaaaaaaaaaaaaaagaatgatccaatcagggctccagcttcttcaaatgttcccaagcccagagttttctacatggttcaaacacacacacacacacacacacacacacacaca

SEQ ID NO: 98773 - DNA, 552 bp, Homo sapiens
atcagcgagtgatcagatgtccaagtttgaagcgtgagggagtctggctggagtgggtgtttgggaggcaacggcttgggggtgatgttgagtttctggcctgtgttgtctcacctggaaaaagagggtgcaaggaggagaggttgtgccctgtgcagtcaggtgcatgaggaggctatggccaaggagagtggacgcaggcactcatggaagtggggctggagacctggagagggtagtggccagggagccagggtgcagtgactctcagcaaggccccttggctcatgggccaggtccagctaccacatttttgtaagtgaggtcctgtggggtggcacaccccatgttgatgtcttgtgtgtggccactttcattccaccccagcagagctgtgtagtggtgacggagaccatgcgtggtccttcacggagagtgcagtgcctggcatgggagggccggagaggtctgggggctgagagagagagggtgggatcagggccccgggaggagggtctggccttggaggtgaaaagggaccacgttctcctg

SEQ ID NO: 98774 - DNA, 342 bp, Homo sapiens
gcattttacacacattggaggagtcgtatgcactgtttttctctgttgccgacggaggcaagaaggccttctaattagtctaacttaaacggatgggattcacttaacaaaagcaagaagaaaagcacacgaacaggtgtcttaatgcatttggatagtttctttgcggtgtgtgtgtgtgtgtgtgtgtgtgtgtgtgtgtcttggtgaaggtgaggggctgtattttcaccaagccttttcataatcaagtttgctttgcaaaccttatggccttgcaccccgcagaacagtccttcctaatagcagggatgctctgtcatggttttctgtaaattatca

SEQ ID NO: 98775 - DNA, 866 bp, Homo sapiens
ccccagaatttcctgtgcaatcgcaggtccttctcattccctcttgggccaacccatgtcccaggaaatggatatagctatggaggattaaaaaaatttcttttcacatctcttcatctggattggcatctgacagaaacctgctcgcccattcccttcatttcctccctcaaggagatgattaatacgcctgggcaatgctcatcaatatctttggacagatcaactggagttttcattaaacccatattaatgtcctagatacacagctgtggacaggttattctggaggaaaaaaaaaagaaaagaaaaaagaagaatgaaaaagaaaaagaaaaaaaaaccttccacttcagttaactatttgccaagaattaacagaaacctggccccttccctcattagggcttcttccaccaacatgttttgatgtatatttcatgaggataaacaaacattcatttcactttgggaaggtgtttgccgtaatgtattgtcagcgtacccagcaatgaggggacattaatttcaattctggtgtttaaacactttggcgagtcccaattactcattccccagctcgataggagccctggaggaaggtcgttgcctctctgcgtggcctgcggcaccaaggggaggcgcgacgccaccctccagccagacacaggtcttctttggctgagagagcagggatgaggcaagacggggttgttccctcctattccttagtcaaatagtgacatgaagggccacttcagggaatacccagacttgcattacagcagtttccatgaaaggctgtgtgcaaagaagagttcaggaaatcagatcctatttttttcttagcccacatctgaggatga

SEQ ID NO: 98776 - DNA, 760 bp, Homo sapiens
gtttccccaaacgtcctcatacgttttcagcccccacacccccctctcactcctgcccctgatccatacctatcccagaccagaggcctctccccatttccactcaatgcagtccctcctcagtgggctatctgatacatcctgatatcttaaggagaagagatggtgatagggaaattcagcccctcccccatcttgcaccctagagttcttcgtttcagtgcccgcgccgtgcccccgtcggtggctcaagccccagtattttcccagcaacctatctttagtctgtgcacacctccctgagcctgcttcttccttccagaaaataagccagaccaaggggatggggtccttttacctggaagttgtccaaggatgcagggtgcaaggggccctgggaagtgtttctccagagcaggaatgtgggatgtccagggtctgcagagtcctggcttgttgacttgtctaccttgggctcagatatcctgaaattttggcttactgttaacatttatgttaaaattaggcctttcagagcttggggagcagaaaatctatcaagcttccaaatgcgaaattgaagcagcctgtcttggaagatgaacatgtcaattttagtgaagtttgtcttacgtttttacctctgcaagttatttaagctagaagctccccagtttatagatggttcccccaaaaactaaggccttaggtgggagttggggggggcgttgacttaagtctcccagatacttagtagcaa

SEQ ID NO: 98777 - DNA, 645 bp, Homo sapiens
acatcaccaccttctgctagctatgcaatgctctccatcctacaggactcacatccagggtgacgagctgcagatcaaggtggattaaacagagctggaggcaggggttccattgaatagaaacacagaagcagagctgcctgggagactgcatgcagggaaatgatggcaggagctctctccatgggaggttatagcagctcttgatggaggaaaatgggaatctgtgagttcttagaagctgaagaaaaaagatcctggaactttaccatagggcagaggatgatggaagacgtaggatctgacgttggttctgccctttggaatttgtacgtaggctttagcttttcccaacaataagcacggcaatctgcaatttcttcacatctgagtggcagtgacttcactcataggtagtatcaaatggcctgcaaccagtggcatttgcttattctgccaaggtattatgccaacactgcctggaatctatgctcattatggaggaggcagagcaagatagccagatagaaccctccagcgatcatccccctggaggacatcaaattgaactattcacctaagaaagcaccttcataagaatctacatcatggccattaaaaaagcattggttaaataaatatcga

SEQ ID NO: 98778 - DNA, 461 bp, Homo sapiens
  misc_feature (5)..(5): n is a, c, g, or t
  misc_feature (21)..(21): n is a, c, g, or t
  misc_feature (31)..(31): n is a, c, g, or t
  misc_feature (59)..(59): n is a, c, g, or t
ttganttacgaatttaaatangactcactanggggaaatttggcccctcgaggcccaanaaattcgggcacgaagaactgcctgactgcttgttcgtctcactggtgtgagctccagcatcccctttgctcgaaatggaccccaactgctcttgcgccactggtggctcctgcacgtgcgccggctcctgcaagtgcaaagagtgcaaatgcacctcctgcaagaagagctgctgttcctgctgccccgtgggctgtgccaagtgtgcccagggctgcgtctgcaaaggggcatcggagaagtgcagctgctgtgcctgatgtgggaacagctcttctcccagatgtaaatagaacaacctgcacaacctggatttttttaaaaatacaacactgagccatttgctgcatttctttttatactaaatatgtgactgacaataaaaacaattttgactttaa

SEQ ID NO: 98779 - DNA, 412 bp, Homo sapiens
cggacgcgtgggtcgacccacgcgtccgctgcctgactgcttgttcgtctcactggtgtgagctccagcatcccctttgctcgaaatggaccccaactgctcttgcgccactggtggctcctgcacgtgcgccggctcctgcaagtgcaaagagtgcaaatgcacctcctgcaagaagagctgctgttcctgctgccccgtgggctgtgccaagtgtgcccagggctgcgtctgcaaaggggcatcggagaagtgcagctgctgtgcctgatgtgggaacagctcttctcccagatgtaaatagaacaacctgcacaacctggatttttttaaaaatacaacactgagccatttgctgcatttctttttatactaaatatgtgactgacaataaaaacaattttgactttaa

SEQ ID NO: 98780 - DNA, 629 bp, Homo sapiens
ctgggaggagggtggaaggcaacctcggggaaactgggaaaggcggcctggacttcgggaacaccgcgtacctgcgggggcacagccccacccgagcgaacgggctccaaaggggaggtcccgcggtgcccaccgcgcagagctcagggggtggtgcgcccggcccttctgcggcgcacagcccagcccaggaacgcgggcggtgcggactcagcgggccgggtgcaggcgcggagctgggcctctgcgcccggcccgacctccgtctataaatagagcagccagttgcagggctccattctgctttccaactgcctgactgcttgttcgtctcactggtgtgagctccagcatcccctttgctcgaaatggaccccaactgctcttgcgccactggctgctgttcctgctgccccgtgggctgtgccaagtgtgcccagggctgcgtctgcaaaggggcatcggagaagtgcagctgctgtgcctgatgtgggaacagctcttctcccagatgtaaatagaacaacctgcacaacctggatttttttaaaaatacaacactgagccatttgctgcatttctttttatactaaatatgtgactgacaataaaaacaattttgactttaa

SEQ ID NO: 98781 - DNA, 695 bp, Homo sapiens
ctgggaggagggtggaaggcaacctcggggaaactgggaaaggcggcctggacttcgggaacaccgcgtacctgcgggggcacagccccacccgagcgaacgggctccaaaggggaggtcccgcggtgcccaccgcgcagagctcagggggtggtgcgcccggcccttctgcggcgcacagcccagcccaggaacgcgggcggtgcggactcagcgggccgggtgcaggcgcggagctgggcctctgcgcccggcccgacctccgtctataaatagagcagccagttgcagggctccattctgctttccaactgcctgactgcttgttcgtctcactggtgtgagctccagcatcccctttgctcgaaatggaccccaactgctcttgcgccactggtggctcctgcacgtgcgccggctcctgcaagtgcaaagagtgcaaatgcacctcctgcaagaagagctgctgttcctgctgccccgtgggctgtgccaagtgtgcccagggctgcgtctgcaaaggggcatcggagaagtgcagctgctgtgcctgatgtgggaacagctcttctcccagatgtaaatagaacaacctgcacaacctggatttttttaaaaatacaacactgagccatttgctgcatttctttttatactaaatatgtgactgacaataaaaacaattttgactttaa

SEQ ID NO: 98782 - DNA, 506 bp, Homo sapiens
  misc_feature (5)..(5): n is a, c, g, or t
  misc_feature (21)..(21): n is a, c, g, or t
  misc_feature (31)..(31): n is a, c, g, or t
  misc_feature (59)..(59): n is a, c, g, or t
ttganttacgaatttaaatangactcactanggggaaatttggcccctcgaggcccaanaaattcgggcacgaagaactgcctgactgcttgttcgtctcactggtgtgagctccagcatcccctttgctcgaaatggaccccaactgctcttgcgccactggtggctcctgcacgtgcgccggctcctgcaagtgcaaagagtgcaaatgcacctcctgcaagaagagctgctgttcctgctgccccgtgggctgtgccaagtgtgcccagggctgcgtctgcaaaggggcatcggagaagtgcagctgctgtgcctgatgtgggaacagctcttctcccagatgtaaatagaacaacctgcacaacctggatttttttaaaaatacaacactgagccatttgctgcatttctttttatactaaatatgtgactgacaataaaaacaattttgactttaaaaaaaaaaaaaaaaaaaaagttttgcgtcgacgcggccggcaatt

SEQ ID NO: 98783 - DNA, 1209 bp, Homo sapiens
  misc_feature (847)..(847): n is a, c, g, or t
ccggggactggagcaggagggctgcaccgggactccgggacaggcccagttgaaaacggcggggcgagggggtggggtggagacgcccgcgacgccaaggctggggtcccggaaagcgcggggaggagggtggaaggcaaaggcaacttcggggaaactgggaaaggcggcgggacctcggggacactgcgtaccacccggcgcacagcccctcccgcgcaaacccgagccaaaggggcggtcgagcggcgcactcggagcggagctcaggggatggtgcgcccggcacttatgctgggctcagcccagcccagcccaggaccgctggcggtgcgaacccagccgggcgggtgcaagcgcggggcagggcctctgcgcccggccccctcccctgagtagaaaagcagccgcaggctgtggcgctccaccacgccgtccgggtgggcctagcagtcgctccatttatcgcttgagatctccagccttaccgcggctcgaaatggaccccaactgctcttgcgccactggtggctcctgcacgtgcgccggctcctgcaagtgcaaagagtgcaaatgcacctcctgcaagaagagctgctgttcctgctgccccgtgggctgtgccaagtgtgcccagggctgcgtctgcaaaggggcatcggagaagtgcagctgctgtgcctgatgtgggaacagctcttctcccagatgtaaatagaacaacctgcacaacctggatttttttaaaaatacaacactgagccatttgctgcatttctttttatactaaatatgtgactgacaataaaaacaattttgacttgaaaaaaaaaaaaaaaaaaacaanacaagacacacaacgcagcacaagagcacgccgcttgtgttggggcgcggcccgcggcgccccccagagaagaaggcttgttctcgagaacaccatctcccttatgggggccgacgagggcccccacgacaaggggctcgagcagagaaccgggggggcaccaagtgggggtgcccccacgaggaggaaaaccccgggggaccggcagaacaacgagagcggtgcgggatggaccatctcttcccgccgcgaaaaagaaaaggcccccggggggggccaccgcgggagagtcctttggagcacaagagccccaagaggggggccgttagcgaagagggcgcctatcaggacgggctccacac

SEQ ID NO: 98784 - DNA, 295 bp, Homo sapiens
ggctcggcacctattggactttcttccagcatttttctcttgggacacaaatcccaactgtagcatctatggtttcagaacagagctgtgccagacgtaaaaagcttcctctgggtctgggttctgagctccagccaggcttgctattggggcagggcggtgcccggtcaagtctactgctacctctctctccccttcttccccaggctgctgttcctgctgccccgtgggctgtgccaagtgtgcccagggctgcgtctgcaaatcctgctgactaacaatgaagcctggaaga

SEQ ID NO: 98785 - DNA, 1632 bp, Homo sapiens
ctgggaggagggtggaaggcaacctcggggaaactgggaaaggcggcctggacttcgggaacaccgcgtacctgcgggggcacagccccacccgagcgaacgggctccaaaggggaggtcccgcggtgcccaccgcgcagagctcagggggtggtgcgcccggcccttctgcggcgcacagcccagcccaggaacgcgggcggtgcggactcagcgggccgggtgcaggcgcggagctgggcctctgcgcccggcccgacctccgtctataaatagagcagccagttgcagggctccattctgctttccaactgcctgactgcttgttcgtctcactggtgtgagctccagcatcccctttgctcgaaatggaccccaactgctcttgcgccactggtaagggaagctctgcgccctggaatccccatttcccagccctattacagagggtctctgggtttcaggaagtcgcattttaagttctgagcgacggggactccagtacttcgttagatgctttcttcctgatcacgcccctgagagcattgccctcatccctgggcctctacgtcagagttaagaatactgaggctcaaggctgaactgctccacatcacccagttggtcatgggcctgctggctgggccccagtgctctgtccaggctctgagcaatcagtgtggttgggggtgctggaaacattgactcttcagagttcaggacagaaggttctggctcgcagtctcaatattcctgggttgtatgtgcacgtggggaccttcctggtgcggttaaaacaggagggtccttgcccttcccagcgtttagtggagaggacatggggcttctgttcctctgtcctgagtgggaaaggagctctgagggctggccctgcacagaggagggggcactggagactcactgacccactgctgtaccttctgcatctcactcactgcccactgcgttttcctcttccttgtaggtggctcctgcacgtgcgccggctcctgcaagtgcaaagagtgcaaatgcacctcctgcaagaagagtgagtgcggggccatctccaggaatctggggctgtggctcaggttgggagggaactcaaggctggccctgagtgcatccttctggggaactgggctttctttgccctcattgcccgtgtcattccctctccaggctttctgccctaaattcagatggggcaggacagcatttttctcgtgggacacaaaccccaactgtaccccctatggtttcagaacagagctgtgccagacgaaaaaaagcatcctctgggtctgggttctgagctcgagccaggcttgctattagggcagggaggtgcccggtcaagtctactgccacctctcactctccccttcttccccaggctgctgttcctgctgccccgtgggctgtgccaagtgtgcccagggctgcgtctgcaaaggggcatcggagaagtgcagctgctgtgcctgatgtgggaacagctcttctcccagatgtaaatagaacaacctgcacaacctggatttttttaaaaatacaacactgagccatttgctgcatttctttttatactaaatatgtgactgacaataaaaacaattttgactttaa

SEQ ID NO: 98786 - DNA, 921 bp, Homo sapiens
  misc_feature (755)..(756): n is a, c, g, or t
  misc_feature (760)..(760): n is a, c, g, or t
  misc_feature (768)..(768): n is a, c, g, or t
ctgggaggagggtggaaggcaacctcggggaaactgggaaaggcggcctggacttcgggaacaccgcgtacctgcgggggcacagccccacccgagcgaacgggctccaaaggggaggtcccgcggtgcccaccgcgcagagctcagggggtggtgcgcccggcccttctgcggcgcacagcccagcccaggaacgcgggcggtgcggactcagcgggccgggtgcaggcgcggagctgggcctctgcgcccggcccgacctccgtctataaatagagcagccagttgcagggctccattctgctttccaactgcctgactgcttgttcgtctcactggtgtgagctccagcatcccctttgctcgaaatggaccccaactgctcttgcgccactggtggctcctgcacgtgcgccggctcctgcaagtgcaaagagtgcaaatgcacctcctgcaagaagagctgctgttcctgctgccccgtgggctgtgccaagtgtgcccagggctgcgtctgcaaaggggcatcggagaagtgcagctgctgtgcctgatgtgggaacagctcttctcccagatgtaaatagaacaacctgcacaacctggatttttttaaaaatacaacactgagccatttgctgcatttctttttatactaaatatgtgactgacaataaaaacaattttgactttaaggaaaaaaaaaaaaaaaaaaaaaaaaaaaaaaaaaaaaaaaaaaaaacaaaaaaaaaaannaaangaacaaanaaaaaagaaaaataagacaaacaatgaagaccaaataagcaacgaacaaagcaacgaagaaaaaaacaagaaataagaaaacagaaccagaaagaaaccagacgacacacgacagcagaactaaaaaaacggaacatgagacaaagacattcc

SEQ ID NO: 98787 - DNA, 809 bp, Homo sapiens
  misc_feature (5)..(5): n is a, c, g, or t
  misc_feature (21)..(21): n is a, c, g, or t
  misc_feature (31)..(31): n is a, c, g, or t
  misc_feature (59)..(59): n is a, c, g, or t
ttganttacgaatttaaatangactcactanggggaaatttggcccctcgaggcccaanaaattcgggcacgaagaactgcctgactgcttgttcgtctcactggtgtgagctccagcatcccctttgctcgaaatggaccccaactgctcttgcgccactggtggctcctgcacgtgcgccggctcctgcaagtgcaaagagtgcaaatgcacctcctgcaagaagagtgagtgcggggccatctccaggaatctggggctgtggctcaggttgggagggaactcaaggctggccctgagtgcatccttctggggaactgggctttctttgccctcattgcccgtgtcattccctctccaggctttctgccctaaattcagatggggcaggacagcatttttctcgtgggacacaaaccccaactgtaccccctatggtttcagaacagagctgtgccagacgaaaaaaagcatcctctgggtctgggttctgagctcgagccaggcttgctattagggcagggaggtgcccggtcaagtctactgccacctctcactctccccttcttccccaggctgctgttcctgctgccccgtgggctgtgccaagtgtgcccagggctgcgtctgcaaaggggcatcggagaagtgcagctgctgtgcctgatgtgggaacagctcttctcccagatgtaaatagaacaacctgcacaacctggatttttttaaaaatacaacactgagccatttgctgcatttctttttatactaaatatgtgactgacaataaaaacaattttgactttaa

SEQ ID NO: 98788 - DNA, 354 bp, Homo sapiens
  misc_feature (14)..(14): n is a, c, g, or t
cggcttccccagancccacccccgccccccggctcctgcaagtgcaaagagtgcaaatgcacctcctgcaagaagagctgctgttcctgctgccccgtgggctgtgccaagtgtgcccagggctgcgtctgcaaaggggcatcggagaagtgcagctgctgtgcctgatgtgggaacagctcttctcccagatgtaaatagaacaacctgcacaacctggatttttttaaaaatacaacactgagccatttgctgcatttctttttatactaaatatgtgactgacaataaaaacaattttgactttaaaaaaaaaaaaaaaaaaaaagttttgcgtcgacgcggccggcaatt

SEQ ID NO: 98789 - DNA, 718 bp, Homo sapiens
caccacgccgtccgggtgggcctagcagtcgctccatttatcgcttgagatctccagccttaccgcggctcgaaatggaccccaactgctcttgcgccactggtaagagaagccgaccctgcgccctaggaatcccatttcccagccccagtactgagggtctctgggtttgaggaggtcgcatttaagttctgagcggaagggaattcctttacttccttaggtgctttcttcctgatctcccctctgagagcactgccctccctcctgggcctctgggtcagagttaaggatactgagggtcaaggcagtcccgctccacatcacccagttggttagggtcctgctggctgggccccagtgttctcctccaggctctgagcaatcagggtggactgggggctggagacatttgagtcttcagggttcagcacagaaggttctggctggcaatctcagtattcctgggttgggtgtgcccctgggaccttcctggtagggtaaaacaggagggtgcttgcccttcccagcgttagtggagaggacaggggctttccctgagtgggaaaggagctctgagggctggccctgcacaaaggagggggcactggagactcattgacccattgctgtaccttcttcatctcactcactgcccactgcgtttttctcttccttgcaggtggctcctgcacgtgcgccggctcctgcaagtgca

SEQ ID NO: 98790 - DNA, 826 bp, Homo sapiens
ccggggactggagcaggagggctgcaccgggactccgggacaggcccagttgaaaacggcggggcgagggggtggggtggagacgcccgcgacgccaaggctggggtcccggaaagcgcggggaggagggtggaaggcaaaggcaacttcggggaaactgggaaaggcggcgggacctcggggacactgcgtaccacccggcgcacagcccctcccgcgcaaacccgagccaaaggggcggtcgagcggcgcactcggagcggagctcaggggatggtgcgcccggcacttatgctgggctcagcccagcccagcccaggaccgctggcggtgcgaacccagccgggcgggtgcaagcgcggggcagggcctctgcgcccggccccctcccctgagtagaaaagcagccgcaggctgtggcgctccaccacgccgtccgggtgggcctagcagtcgctccatttatcgcttgagatctccagccttaccgcggctcgaaatggaccccaactgctcttgcgccactggtggctcctgcacgtgcgccggctcctgcaagtgcaaagagtgcaaatgcacctcctgcaagaagagctgctgttcctgctgccccgtgggctgtgccaagtgtgcccagggctgcgtctgcaaaggggcatcggagaagtgcagctgctgtgcctgatgtgggaacagctcttctcccagatgtaaatagaacaacctgcacaacctggatttttttaaaaatacaacactgagccatttgctgcatttctttttatactaaatatgtgactgacaataaaaacaattttgacttgaa

SEQ ID NO: 98791 - DNA, 989 bp, Homo sapiens
  misc_feature (737)..(737): n is a, c, g, or t
  misc_feature (743)..(743): n is a, c, g, or t
  misc_feature (747)..(747): n is a, c, g, or t
  misc_feature (755)..(755): n is a, c, g, or t
  misc_feature (989)..(989): n is a, c, g, or t
ctgggaggagggtggaaggcaacctcggggaaactgggaaaggcggcctggacttcgggaacaccgcgtacctgcgggggcacagccccacccgagcgaacgggctccaaaggggaggtcccgcggtgcccaccgcgcagagctcagggggtggtgcgcccggcccttctgcggcgcacagcccagcccaggaacgcgggcggtgcggactcagcgggccgggtgcaggcgcggagctgggcctctgcgcccggcccgacctccgtctataaatagagcagccagttgcagggctccattctgctttccaactgcctgactgcttgttcgtctcactggtgtgagctccagcatcccctttgctcgaaatggaccccaactgctcttgcgccactggtggctcctgcacgtgcgccggctcctgcaagtgcaaagagtgcaaatgcacctcctgcaagaagagctgctgttcctgctgccccgtgggctgtgccaagtgtgcccagggctgcgtctgcaaaggggcatcggagaagtgcagctgctgtgcctgatgtgggaacagctcttctcccagatgtaaatagaacaacctgcacaacctggatttttttaaaaatacaacactgagccatttgctgcatttctttttatactaaatatgtgactgacaataaaaacaattttgactttaaggaaaaaaaaaaaaaaaaaaaaaaaaaaaacttggggggggnttggcncctnggagaagngttttataaacactctgttttggggggcgggccacattatggtatactgtgaacacatgtgcaaacggggtgtcccataggaaaacccgcgcactgaactagggtgtgggttttctaacaattaaaaaacggggcgggaacacgacgtgttttggaacaactcaagagggggttggagacaacgggcctatcaaccggggtcaagggagcgaatcagtgggacggggggtgggn

SEQ ID NO: 98792 - DNA, 349 bp, Homo sapiens
acaagcagtcaggcagttggaaagcagccccaactgctcttgcgccactggtggctcctgcacgtgcgccggctcctgcaagtgcaaagagtgcaaatgcacctcctgcaagaagagctgctgttcctgctgccccgtgggctgtgccaagtgtgcccagggctgcgtctgcaaaggggcatcggagaagtgcagctgctgtgcctgatgtgggaacagctcttctcccagatgtaaatagaacaacctgcacaacctggatttttttaaaaatacaacactgagccatttgctgcatttctttttatactaaatatgtgactgacaataaaaacaattttgactttaa

SEQ ID NO: 98793 - DNA, 1343 bp, Homo sapiens
  misc_feature (5)..(5): n is a, c, g, or t
  misc_feature (21)..(21): n is a, c, g, or t
  misc_feature (31)..(31): n is a, c, g, or t
  misc_feature (59)..(59): n is a, c, g, or t
ttganttacgaatttaaatangactcactanggggaaatttggcccctcgaggcccaanaaattcgggcacgaagaactgcctgactgcttgttcgtctcactggtgtgagctccagcatcccctttgctcgaaatggaccccaactgctcttgcgccactggtaagggaagctctgcgccctggaatccccatttcccagccctattacagagggtctctgggtttcaggaagtcgcattttaagttctgagcgacggggactccagtacttcgttagatgctttcttcctgatcacgcccctgagagcattgccctcatccctgggcctctacgtcagagttaagaatactgaggctcaaggctgaactgctccacatcacccagttggtcatgggcctgctggctgggccccagtgctctgtccaggctctgagcaatcagtgtggttgggggtgctggaaacattgactcttcagagttcaggacagaaggttctggctcgcagtctcaatattcctgggttgtatgtgcacgtggggaccttcctggtgcgttctgttcctctgtcctgagtgggaaaggagctctgagggctggccctgcacagaggagggggcactggagactcactgacccactgctgtaccttctgcatctcactcactgcccactgcgttttcctcttccttgtaggtggctcctgcacgtgcgccggctcctgcaagtgcaaagagtgcaaatgcacctcctgcaagaagagtgagtgcggggccatctccaggaatctggggctgtggctcaggttgggagggaactcaaggctggccctgagtgcatccttctggggaactgggctttctttgccctcattgcccgtgtcattccctctccaggctttctgccctaaattcagatggggcaggacagcatttttctcgtgggacacaaaccccaactgtaccccctatggtttcagaacagagctgtgccagacgaaaaaaagcatcctctgggtctgggttctgagctcgagccaggcttgctattagggcagggaggtgcccggtcaagtctactgccacctctcactctccccttcttccccaggctgctgttcctgctgccccgtgggctgtgccaagtgtgcccagggctgcgtctgcaaaggggcatcggagaagtgcagctgctgtgcctgatgtgggaacagctcttctcccagatgtaaatagaacaacctgcacaacctggatttttttaaaaatacaacactgagccatttgctgcatttctttttatactaaatatgtgactgacaataaaaacaattttgactttaa

SEQ ID NO: 98794 - DNA, 411 bp, Homo sapiens
gatccgccctcctcaaccccgggagtagctgggattacaagcatgcaccaccacgcctggctaatttttgtacttttagtagaaacagggttttgccatgttgcccaggctggcctcaaactcctgggctcaagggatcctcctacctcagcctcccaagtgctaggattataggtgtaagccaccgtgcccagccaaaagttctttttaaaattatttattttcatatgtaatacacaaatacattctcttttttctaattttttctggctttcaagtaacatctttagaagcttttcttgctcttaatggcacaaaagtaaggacaagagaatgaatttaaactagcaggaggtttatttacacttgggaatttcttttgaggagtcaagatgccacacagaaaacaaa

SEQ ID NO: 98795 - DNA, 397 bp, Homo sapiens
gcaaaaaaaaaaattattatctccactttaccagtgctgacacttcaccaatgtagggctctcagtgactagcccagggtcatgcacagcctgtttcagcagctaccttggacttgaacccagctcggtctgtctgactcaatgcctatagtcttaacctttccagcagctgcttctttgtcaaacaggtcctcccgcagggtttcacagcccagccccttactcaacaagtatttattgacaggcctcaggaacactaggcaagtaggatagcaatgaacaagatgctgaccttgaccttgaccctgcatccatagtatgagcattttaactgggggaggtttgcaaagttctcttaaacagtctactacatgctctgtaagcattttcttatgga

SEQ ID NO: 98796 - DNA, 449 bp, Homo sapiens
cccggccagaggaaagccctacctatagcacaccccaaatcccaccaggcggcctcagggctgggcaccacagccaagcccgcagccacgggcggcactcccgcgctcacagagggcctctgccctcctaccggggacctgcttgctcctgggggtgacagtgggagggacaccccaacagagcaatagccaaggtcccggccaggcccaccagcccctcaaggcccatcccaccatcctgaggttctggacagcctctgcaaggagacctccctcttcctcccagattcctccctaggcctgccagaggtctcacaccaccatggggcattaaaaggataaaatctcaggacagagatacagggtgctggcacatgatcccaggcagcccctgcctcgggagaatcccgggttcagagcaaggatgagtcaccatggcctgtccctcc

SEQ ID NO: 98797 - DNA, 310 bp, Homo sapiens
  misc_feature (25)..(25): n is a, c, g, or t
gctgccgcctactactactaaattngcggccgctcgactaagagcccttaccagagcataggatatgacctcttgcagcaacagctccatatggattaataaatcaattgaattaactcatttaattaccctgtgccggcaactgcttgtggttctggagctttggagatgagttaacaatagacagagagacattttccagtttactgctatgcaagctactccaagagttgtgatactggctcttgcaagagtggtaaacagcagagaattttacaggtgtcgacgggcagggagagatggagaaatg

SEQ ID NO: 98798 - DNA, 267 bp, Homo sapiens
gcattagttcatttcatcctcataattatcatacatgttaactactagtatgtctgttatactaaggtagttggtctaaaatcacatctggagtgtgaagtggtagagcagaccttggatgccaggggtgaacagttctagtatatagcttcttatttatgcctagtgttccattattggaacactaagcttgtggtagttatttatatctcactgatcaaggttattgccaaggtctgatttttcacaaaaaaaaaatttgcaacc

SEQ ID NO: 98799 - DNA, 850 bp, Homo sapiens
ggcgggtgggaagtacctgccgccatcttgctcaccagcctccaaaatgcggctggggctcctgagcgtggcgctgttgtttgtggggagctctcacttatactcagaccactactcgccctctggaaggcacaggctcggcccctcgccggaaccggcggctagttcccagcaggctgaggccgtccgcaagaggctccggcggcggagggagggaggggcgcatgcaaaggattgtggaacagcaccgcttaaggatgtgttgcaagggtctcggattatagggggcaccgaagcacaagctggcgcatggccgtgggtggtgagcctgcagattaaatatggccgtgttcttgttcatgtatgtgggggaaccctagtgagagagaggtgggtcctcacagctgcccactgcactaaagacgctagcgatcctttaatgtggacagctgtgattggaactaataatatacatggacgctatcctcataccaagaagataaaaattaaagcaatcattattcatccaaacttcattttggaatcttatgtaaatgatattgcactttttcacttaaaaaaagcagtgaggtataatgactatattcagcctatttgcctaccttttgatgttttccaaatcctggacggaaacacaaagtgttttataagtggctggggaagaacaaaagaagaaggtaacgctacaaatattttacaagatgcagaagtgcattatatttctcgagagatgtgtaattctgagaggagttatgggggaataattcctaacacttcattttgtgcaggtgatgaagatggagcttttgatacttgcagggtaagacca

SEQ ID NO: 98800 - DNA, 649 bp, Homo sapiens
taatttattgggtgcccactgtgtgctaaatatcttctaggtgagcaagactaagtcctttcttcatagaaaccgactaatgttaatgttaattaggtcaataaatgctagaaagagagggggtgctattttagattgggtaagcagggaaagcctctctgaggaaatgacattaggagtttgccttgaaaaaaactaaagaaccatacacatatgccccttttgccatttacactggggagccaaactttttaccagcatttatttcatggtgttattatccagtttttcatgtacagtagatgttggctctttattacttgatttttatcaacttttcttcttcagacagttataaccactagccctgtttggcacagcagcctcctacttccttgtacctccattctcatttttgccagttgtccttctctgtactatctcttcctctttactctcctatggtgggcatgtttttagtttttctgacttcatttgtgtctgatcattctcccattcaaaggtaattatctcttatgagaaaatgtctatatatgtacacgcatgcatacacatatatatgtatcactgtcattacacacatcatcagcatcaggaatgtttttatagatttgaaatcagagtctat

SEQ ID NO: 98801 - DNA, 403 bp, Homo sapiens
ctccctatcttccatgctccttcctcagatacccacgtggctcactcccttatctcctcaaatatgaccttctgaactccagagcagccaataaaaataataaaacagacatattggtaacaaacctcaggtgaaggtaaaagagaattataagaaatactcaattcgaaataaggcttaaaaagaggaaaatggtagaaagaaaacacgggatacatagaaaccaaatagtaacgtttaagacaaaccatatcaatgattacatgaaatgcaagtggtcagagcatcaaattagaaatcaaagattaacaaattggattaaaatggaaggtccaactgttttaagaaaagcaaaaattagccgggcgtggtggcgggtgcctgtagtcccagctattcagga

SEQ ID NO: 98802 - DNA, 284 bp, Homo sapiens
cagatgtgatttgccattaaatttcagcgtttttaagtaaaccgatatcattacaatcctcatggaaaagctatacatcaaagaaaacatctgtgtgtcaaagagagaagagagaagagagaaaaagtggcatcagtgaatgagttgatcaggtttgctcatcttactaccgctttgaactaagtctgttcatgtaattctacaacatttcagaaggaaagctgctgttttcttctgctgacaaaggcagtaggggcttgagcaatgaaaaaaaaaacaagata

SEQ ID NO: 98803 - DNA, 503 bp, Homo sapiens
ggtaatttttgttcccctttccatgttgacctttttaaaaagaagtcactgtgcccagcacatatttaagaattggaaaaacatgctccacctcctgctaggcagagcttctacaatgccatttgtgtttctttaccatggacaatttctctattctgctccatgcattatttatattcatcatttaatatatcatataaaatatatgaaatcacaaatatttacttcacactataattactagtttattgattttgttcctcaaattgttttagagtttgccatgtaaggtctttcagatgattcctataccattttgatatatctacgttgttgcagtttgattttgttttttgtttgtttgtttgtttgtttgactgctttgttggttgtgttattgtttagcattttattactttctggcactataaagtgttcaagcttaattgttttgattccctacccaagcctaatgttcgtaatttcttcaaggagtttttatt

SEQ ID NO: 98804 - DNA, 686 bp, Homo sapiens
acagaaagtgtcatctggagcggagaacgaggggctgctttattctaatgggctttttctttagattgtctcagtcctctgttggatcgcgttcacccctggcgccagggccctctggccccactcaaacgttgtgtgtgtgtgtgtgtgtgtgttgatgttgttgcggggggagtgttgagatcgcctctcccctcaacctgtggcatagtcagcagacatcaacatgcccagctgtctttttcttttggcttcaaaataaacctcaagggtggacagtgaagaagcatcagagcgcaggactagtgcaggtcggggatggggtctgctggggactgcccccggataaaatgtggaacaaattatcccaacacagccgggatcgctttgacttcggggtcttggggcccaaggccctaagcgttggaaaggacactttgcctatgcagcagctttcccggcagaaagtgaattcaaatcgaagatgtttcaccacgcgggttttgcctaagtatgcattttttcacacctctctaaaaaacaaccacaaacaaacagaaaaaacaaaacaaaacaaagaaaacacaacgatcctttggactttcagaccaccaggatgtgagtcaaacgaaatctcgtgttaacaccccgcttcttccctgctggaggccaccgggagtccggga

SEQ ID NO: 98805 - DNA, 425 bp, Homo sapiens
gaacttaacactcaggtagtcctgtctccctgaaggccagagaggaaaaatgacctatccaggatgacaggtggtttatttgagacaacactatactcatataaaagcataaaaatttttctgaattactcatcaaagcagagataaaggactgaaagaatgtatcagaaacccaaaacagaacccaaagatgaagggtccacctcattattattctgccacatggaaaatattccatggctgaagtccttcactctgctcttttatgttcactttattggctttttccttcattctgatatttttcctggagaaataactgtcactagtgttcaagagctgactcttcatgaactaggtcaaattaaaacatggttctgctccttttccaagacattttgttcatcctaaaatgcttttctttc

SEQ ID NO: 98806 - DNA, 363 bp, Homo sapiens
cacatggatcattctcaagcatggaccatatgttaggccacaataaaagtctttaaaaaatttttggccaggtgcagtggctcacgcctgtaatcccagcactttgggaggccgaggcaggtggatcacgaagtcaggagattgagaccgttctggctaacatggtgaaaccccatctctactaaaaatacaaaaaaattagccaggtgtggtggtgggtgcctgtagtcccagctacttgggaagctgaggcaggagaatggtgtgaacccaggaggtggagcttgcagtgagctgagattgcgccactgcactccagcctgggcgacggagtgcgactccatctaaaaaaaaaaaaaaatt

SEQ ID NO: 98807 - DNA, 205 bp, Homo sapiens
agtggtatttctgggaaagctgcatttaccacctcctaaatgtcttcttctcccattgattctgatctcttgttttaccagtaagtcaactaggaggagaaacactggacatgatgaataaaataggtagtgctgagaagaagagaaacagaaggcatggacaatgtgcccaagaagagaaatatctgaggacatggccaatcca

SEQ ID NO: 98808 - DNA, 486 bp, Homo sapiens
acattcataggactggcaggcaaataattgatggtctcaaggatgaatcagagtttagtcattcaacaagcacttattatcacctgctatttgccagggaaaagtgatgcaggtccaaaatcctttatccaaaactctttattgagagggagtttctctctgtcgcccgggctggagtgcggtggagcaatctcggctcactgcaacctccacctcccaggttcaagcgattcttgtgcctcagcctcctgagcagctgggattacaggtacccgcctccacacctggctaatttttgtatttttagtagagatggagtttcattatgttggccaggctggtctcgaattcctgacctcaagtcctcccgcctcgcctcacacttgtaattccagcacttggggaggctgaggtgggaggatcacttgagcccagaagtttgagaccagcctgagcaaaatggcgagcacctatctctaaaaaaat

SEQ ID NO: 98809 - DNA, 554 bp, Homo sapiens
cttgtcccccaggctggagtgcagtggcgcgatctcggctcactgcaacctctgcctcctgggttcaagcgattctcctgcctcagcctccacagtagctgggattacaggcgtgagccacagagcctggccgtatttctaggttttatggctggcctcgcaggagaggggttctggtttctatgacctgcactggggaagaggcattctactttccgtggcctaccttgaggggtggtggggtgcgggcaagggaaggggccagagggtcagagagcccttgcctctgaggcccttccggtgtcctgcagttcctcagtgtgccaaaaccacaggccttggggtatcattttctgagccccagcatatccctctattttgcccttaggtctggaggaaggttccagggcatttgcccttggtgggtgcaggtagggaggatctgcgggtcttcctcatgccaggagtcttatcccagaatcaaaggctcctggtgggtaggagcgtgtcccatgtgcagcacgcttggctgtccgaagttgctgatgagaagc

SEQ ID NO: 98810 - DNA, 761 bp, Homo sapiens
acagctccaggcatttcctcaggaagctgccctccaccttcatccacctcagacgcgtcctgcagagccctctggagaaccagcttcaggttctgcctattttgacgctgcctaaaggagcccacgaagaagtaaatgatggggttggcactgctgttaagagcggacaggaaaatagaaactagatgaacatgacaaaataagacttccctgtccacgtggatccataaaaataggaaaaactgaatgccaaagggcaggccacagaggaggaagaccagtactgtgagcaggatggtcacgtacagcctggtcagcggtatcttccgggatccacagagaatcctgatcagcaggaccaggctggacccacagagaaccacacataaaaaaatcagccacgcgactgtgatgaaatctgatgtttgacaccaagcagaatcagcaccactgaacaggaagccacataacatccactccaggatgctccgcagcagggacagggcccagagcaggacacacaccaccgctgacaggtgtgtggggcggtggcagcggtaccagatgggccacaggacggacaggcagcgctcggtgctcacggcactcagaaagctcaggcctgcaaagtaggaaaacatcatcacaggatagaggattttagagatggtatgggggatactgatgaagcttaacagggaatatataaggcggccgctgaggaagaggaagtctgctgcggccaagttgaggatgtagat

SEQ ID NO: 98811 - DNA, 701 bp, Homo sapiens
acgtgaaagggaactgggcgtttgccgcagggaaaagtaaggtgtttctgctctcgcgccatatgcagttcccgcgggatctcgttgagggcggggcacccagttccttacgaaagggatggagggggtggtacttctaaagttggcggtgtttcgtaccggccgcgggatttcgcggactggggcgctgaggttctttgagcggcgtgtggacctgaattccctggaaacaggctggggccgcgaggggcctccgctccgggcggggtccccagatagccccgcctcgaataaaaatgacgagcacgggtcctctctcgggcccgcagtgggtggactgcgtcgcagacccgtagtggaggcgcccagctcgccggggagattcgagtggaaaccctcacggccgccggtggtgggccccggcgcggcgctgggctccggcgggtctgcgctggggagggccagggcccctgaagccggcgtccctcttaggggacgcgcctgggtgtgtcttcaccgtttgcctggtgagttggagacagggtctcgctccgtcgcccaggctggagtgcagtggtaggatcagggttcattgtagcctccgcctcagcctctggagtagctgggacctcaggcgcgcgccaccacgcccggctaattttttaaatttttttgtagagacggggttgggggaggcgggg

SEQ ID NO: 98812 - DNA, 254 bp, Homo sapiens
tcaagttaagaactccccgtaatctagtagggaacatttaatggacaactgaaaagcttaataaaggaaaatataaaaatcagtaagtagtagtttctccctcgtgctctgtttcttaagatataccttctatcgtttattaaaatcccctccaaagttttgttttaaaaatcccccatgttttttgttttgtttggtttttttgagacggagtcttgctctgttcccaggatggaatgcaatggcgtgatctc

SEQ ID NO: 98813 - DNA, 324 bp, Homo sapiens
ccaaaaggtctctccaatagttgagaacactgagctttaacaaagcctaggggtgtctatctccaacccccagaacctccaaggcctgtggtttcccatgcccctgctagacgcacccatggtgggtgggggtgcccatggtaactcacaccatcaggtaaatggcagagtaccagctccatgcattggctcattaagctttgcaagcatcaggtatctggggtactgttgagttcctgtgcccaggcatggaggaagagtgggagttaaagatcagtctctgaccttatggggaccttagcctctctgggaaagcaaagctaa

SEQ ID NO: 98814 - DNA, 428 bp, Homo sapiens
ggccagcatttgaaccagagtctactaacagagctgaaggtgtaagtaacatgagtctgccttccaagccaggccgttaactctgatggcaggaacagagatttttgttttcatttaggcaaccccaggatacttgaatagtgcctggtttataatctatgataaatgttgagtgtagtcagctgggtgtggtggctgatgcctgtaatcccaacactttggaaggctgaggcgggcggatcacgtgaggtcaggagttcgagaccagcctggccaacatggtgaaactccgtctctactaaaaatacaaaaattagcctggtaatcccagctacttgggaggctgaggcaggagaactgattgaacctgggaggcggaggtcgcagcgagccaagatcgtgctgctgcattccagcctgagcgatgg

SEQ ID NO: 98815 - DNA, 206 bp, Homo sapiens
agcggactggagtttggttctcgaggcggcggcagcgagcggcggcggctccggcggctcctcctcctcctttggtggcggcggcggcccgggaccgagacccggccccggctcccctctccgccaccccgggcgcgccgcagaacgccccggcgccgcggggaacatgcggctccggctcccggaggccggcgagtgagtgaccc

SEQ ID NO: 98816 - DNA, 394 bp, Homo sapiens
ttatcagtggaaagagaatcttggtaaaaaagggcagctgactaagtggcctcaaccctattgggcacttctttggggttctcccacgttgattattctgcttctacccttgtacatgtctggacaacaggtttgttttttacaaacaaaaatcccttctctttcttcctctcttgatagctgaggcaagtgagcatttaaaaaagatattccaacaactttaaaggaggacacgagaagatagggaaatataaatagtatcagtaaaatggctggcctggggatccatccttgcttgcttgcttgcttcagactggggctttgtttctttccaaacctgtcaggattcccagctcttcgccggcctccacgtggggtgccctcttttatgttc

SEQ ID NO: 98817 - DNA, 3624 bp, Homo sapiens
  misc_feature (1)..(1): n is a, c, g, or t
  misc_feature (332)..(332): n is a, c, g, or t
ncagtactgtacaaggaaaacccgtcggatctgttattgcgggatacttgtgaaatatacataggattctttcttatggctgcatcccggatctggaaattttacttggggaccaggaggatttgaaaggctgcatgtactcagaagatttgcaagcaacactccaattcttgtcatagagctcgcagacttctcacttatcggcttttttccttccttattttttaagaattattcttattttcccctctctttttctgctctctcctctctcagtctctccttttctatctgcctcttcatttttctcctagtctgttttttttttcccngctctgcacctggattgtatcttcagcaaacaatcgggcactttgagaactaactggagacagtcttgtagggaagatctgtatggaattatctgcttttatggtgaacttggcatttgtgaatgggaatcttgttcacaatattaattgctagcaaaaacaagaaaaagaacacaggagtaaaacgtggatttttctgaatacgcattgtgatgaccagcaattaccttaccgactaatatccagaggagaataatttggaagactgttgtggggaacagcctttaagagctggaagatgaaagctccgattccacacttgattctcttatacgctacttttactcagagtttgaaggttgtgaccaaaagaggctccgccgatggatgcactgactggtctatcgatatcaagaaatatcaagttttggtgggagagcctgttcgaatcaaatgtgcactcttttatggttatatcagaacaaattactcccttgcccaaagtgctggactcagtttgatgtggtacaaaagttctggtcctggagactttgaagagccaatagcctttgacggaagtagaatgagcaaagaagaagactccatttggttccggccaacattgctacaggacagtggtctctacgcctgtgtcatcagaaactccacttactgtatgaaagtatccatctcactgacagtgggtgaaaatgacactggactctgctataattccaagatgaagtattttgaaaaagctgaacttagcaaaagcaaggaaatttcatgccgtgacatagaggattttctactgccaaccagagaacctgaaatcctttggtacaaggaatgcaggacaaaaacatggaggccaagtattgtattcaaaagagatactctgcttataagagaagtcagagaagatgacattggaaattatacctgtgaattaaaatatggaggctttgttgtgagaagaactactgaattaactgttacagcccctctgactgataagccacccaagcttttgtatcctatggaaagtaaactgacaattcaggagacccagctgggtgactctgctaatctaacctgcagagctttctttgggtacagcggagatgtcagtcctttaatttactggatgaaaggagaaaaatttattgaagatctggatgaaaatcgagtttgggaaagtgacattagaattcttaaggagcatcttggggaacaggaagtttccatctcattaattgtggactctgtggaagaaggtgacttgggaaattactcctgttatgttgaaaatggaaatggacgtcgacacgccagcgttctccttcataaacgagagctaatgtacacagtggaacttgctggaggccttggtgctatactcttgctgcttgtatgtttggtgaccatctacaagtgttacaagatagaaatcatgctcttctacaggaatcattttggagctgaagagctcgatggagacaataaagattatgatgcatacttatcatacaccaaagtggatcctgaccagtggaatcaagagactggggaagaagaacgttttgcccttgaaatcctacctgatatgcttgaaaagcattatggatataagttgtttataccagatagagatttaatcccaactggaacatacattgaagatgtggcaagatgtgtagatcaaagcaagcggctgattattgtcatgaccccaaattacgtagttagaaggggctggagcatctttgagctggaaaccagacttcgaaatatgcttgtgactggagaaattaaagtgattctaattgaatgcagtgaactgagaggaattatgaactaccaggaggtggaggccctgaagcacaccatcaagctcctgacggtcattaaatggcatggaccaaaatgcaacaagttgaactccaagttctggaaacgtttacagtatgaaatgccttttaagaggatagaacccattacacatgagcaggctttagatgtcagtgagcaagggccttttggggagctgcagactgtctcggccatttccatggccgcggccacctccacagctctagccactgcccatccagatctccgttctacctttcacaacacgtaccattcacaaatgcgtcagaaacactactaccgaagctatgagtacgacgtacctcctaccggcaccctgcctcttacctccataggcaatcagcatacctactgtaacatccctatgacactcatcaacgggcagcggccacagacaaaatcgagcagggagcagaatccagatgaggcccacacaaacagtgccatcctgccgctgttgccaagggagaccagtatatccagtgtgatatggtgacagaaaagcaagggacatcccgtccctgggaggttgagtggaatctgcagtccagtgcctggaactaaatcctcgactgctgctgttaaaaaacatgcattagaatctctagaacacgaggaaaaacagggtcttgtacatatgttttttggaatttctttgtagcatcagtgtcctcctgttttaccatgtcttttaccattacattttttgactttgttttatatgtcgttggaatttgtaaatttacattttttttaaagaagagactgatgtgtagatagaaaaccctttttttgcttcattagtttagttttagaatgggtttttattttatttccttttttaaaattttactttgcttttaacatttccttggggtgcttggacaaatctatccgatgggacaaggagcaccggattctttctcgggttctgcctagcatcaactgggccacgtcggccttcagagaacagtgcaacaaatgccagcattgccattcgggggaaaaaaaaaaaaaaaaaaaaaagatgagaagaacacttgttcataggagggccccaccagtcagagccctgaatctcttccttgtcccacctcattccccacctctacctttctaatggcggcatgatgtgtaaactctgtgcaggggtgggggcgggtctaactgtcttaacattcaagtcactgctcttcagaatacactctagacccaaaggtgtgctaatcacttcacagtgaccactacagagtactaagaagagaagatcaagggcatgaaattggggaagagtgttatttccgttttttaaatgagttgatgtacccttatatatatatacatatatatataaatataaatatatataaaaacaacaaaacaaaacaaaaaaagaaaa

SEQ ID NO: 98818 - DNA, 500 bp, Homo sapiens
  misc_feature (493)..(500): n is a, c, g, or t
taatatatataccctatatactatatggtttatataacatttataatggccctttcagacccatatacttacaaatgacattgtataactacctacatatgtattaatgtgacagaatttagtcctttatggaaagtcaaaccaaattgctagcagttttgagttgaaatgaatgataacaattaaagcttttaagaaattggtaaaggtaccgtaacaaaaactcagcagataaatttaaaagagagggaccatttttgaatgccattttcagagttgacatctaaactagatggtgtgtttaaaaggattttagtggttttgattcatcctttctctgcattcatatcatttagcaaattaatgggacatatgtcatggtttttgtaaaaaagaccattgggttgtcatgattcagtttgtgtttggacatctatggctttcattaaaaacgtgtttattatcatgaataaatattaccatgttttccaannnnnnnn

SEQ ID NO: 98819 - DNA, 677 bp, Homo sapiens
attggtggaataaaatagagaatccagaaatccagtatatgtgcagatttaataaaagataaaggtagtattacagttcaatgggaaatggggagattatttaataagtggtgctggtacaactgtctgcccatctggaagaaaataaaattgggttcctatcttaagataaattccagatggatcaaagccttatagaaatacttaaggttattctccaggtttagttatacaagctagggtaaaggaaatgtgaagataagaaactcagaagctattacaagaggcatatttaattttacaaaaattaagaccttttaatggtaaaggataccataagaaagttaataacagtattggcattaagacagacatattgaccaatggaatagattaggaataggcttggtgcagtggctcatgcttataatcccagcgctttgggagtccaaggttaggaggattgcttgaggctaggagtttgagaccagcctggtcaacatagcaagactttgtctccacaaaagaaagttaaaaattagccaggtggggtggctcacacctgtagtcctagctgcttggaaggctgcggcagtggaattgtttgggtctatgagttggaggttgcagtgagctatgatcatgccactgcactcccctgagtaatgaaagtaatg

SEQ ID NO: 98820 - DNA, 339 bp, Homo sapiens
agaatagagaacccagaaataaacccaaatacttacagccaactgatctttgacaaagcaaacaaaaacataaagtgggggaaaaacacccttttcaacaaagtgtgctggggtaattggctagccacatgtaggaaaatgaaactggatcctcatctctcaccttatacaaaaatcaactcaagatggattaaggacctaaatctaagacctgaaactataaaaattctagaagataacattagaaaaacccttctagacattggcttaggcaaggatttcatgaccaaaaattgcttttgggtaaaagcaattgcataaaaacaaagatacatggct

SEQ ID NO: 98821 - DNA, 660 bp, Homo sapiens
cacaatgctgcagccacctctcgcgtgttctgaaacatttgacctattcactgactgactgactgctctctcagtgagctgtgaggggaggtgactctgtgtggggcccacaccctctgccacctggtcctatagacagactcttctgagtggaggggcagagcggccctgggacctaggagcaagcctggcccgaggcttgtggattgaagaggaaggctggcactgcacttctagaccacatgcatgccctccccccggaggggtcactggtctgttcgcatactcgcagacccctctgggatgccacggaagccaggcgtgtgtgaggaggcagggcagactgcttctccggctttcttctcccactacccccaccccagcgcaaagagtttgttctattgttcagcaaatattcttaggccagaatcttaaatgtttccattctataacaaacactgtgctcatttgtcaacatggagaaacctgatctctactaaaaatacaaaaattagctgggcgtggtggcatgtgcctgtagtcccagctactctggaagctgaggcacgagaatcgcttgaacatggaagcagaggttgcagtgagccaagatcatgccattgcactccagcctgagtgacagagtgagactttgtctca

SEQ ID NO: 98822 - DNA, 791 bp, Homo sapiens
aagaaggtacctgcttcccctttgtcttccaccaggattgtaaattacctgaggcctccccagccatgcggaactcctctatgttgagtactgagatccagcataaaacaggagacttgtttcctgcatgaaacctgcagtattctgaggattaaagatattagatcaacaaccagagaaaagaattatttaagtgtttatgcaaaaaactgtagagagtcctatggaaatacaccagtgaaatagaatatgcacagaatgtgatacactgtacaagataagtgcaccaaaaccatatatttgaactgtgtgactagtatatgacaaagctagagagatttgaattgtgcttctaaaataaaataattactttgcaacttgcgataaaaaaatccatcaatggatcaatcaaaacggcagtgctgtcaaattgtgtaatatagctatactaaaatgtatatatttttatacataatcacaggaaacacaactcatagtcaattatgttatcatattttcccattcaaaaatgtggtatgaaagtattttgcaaattcagtatcaagtagatagtttgtcaggtgtttttacaccacacagaataaatcttatctttgctagacaagaataagtgtgctagttcttttgtattttgacttttaagtttgaggcagaagtgccacggaaatcaacttctgactaggggagataaaataaactcttcaaagagctgagcctgtcaaagtagatgaaaaaaacatctctctcgaatgctcaaataataaatgctg

SEQ ID NO: 98823 - DNA, 173 bp, Homo sapiens
ttcaagaaagtcctcaatcattctaacatttaggtttccaaatgttaactaagcaagcatttttacccctttgatccatgagtcattgtcttgcggtaaaccggtcacctacagctgctgaaatgtcacgttttgccctgtccagacatgtcaacattccaccttctcattct

SEQ ID NO: 98824 - DNA, 231 bp, Homo sapiens
ctccccacgctaacaggaaactactgatgtgttacaaggaaactacaggatgtgtcaaagcctggttagggtggggaggttgaggcgggaggtgcacacaaagtaaatatgctgtatcaattagcttatgctgtgtaacagattaccctaaaactttgatagctttaaacaacaaacattgattaattcgcatgatcctgtggattagcttttctgggccagttcagcttg

SEQ ID NO: 98825 - DNA, 492 bp, Homo sapiens
ggaaatgattttttatttaccattttccaggtactgtggttaggtgctagggatgtaagaaggggtgaacagacaggattcctgacctcctggagtttagagtgaagaagcttaatgattataacagagtcattagagacaattgtgataagtgctacaaggaaaagtacttatcagccaatttatatatttcattccaaatgtttaagtgcctattaaagctaagcaaaatgccaaatactccctaacctcatacagaatacaggcaatgaggaaggtagatattaacccaataatcataaaaaatatgctgagtgctttgaaagaaagacatggttctgagattatgaattaggatttttcttcaaaagcgttctgtgacacatttagttgaaataataggaaatatgtatcatatagtaagggtaagaatcattattcagtttacatatgtgtatgctaggaaataaaagtatactatgggtcatagtt

SEQ ID NO: 98826 - DNA, 605 bp, Homo sapiens
ctgttgtttttagtcttccgcttttgctttagagaaactacacagcttcttctgcacagtcttggggttttcaatcacagtgcccttttcttccccgggcaaaggactggaacataactccagctaggcaaatcagacagtctcctagatacgtgaatgtaaagagagagaaattatacaggaaaataattcaaactgattcttaaccactgccaagtcagcccactgtgatgtctacaacctagattctttattcctgtttttgttaattcaatgaacttccccatctttcccgttttttgcttcagataactagactgattctgttgcttgcaaacaaaaaacctggagtcaaggaaccaagagtatgaaagaggtcaccacaagtcacatagcaacaagcaggaaccataaatcagaggaaagcctggtctattgggagcagagagaaagagagaaaacagaattatggcagaacactagacttggaagcctagtactgttgctactaaggggaatacatgataattcagtccctaagaatgtgttacattctataacacatgccaattatccatgaagccagaaagtgaaaacaatcagtt

SEQ ID NO: 98827 - DNA, 436 bp, Homo sapiens
actactatatttcagaattatctctgaagacttaatagactaacagttgtaaagtattgtaaatacatctttccagtaattgttacatcagtacttaaaggaaacctgttccatctttggacagtgctgttaaaaaattgcttctaagaacaaataggaaacttgtttatggttactcaggatttcataatccaacctaataccgcttctacaaaatagcaataaaggcagctatactctcccattttagttgactagtatatttaaataaaatattataaaccataactgttcaagtttggagagctaacttttcctaaatactaaggggttaccttttaacacacccaagcatcctttcttttcattttaatttttttgcataaaaaacattttaaaatgtatttgatacttcttatctttaaaatattttcag

SEQ ID NO: 98828 - DNA, 311 bp, Homo sapiens
ttcccagcattcactcgtgtagccacagggaccacgcaggaaaataggggtcaggaccccagctgcttccagacctgcttctctcatagcagtcattggttttgatctcagctcattaaaatctttaaaaacaaaaacaaaacaccttcttgaaattgtgaaaatcaacagttaacccaggcctgtttatgaagtagtatgtccagaagtaacacctcacagtgcaaaacaaacgcattcatctgcatgtatagaatgaatcctgttttcttgtcactttcacttttctaactgaagtttccttgtaatga

SEQ ID NO: 98829 - DNA, 893 bp, Homo sapiens
agcggactcatgcctgtaatcccagcattttgggaggccaaggcgggtggatcacctgaggtcaggagttcgagaccagcctggccaacatgatgaaaccagtctctactaaaaatacaaaaattagccaggcacggtgctgtgcacccataatcccagctactctgaaggctgaggcacgagaagcgcttgaacccgggaggtggaggttgcagtgagccaatatcatgccactgcactccagcctgggttgacagagtgagattcagtctcaaaaaaaataataattataaataaataaataaatctcatgagctcagatgtctaaaatcttatctcaatcacctaagtcaagtacttataagaatctgagcatgatccctcctgggtcaaagtttctctccaactgtggacctgtaaaactagaaaacggattatctgctccccagatgcaattgtggaacaggcatgggatatcagttacaggggtttttgattaaaaaaggaatcaatgaaaagaaaaaacaagttaccacatccaaacaattttggaattcagttaggcagtccggatgcagtggctaatccctgtaatcctaacactatgggaggccaaggtggttggaatgcttgagcccagacattggagaccaacctggacaacgtggtgaaaccccacctctgaaaaagaaaaaaaaaatacaaaaacagattagctgggtatggtggtgcatgcctgtagtccaacctactcaggaggctgaggtgggagaatcacttgagaccagggaagtcgaaggtgcagtgagtgatcacatcaccacactccagtctggccttcagggtgagacactgtttccagaaaaaaaaaaaaaaaaaaaaaggagaggaga

SEQ ID NO: 98830 - DNA, 295 bp, Homo sapiens
gagaaacataattttttactaaagtacattcatgattctgacaaattttctacattgtatatcttaatgactaaaaccacactttgaataatttgatgattagatacggaaagtgagacaaaaggagcttcattatataatacatttctaatatgaataaaatacatttggaaacctgaacagaaatattacgactagtaatagcattttcgttatctagagatcaccctaaggagaggctattgagaggtatagggagatcaatttagatgtgagttagagaattttaatttga

SEQ ID NO: 98831 - DNA, 375 bp, Homo sapiens
gctgctatggagtgtcagtctcagaggttcaatttttgattaatagaatttcctgaaagaggaattgaaaaggagggaattatccaagcaaaaataggtataacctgcttggagctaaggaaaatcatgacactaaaatgaaagctctcactgagatagggaggtgatatggtttgtcggtgtccccacaaaaatctcatcttgagttcccacactgttgtgggagggacccagtggaaagtaattgaatcatgggacaagcctttcccatgttctcatgatagtgaataagtctcctaagatctgatggttttatacagaggaattcccctgcacaagctctctctttgcctgctgcaatccatgtaagatgtg

SEQ ID NO: 98832 - DNA, 1312 bp, Homo sapiens
catctgggaaccttcttaggcagccatttccatggtgggggctccattcccgggaggggtacctgaggagattcccacaggttatttacatggtaggggttagcaactgggcctacgttctccagaaccatgggctgtcctgacagcgccagtggtccttggattcatgaggactgaagctgagagtcgtgttccatccacatgagaggggcagggtgaggagcatgggccgtgctgtgtattaaggaaatgcacgtggctcctgcttgtcatcccagcactctgggaacctgaggctggtggattgcttgagcccagacgtttgagaccagcttgggcaatatagcaagaccctgtctcgacaaaaaataacaaaaaattagccaggcatggtagtgcacacctgtattcccagctactcaggaggctgaggtgggaggatggctttagcctgggaggtcgaggctgcagtgagctgcgtttgtgccactgcctccaggctgggtgacagagcaagaccttgtctcaaaaaaagaaatctcatggacaccagaggagcgggaagcagcggtggccccgcagcagcagctatgcatcgggaggtggggcttttctgcttctgctcacctttctgctcacattttcccatagtgaacatggattgcctgtgtgtgaacacttttttaagtaaattaaaccttgtggatattttcagtttgtatcttatctgcccctcacagcagaccattgactgttcgatgcttttagaaatctccttcgtgctgagccctgcgtgctctggacccatgcgctctacgcctcctctgggcccctgctcatggcctgcccaccctggctgtccctgtcccctcttgctgatacggttctgctactctggtcctgggctagtgtctgtctctcgtgtgctaaggcagatggccgagagtggtgggtatcccacagtggggtgccaggcatttttacttctatgctttccaaatccacctgcccttccccacccttagcgtggcccttccagtgccctgtcttagacctggcgccacttcacacgaccagccaggcccagggccccgggcatcctccctggcaagtcctcccatcccctgccattggtcttcgtgctcctggtgagcctccgacccaggctgtcccctgactgctgccgtcctggtttgagcccctcctgctctggccgtcctccacacggagcccacatgaacttgtagatctgagtctggccacatccccactgcaggaatgccctagctggctccccacaccacacctgcag

SEQ ID NO: 98833 - DNA, 506 bp, Homo sapiens
ttttttaaacttggatgttatgttgccccaggctggtcttgacgtcttgattgattggaaagtagaacttaatgatggtgttaagaccaaagatggtcaaaaaaaaaaaaagacaaaaattaattctattactaccctccatgacacttctcaccaaagacaaacatcagaaatctccccttcggactattttgttaaggatgttatgcaatgggtgttattattgtgacaggatattgcacagtatgttatcacgttgagagatgttttaactttgaaaacattttcaacatttccttccatttgggacaggttgtagcctacactgtggtgtccagctgaactttatgaagtcaatacactttcctatatttttgcaggccagtacaccttctagttcagctctgtcattgcgaaccctaagggatttacaacttaaactggggaaagtcctagtggcaaagtcccttgtggggccttcctgtgaatgagaagaataaatgttg

SEQ ID NO: 98834 - DNA, 726 bp, Homo sapiens
ttttttaaacttggatgttatgttgccccaggctggtcttgacaaaaaaaaaaaaaaaaaaaatttaaatcagctgggtgtggtggtatgcaactgtactcctagctatgcaggaagctgaagtgggagaatagcttgatcccgggaattcgaggcttcagtgagctaagattgtgccaccactgctgcctgggtgacagagagactttgtctttaaaaaaaaaaaagatttaaaaaataaaatgttggaggagggcttaaatgtcttgattgattggaaagtagaacttaatgatggtgttaagaccaaagatggtcaaaaaaaaaaaaagacaaaaattaattctattactaccctccatgacacttctcaccaaagacaaacatcagaaatctccccttcggactattttgttaaggatgttatgcaatgggtgttattattgtgacaggatattgcacagtatgttatcacgttgagagatgttttaactttgaaaacattttcaacatttccttccatttgggacaggttgtagcctacactgtggtgtccagctgaactttatgaagtcaatacactttcctatatttttgcaggccagtacaccttctagttcagctctgtcattgcgaaccctaagggatttacaacttaaactggggaaagtcctagtggcaaagtcccttgtggggccttcctgtgaatgagaagaataaatgttg

SEQ ID NO: 98835 - DNA, 445 bp, Homo sapiens
gactttttcttcaaatctcattggtcaaagcaagttaaacagctaaatccagattctagaaattcaactccacttcttgatgggcagggtggcaaagccacagaagtgcatgtggagaggatgggaagaatcattgcactcatctttgcgaacactctatacagtatagacaccagaatgatctggggtcaagaatattgataagtctaactttagggaggaaaataaggcatttgatcattcccttcaccaatttatttacagcacttacacaaggaaaacatagcaaggctgtggttcttgacgtgactagtcttcattcttcctgcattagactaaaaaaaaaatacctcataattggaattgtattttagtctcatattcacagaattgtatgaggtacttcttttcatggatgcagagggtccatatatagatagtgctg

SEQ ID NO: 98836 - DNA, 372 bp, Homo sapiens
gctcccgaaggatacagactatgtccattttgtttgctatccacgatgggacataataggccctcagtaaatatctgttgaataaacagacaaaagaattttgggaagtccattttagggcacctcaaagcctgtcctatgttatctaaaccatgccaagtgctcttgtattccactagacagcagctgacattttatctgatcaccatagccatttatgaagcactcactttttaactgtcagggtctggagaagttagaaccgggcagctgttaacccagattgtaggtagccaaccgagtgactgcaagcagggctgagctgcaacagcaccttattgctggctaccaccagcacactgggccccttcg

SEQ ID NO: 98837 - DNA, 394 bp, Homo sapiens
tgtagagatgtgtcacactatgttgcccaggctggtctcaaattcctggcctcaagcaatcctcccgcctcagcttcccaagatgtggagatggcaggcatgagccactgtgctcagcctccattttctgttcttacaactatgcacagagtgataggaatgtctaacaggggctagatggtggtttttagatattatcataaacttcgatggtagcaaaaaggtcctcaaatagtttctaactggatcattccctctaagatacagactcatttgaactgaaaaccacacccatcaatttcctgcttaactaattcagagattctctataccaccagtggaagaaatctaaacctaatcatggcagaagggctctccttgatctagttcttgc

SEQ ID NO: 98838 - DNA, 672 bp, Homo sapiens
aaaagcaaacctaatgggaatggttagagattggatagattattggggtgtttaaaattactggtaaaattcagaacagaccatactgtttgtacagggcccagtgggagaagtgggtaggtcctgagcagggtgatcaggaagggaagagacctgatttgatggagagaattctgggagcagagagattggcatgaaatctgtctcaaaggcagcataagtcagaatatatttgttctttaaccaggaaaaatatctgaccagggtccatgttacagaacaaaacatggcaagaggcaggcatgaatgaggttctgaggaaacagtggtggagagactggaaacctgtgattaaaacaaacaaacaaacaaacaaacacctcaactagaagatagatacaaatagaagggaaaaaagagaaagggaagaaattcacagttacataatactttacagtttagaaaatgctatatatatatattgcatttgattctgtggaaatctgcaaaaagccttttatgtaatttggataaaactttaggagtattgtgtagctctgcagaaaatacagtagaggggagagatgctggagtctggaagacaggtggttcagttgtcaaatgactcagccttggacccagtttgtggccatggcaatgaatatgaagcca

SEQ ID NO: 98839 - DNA, 238 bp, Homo sapiens
caccatgcaagaagtgcctttcacctcctgccgtgattctgaggcctccccagccatgtggaactaactaaacagaaacactgtagaagcaagaggttgaaaatatcatccattttgatgccaacaattgacaatcctagatagccaaagacagccttactaagcaatgtggctgcttttggagtcaaaggaagactcactttgctcaactgttggataaaaagataaagagaagaaa

SEQ ID NO: 98840 - DNA, 368 bp, Homo sapiens
gacgtaatcacaaaaaaagaaagctttaccatgtggattatcaaccacatgtttcttgatcagggccttggtcttggtgatcttatggaagagatcattaagtgtttttcttttagctttttcttcttaaataagcattattgagataaagcaagatataattttaggctgaacacagtggctcactcctgtaatccccacattttgggaagccaaggtgggaggatcctttgagcccaggagtttgagacaaggctggagaacaaaacaacaagactcatctctacaaaaagtaaaaaaaaaaattgccaggcatggtggcatgcacctgtagtcccagttactcgggaagctgaggcaagaggatc

SEQ ID NO: 98841 - DNA, 370 bp, Homo sapiens
gcacctgacatacacctcgtcacttagtcctcacagcagcccctgtggctatcaggacacagagaagttgctacaaaacacacacacagaggccgggcacagtggcttatgcctataattccagaactttgggatgccaaggcaggtggatcacctgaggtcggcagtttgagaccagcctgaccaacatggagaaaccccatctctactaaaaatacaaaattagccgggcttggtggcacatgcctgtaatcccagctactcaggaggctgaggcaggagaatcgcttgaacccaggaggagaggttgcggtgagctgaggtcacgccattgcactgcagcctgggtgacagagcgaaactccatctc

SEQ ID NO: 98842 - DNA, 494 bp, Homo sapiens
gccagaagcccaattgtcattctctctctctctctccctctccctctcttcctccctccctccctccctctccaagatatccagtaactgattgatcagctggcggtgggctctgctggctgccagggtgggccaccagcaaaaagggaaaattggttgtgagtgagaagaagagataagaaagtccacagggctgataagaaagaccatgggcttccaggtgcggtggttcacgcctgtaatcccagcactttgggaagccaggatggccggatcacgaggtcaggagatcgagaccatcctggctcacacggtgaaagcccatctctactaaaaatacaaaaattagctgggtgtggtggcgggtcctgtggccccggctaattgggaggctgaggtgggagcatggcgttaaccccgggaggtgcagcttgcagtgagctgagattgcaccactgcactccagcctgggcgacagagcgagactccgtctc

SEQ ID NO: 98843 - DNA, 440 bp, Homo sapiens
gagccccagggtcccggggagactaaagctggggtctatttctattcccccaaccaagacgggagcttcacatccccacacactgagaggccagaatgggtcagaccagagtgagtgtgctctggctaagactggccgacagctctgttcccctggggtggggactggacgtggccctttggtttaactgcattttactctttccagcctgtctggccattattcttgcaggagcacgcaggactaaagtccccttcctcagcaccacgcatgtcccatctcaccctgtgtcttccaacttcacttgccataaatcagttgtcaggacccccgaccctaaaacagtcacctaatgataaatcatgtttaattctaatggaaccctcccgccaagactactcatcagagaggaagctaattcgcagggatatgaagagctt

SEQ ID NO: 98844 - DNA, 872 bp, Homo sapiens
aagctagttagtggtggaagaactgaggtcagtctcccactttgtagcacagagctaattcataagagccctctgaaagtgagttggggtcatcaggaaactggttgcccaggagagccgtgatgggagaagataccagcctgaatttaaagcaattccatatttggttatgatgtcattttccctgtctctgtctctctcttttgacctggaggcatgaaagattcaaggcagaaactgaaatttaaattgagaaggcgaagaaaggcaacatctcacctccttaataagttataagtagatagtgaggcctgtgctagagtaatgaatggccaagcagaatctgccaacaagggttttcagtacaaagccaccctgaaaccagactttccgtttgcccggaactggcaattttgatgccttgggcaagttgcagtacacgggccctcggtcaactttgtgctccggatttggcacacagaggggtgttactaacaatgtacaccatctgctagcttcccgttttaactaattattcttgttaactaggtgctaagctcagttgtttctagacagttgaaggaatgctgggctgtcaatgtgtaaatctaacaaaatttacagtcacataatcttttaaaaccagtattaatactttcttgcaccctttaaattttggtatcctggcacaaagccaagtcacctgccttggctctgtgtaagtctcaccaatggacttgttactagggaggtgcagagtaagttaataagtgatgtgcgccgtgctcagtacacatgtgtttgggctgggaggagacaatggattgctctagaatcacctggagacattttctactctgctgtatacccca

SEQ ID NO: 98845 - DNA, 309 bp, Homo sapiens
tctcacattactacaaagaactacctgagactgggtagtttataaagaaaagaggtttaactgactcagtttgacaggctgaacaggaagcatggctggggaggcctcaggaaacttacaatcatgcaggaaggtgaaggggaagcaggcaaaatcttcacatggagagaggagagagagaaggggggagtgctacccagctttaaataaccagatcttgtgggaactcactcactatcatgagaactgcaagagggaaatttgcccccatgatccagtcacctccaccaggtccctcccccaacactg

SEQ ID NO: 98846 - DNA, 570 bp, Homo sapiens
ctgacctctggccgctattcgaagggaagggagccccctataaaacagcctacagtggacagtctggtcggcagagccgcaggtcagtcgtgaagagggagctctattgccaccatgagtttctccggcaagtaccaactgcagagccaggaaaactttgaagccttcatgaaggcaatcggtctgccggaagagctcatccagaaggggaaggatatcaagggggtgtcggaaatcgtgcagaatgggaagcacttcaagttcaccatcaccgctgggtccaaagtgatccaaaacgaattcacggtgggggaggaatgtgagctggagacaatgacaggggagaaagtcaagacagtggttcagttggaaggtgacaataaactggtgacaactttcaaaaacatcaagtctgtgaccgaactcaacggcgacataatcaccaataccatgacattgggtgacattgtcttcaagagaatcagcaagagaatttaaacaagtctgcatttcatattattttagtgtgtaaaattaatgtaataaagtgaactttgttttaaaaaaaaa

SEQ ID NO: 98847 - DNA, 1072 bp, Homo sapiens
ccctgactcttctttgcccccagaatatgctttagggagtcacagacaacagaacactgcctcagggcgctgtcatcactctattcaaatggaaaaattcttaaactagagagagtgtgagcatcaaccacccaatgtgcagtttccacctccgccccagcacattcccaggagagcaggggagcaggagatgagctgtcctgcagtaagtcctggccaacgccctttgataggttccatctcacctaatcctcctgtctccttcgagggaggctggatgagggattcaatagacaggttgacctgtccaagtcatcagctaataaatgttaaatccagggctcaaacccatcaagcagcaactattgcattgctgctgaaactgaggggctccttttcaccctgatgacatggtatgtcattccagcagtcttattcaagagaactggcaggggtggaggaaacatccttaaaaactcaaaagctgatgcatccactgtttttatatgcttcacagctataggaggacaattatgcactacccactgccttccaggctgtgtgcctagttgtgtccatgtacatgtatccttggtgctcaacatgtatttggtgcatagtaggtactcaatgaaattttgagaaattagattgggctggtttggatggtcttgctataacagtcattgatgtagaaaagaattcagtcaaaggcaggaggactttccaggtgaggaggagaagtgacaaagacttggcataggattttggaaaacattgccaacctttcctccggtcctacaggaaaccagacgaatttttgaattgtttcatatgccaacatatttggtgctgttttttaagcttaattttgttttttatgcttaattttgttttttacaatacaacatcagatgaacacttcataatttcttttctggctttcagaaccatgacattgggtgacattgtcttcaagagaatcagcaagagaatttaaacaagtctgcatttcatattattttagtgtgtaaaattaatgtaataaagtgaactttgttttaaaaaaaaa

SEQ ID NO: 98848 - DNA, 878 bp, Homo sapiens
  misc_feature (608)..(608): n is a, c, g, or t
ctgacctctggccgctattcgaagggaagggagccccctataaaacagcctacagtggacagtctggtcggcagagccgcaggtcagtcgtgaagagggagctctattgccaccatgagtttctccggcaagtaccaactgcagagccaggaaaactttgaagccttcatgaaggcaatcggtctgccggaagagctcatccagaaggggaaggatatcaagggggtgtcggaaatcgtgcagaatgggaagcacttcaagttcaccatcaccgctgggtccaaagtgatccaaaacgaattcacggtgggggaggaatgtgagctggagacaatgacaggggagaaagtcaagacagtggttcagttggaaggtgacaataaactggtgacaactttcaaaaacatcaagtctgtgaccgaactcaacggcgacataatcaccaataccatgacattgggtgacattgtcttcaagagaatcagcaagagaatttaaacaagtctgcatttcatattattttagtgtgtaaaattaatgtaataaagtgaactttgttttaaaaaaaaaaaaacgaaaaaaaaaaaaaaaaaaaaaaaaaaaaaaancccccggggtttttttttttttttttaaaaaataaattttttgggttgccaaatttttaaaaaaaatttttgaaaacgggtaaaaaaaaaaaaaaaaaaaagttggcaaaaccgggaaaataaacctatatggcaaaatttcccttttgccccaaaaaaagtttttttttttttttttgcaaaaagttcgccttaaaccggttaaagggttttttgtttggcccccaaacccgtttttaaatgaaaagcccggtcttttggcattgaaaa

SEQ ID NO: 98849 - DNA, 691 bp, Homo sapiens
ctgacctctggccgctattcgaagggaagggagccccctataaaacagcctacagtggacagtctggtcggcagagccgcaggtcagtcgtgaagagggagctctattgccaccatgagtttctccggcaagtaccaactgcagagccaggaaaactttgaagccttcatgaaggcaatcggtctgccggaagagctcatccagaaggggaaggatatcaagggggtgtcggaaatcgtgcagaatgggaagcacttcaagttcaccatcaccgctgggtccaaagtgatccaaaacgaattcacggtgggggaggaatgtgagctggagacaatgacaggggagaaagtcaagacagtggttcagttggaaggtgacaataaactggtgacaactttcaaaaacatcaagtctgtgaccgaactcaacggcgacataatcaccaataccatgacattgggtgacattgtcttcaagagaatcagcaagagaatttaaacaagtctgcatttcatattattttagtgtgtaaaattaatgtaataaagtgaactttgttttaaaaaaaaatgccccggaaccccctttcttgcggagagagaaggtgttttttaactcgggggggggcccgggccccaattggcccattgtgagtcggattcctaccgtgcccgggtttgcgtctgcctgg

SEQ ID NO: 98850 - DNA, 746 bp, Homo sapiens
  misc_feature (564)..(564): n is a, c, g, or t
  misc_feature (609)..(609): n is a, c, g, or t
  misc_feature (623)..(623): n is a, c, g, or t
  misc_feature (731)..(731): n is a, c, g, or t
ctgacctctggccgctattcgaagggaagggagccccctataaaacagcctacagtggacagtctggtcggcagagccgcaggtcagtcgtgaagagggagctctattgccaccatgagtttctccggcaagtaccaactgcagagccaggaaaactttgaagccttcatgaaggcaatcggtctgccggaagagctcatccagaaggggaaggatatcaagggggtgtcggaaatcgtgcagaatgggaagcacttcaagttcaccatcaccgctgggtccaaagtgatccaaaacgaattcacggtgggggaggaatgtgagctggagacaatgacaggggagaaagtcaagacagtggttcagttggaaggtgacaataaactggtgacaactttcaaaaacatcaagtctgtgaccgaactcaacggcgacataatcaccaataccatgacattgggtgacattgtcttcaagagaatcagcaagagaatttaaacaagtctgcatttcatattattttagtgtgtaaaattactcgtgccgaattcggcacgagcctgngtctgctgctgcctcaaggtgtcctgaccttgaggctgatgaggngacccctgcctgtntcccccatactgagttctagggaggtgctcaccccagactcttaggaagggtctagagaaatgagaggagcccaaagccaggggccagcttcgagaaagggtaacctncacgcttctctctcc

SEQ ID NO: 98851 - DNA, 602 bp, Homo sapiens
ctgacctctggccgctattcgaagggaagggagccccctataaaacagcctacagtggacagtctggtcggcagagccgcaggtcagtcgtgaagagggagctctattgccaccatgagtttctccggcaagtaccaactgcagagccaggaaaactttgaagccttcatgaaggcaatcggtctgccggaagagctcatccagaaggggaaggatatcaagggggtgtcggaaatcgtgcagaatgggaagcacttcaagttcaccatcaccgctgggtccaaagtgatccaaaacgaattcacggtgggggaggaatgtgagctggagacaatgacaggggagaaagtcaagacagtggttcagttggaaggtgacaataaactggtgacaactttcaaaaacatcaagtctgtgaccgaactcaacggcgacataatcaccaataccatgacattgggtgacattgtcttcaagagaatcagcaagagaatttaaacaagtctgcatttcatattattttagtgtgtaaaattaatgtaataaagtgaactttgttttaaaaaaaaaatgatagttggcctttccctactgatgaaaaa

SEQ ID NO: 98852 - DNA, 543 bp, Homo sapiens
ctgacctctggccgctattcgaagggaagggagccccctataaaacagcctacagtggacagtctggtcggcagagccgcaggtcagtcgtgaagagggagctctattgccaccatgagtttctccggcaagtaccaactgcagagccaggaaaactttgaagccttcatgaaggcaatcggtctgccggaagagctcatccagaaggggaaggatatcaagggggtgtcggaaatcgtgcagaatgggaagcacttcaagttcaccatcaccgctgggtccaaagtgatccaaaacgaattcacggtgggggaggaatgtgagctggagacaatgacaggggagaaagtcaagacagtggttcagttggaaggtgacaataaactggtgacaactttcaaaaacatcaagtctgtgaccgaactcaacggcgacataatcaccaataccatgacattgggtgacattgtcttcaagagaatcagcgtcacccaatgtcatggtattggtgattatgtcttcaagagaatcagcaagagaatt

SEQ ID NO: 98853 - DNA, 684 bp, Homo sapiens
tctaaatcaagtggatccccggctgacagaaattcggcacagtcttattcaagagaactggcaggggtggaggaaacatccttaaaaactcaaaagctgatgcatccactgtttttatatgcttcacagctataggaggacaattatgcactacccactgccttccaggctgtgtgcctagttgtgtccatgtacatgtatccttggtgctcaacatgtatttggtgcatagtaggtactcaatgaaattttgagaaattagattgggctggtttggatggtcttgctataacagtcattgatgtagaaaagaattcagtcaaaggcaggaggactttccaggtgaggaggagaagtgacaaagacttggcataggattttggaaaacattgccaacctttcctccggtcctacaggaaaccagacgaatttttgaattgtttcatatgccaacatatttggtgctgttttttaagcttaattttgttttttatgcttaattttgttttttacaatacaacatcagatgaacacttcataatttcttttctggctttcagaaccatgacattgggtgacattgtcttcaagagaatcagcaagagaatttaaacaagtctgcatttcatattattttagtgtgtaaaattaatgtaataaagtgaactttgttttaaaaaaaaa

SEQ ID NO: 98854 - DNA, 454 bp, Homo sapiens
  misc_feature (7)..(7): n is a, c, g, or t
  misc_feature (64)..(64): n is a, c, g, or t
  misc_feature (90)..(90): n is a, c, g, or t
  misc_feature (119)..(119): n is a, c, g, or t
  misc_feature (159)..(159): n is a, c, g, or t
  misc_feature (166)..(166): n is a, c, g, or t
gatcgantgactcgaggactccgagcccaagtagatgacctgactgaagctgtggctgcaaagnattcccagctggctgtactgaaagtnagactccaggaagctgaccagctactgantactcgcacagaagcattagaagccttacagagtgaaaantcacgantaatgcatccaaaacgaattcacggtgggggaggaatgtgagctggagacaatgacaggggagaaagtcaagacagtggttcagttggaaggtgacaataaactggtgacaactttcaaaaacatcaagtctgtgaccgaactcaacggcgacataatcaccaataccatgacattgggtgacattgtcttcaagagaatcagcaagagaatttaaacaagtctgcatttcatattattttagtgtgtaaaattaatgtaataaagtgaactttgttttaaaaaaaaa

SEQ ID NO: 98855 - DNA, 1091 bp, Homo sapiens
ctgacctctggccgctattcgaagggaagggagccccctataaaacagcctacagtggacagtctggtcggcagagccgcaggtcagtcgtgaagagggagctctattgccaccatgagtttctccggcaagtaccaactgcagagccaggaaaactttgaagccttcatgaaggcaatcggagggacctagcttggaagatcaactctctggtcaccaggggtatggggaatgaaatgctcacactccaagagcaaagtcatcaaaggaggagggaatgaggaaggagagtgagcaagaaccagggtgcttacaagaggaacggttcttcaggccagaagagtgtcctttttataaattgactggcaagatagcagcaggccaggccaggtcactgtcccttcctttctgaggccacagccgatgctgctgacaagcccccagtctgccggaagagctcatccagaaggggaaggatatcaagggggtgtcggaaatcgtgcagaatgggaagcacttcaagttcaccatcaccgctgggtccaaagtgatccaaaacgaattcacggtgggggaggaatgtgagctggagacaatgacaggggagaaagtcaagacagtggttcagttggaaggtgacaataaactggtgacaactttcaaaaacatcaagtctgtgaccgaactcaacggcgacataatcaccaattgtaagttggtggtgctctgagcgtgtggctcccagtgcttgaggggagaggggaggtgaagcatggggagcggctcacataccctaatgccacccctccaccctccaacccccaaacttctttcctgtggtcagtatctgccagcacttactgaggatccatcatgtcccaggcagtttacacacattatcactaaccctttctgctcagcgcaaccaaccagccacagaggcctccacctgccctgcatgcccagggtgcttcataaatgcctttgcccatttagcgtttataaagagaatcccattcatggtcatattatggcagcttacaagcctggcacagtccagttatgcagtcagccttggtgcctggctgcca

SEQ ID NO: 98856 - DNA, 195 bp, Homo sapiens
  misc_feature (74)..(74): n is a, c, g, or t
ttcggcacagctaaaagattttttgaagcagagatgtttataattaaatgataaaatgttgccaaattggactntgggaaaaaagctaaaatagcattttacaatgatataaagagaatttaaacaagtctgcatttcatattattttagtgtgtaaaattaatgtaataaagtgaactttgttttaaaaaaaaa

SEQ ID NO: 98857 - DNA, 832 bp, Homo sapiens
  misc_feature (562)..(562): n is a, c, g, or t
ctgacctctggccgctattcgaagggaagggagccccctataaaacagcctacagtggacagtctggtcggcagagccgcaggtcagtcgtgaagagggagctctattgccaccatgagtttctccggcaagtaccaactgcagagccaggaaaactttgaagccttcatgaaggcaatcggtctgccggaagagctcatccagaaggggaaggatatcaagggggtgtcggaaatcgtgcagaatgggaagcacttcaagttcaccatcaccgctgggtccaaagtgatccaaaacgaattcacggtgggggaggaatgtgagctggagacaatgacaggggagaaagtcaagacagtggttcagttggaaggtgacaataaactggtgacaactttcaaaccatgacattgggtgacattgtcttcaagagaatcagcaagagaatttaaacaagtctgcatttcatattattttagtgtgtaaaattaatgtaataaagtgaactttgttttaaaaaaaaaaaaacgaaaaaaaaaaaaaaaaaaaaaaaaaaaaaaancccccggggtttttttttttttttttaaaaaataaattttttgggttgccaaatttttaaaaaaaatttttgaaaacgggtaaaaaaaaaaaaaaaaaaaagttggcaaaaccgggaaaataaacctatatggcaaaatttcccttttgccccaaaaaaagtttttttttttttttttgcaaaaagttcgccttaaaccggttaaagggttttttgtttggcccccaaacccgtttttaaatgaaaagcccggtcttttggcattgaaaa

SEQ ID NO: 98858 - DNA, 727 bp, Homo sapiens
  misc_feature (658)..(658): n is a, c, g, or t
  misc_feature (668)..(668): n is a, c, g, or t
  misc_feature (721)..(721): n is a, c, g, or t
ctgacctctggccgctattcgaagggaagggagccccctataaaacagcctacagtggacagtctggtcggcagagccgcaggtcagtcgtgaagagggagctctattgccaccatgagtttctccggcaagtaccaactgcagagccaggaaaactttgaagccttcatgaaggcaatcggtctgccggaagagctcatccagaaggggaaggatatcaagggggtgtcggaaatcgtgcagaatgggaagcacttcaagttcaccatcaccgctgggtccaaagtgatccaaaacgaattcacggtgggggaggaatgtgagctggagacaatgacaggggagaaagtcaagacagtggttcagttggaaggtgacaataaactggtgacaactttcaaaaacatcaagtctgtgaccgaactcaacggcgacataatcaccaataccatgacattgggtgacattgtcttcaagagaatcagcaagagaatttaaacaagtctgcatttcatattattttagtgtgtaaaattaatgtaataaagtgaactttgttttaaaaaaaaagttatcaataagctcctagtccagacgccatgggtcatttcacagaggaggacaaggctactatcacaagcctgtggggcaaggtgantgtgggaagntgctgggagggagaaaaccctggggaaggcttcctgggtttgttcttaccccntgggac

SEQ ID NO: 98859 - DNA, 1442 bp, Homo sapiens
ctgacctctggccgctattcgaagggaagggagccccctataaaacagcctacagtggacagtctggtcggcagagccgcaggtcagtcgtgaagagggagctctattgccaccatgagtttctccggcaagtaccaactgcagagccaggaaaactttgaagccttcatgaaggcaatcggtctgccggaagagctcatccagaaggggaaggatatcaagggggtgtcggaaatcgtgcagaatgggaagcacttcaagttcaccatcaccgctgggtccaaagtgatccaaaacgaattcacggtgggggaggaatgtgagctggagacaatgacaggggagaaagtcaagacagtggttcagttggaaggtgacaataaactggtgacaactttcaaaaacatcaagtctgtgaccgaactcaacggcgacataatcaccaattgtaagttggtggtgctctgagcgtgtggctcccagtgcttgaggggagaggggaggtgaagcatggggagcggctcacataccctaatgccacccctccaccctccaacccccaaacttctttcctgtggtcagtatctgccagcacttactgaggatccatcatgtcccaggcagtttacacacattatcactaaccctttctgctcagcgcaaccaaccagccacagaggcctccacctgccctgcatgcccagggtgcttcataaatgcctttgcccatttagcgtttataaagagaatcccattcatggtcatattatggcagcttacaagcctggcacagtccacagtcttattcaagagaactggcaggggtggaggaaacatccttaaaaactcaaaagctgatgcatccactgtttttatatgcttcacagctataggaggacaattatgcactacccactgccttccaggctgtgtgcctagttgtgtccatgtacatgtatccttggtgctcaacatgtatttggtgcatagtaggtactcaatgaaattttgagaaattagattgggctggtttggatggtcttgctataacagtcattgatgtagaaaagaattcagtcaaaggcaggaggactttccaggtgaggaggagaagtgacaaagacttggcataggattttggaaaacattgccaacctttcctccggtcctacaggaaaccagacgaatttttgaattgtttcatatgccaacatatttggtgctgttttttaagcttaattttgttttttatgcttaattttgttttttacaatacaacatcagatgaacacttcataatttcttttctggctttcagaaccatgacattgggtgacattgtcttcaagagaatcagcaagagaatttaaacaagtctgcatttcatattattttagtgtgtaaaattaatgtaataaagtgaactttgttttaaaaaaaaa

SEQ ID NO: 98860 - DNA, 3098 bp, Homo sapiens
ctgacctctggccgctattcgaagggaagggagccccctataaaacagcctacagtggacagtctggtcggcagagccgcaggtcagtcgtgaagagggagctctattgccaccatgagtttctccggcaagtaccaactgcagagccaggaaaactttgaagccttcatgaaggcaatcggagggacctagcttggaagatcaactctctggtcaccaggggtatggggaatgaaatgctcacactccaagagcaaagtcatcaaaggaggagggaatgaggaaggagagtgagcaagaaccagggtgcttacaagaggaacggttcttcaggccagaagagtgtcctttttataaattgactggcaagatagcagcaggccaggccaggtcactgtcccttcctttctgaggccacagccgatgctgctgacaagcccccagtgagtttctgtggccccttgggagacacagtgcccttctctgtccctccatgtcatgtcgtttctctcacctacctaccacggtcatgaaactcccacctctgcccatatctaaacctcagacggtttccaccaggtctgccggaagagctcatccagaaggggaaggatatcaagggggtgtcggaaatcgtgcagaatgggaagcacttcaagttcaccatcaccgctgggtccaaagtgatccaaaacgaattcacggtgggggaggaatgtgagctggagacaatgacaggggagaaagtcaagggtaggagggcatcccttctgctgtcagaactttccttggaacctggccctgggacctcattcctcaaggctcaaacctcacaattccacccacagataccatctctgaacccacctcccatgtgggagaagcagagagacaaaggcagctcttagggaagaatcttatagagaagctgctctcctcttcccagggactgtctggggggtgttccagcccctaaagtctgagctctcccatatggaggatatgggagaaccaggcatacagcaggattctaagtctcaggttctcccaggcccagtgctcctagcactaagagtcctctaagcagggcccaggagtggggcaagtgtggaagctgtgtggtgatagggagagacttcttgaaggaggtgctagcaataccagaataccagggccccagacaggtgctcagaccctgccttcaggggtggtcacaaagtctctggcttcagccaccccatctgtaaaataagaacagtcaacctccctagactgaaggcagtgcagggcagcatcacttctgctgggcacaactcatggtgtgcaatgacagctggggtgtgggctgtgtgagtggttggcagatggtggcagggggatcctggcaatgggggtgcccgtctcctcctccctctgaaacactccatgctctagcagccctcttctctcctccccgtggacagctctgttcattgggctgggcgtgtttgctttttatctcttctggtcactctttatttctgcctctccaattagaacattacaggtcaggatgattttaggaggataatattcttgatgtgctcatggtcaagggatttaactatgggccttttccaaattttctttttggaggcaacatagcaagacctcatctcaattaaaaaaaaaaaaaaagaagaatacataccaaagcaaaatatgtattctctactggtcaatatttgaattttgccactacctccctccattagcttgggagaattgagattttacttgatttgattttagcatttgtatttggggccacttaggtgttccatgctcatttctagatcacatgccatgaattaaagttctgacaaccagagaactagaggcttgggatcataggaaccagagcattttggttgttatgagctgagacctgtgcaaaggaagcaacttcattagcaaggctcttgccccccaccaccccttcctcacaggtcacctctctgttccctgcagacagtggttcagttggaaggtgacaataaactggtgacaactttcaaaaacatcaagtctgtgaccgaactcaacggcgacataatcaccaattgtaagttggtggtgctctgagcgtgtggctcccagtgcttgaggggagaggggaggtgaagcatggggagcggctcacataccctaatgccacccctccaccctccaacccccaaacttctttcctgtggtcagtatctgccagcacttactgaggatccatcatgtcccaggcagtttacacacattatcactaaccctttctgctcagcgcaaccaaccagccacagaggcctccacctgccctgcatgcccagggtgcttcataaatgcctttgcccatttagcgtttataaagagaatcccattcatggtcatattatggcagcttacaagcctggcacagtccacagtcttattcaagagaactggcaggggtggaggaaacatccttaaaaactcaaaagctgatgcatccactgtttttatatgcttcacagctataggaggacaattatgcactacccactgccttccaggctgtgtgcctagttgtgtccatgtacatgtatccttggtgctcaacatgtatttggtgcatagtaggtactcaatgaaattttgagaaattagattgggctggtttggatggtcttgctataacagtcattgatgtagaaaagaattcagtcaaaggcaggaggactttccaggtgaggaggagaagtgacaaagacttggcataggattttggaaaacattgccaacctttcctccggtcctacaggaaaccagacgaatttttgaattgtttcatatgccaacatatttggtgctgttttttaagcttaattttgttttttatgcttaattttgttttttacaatacaacatcagatgaacacttcataatttcttttctggctttcagaaccatgacattgggtgacattgtcttcaagagaatcagcaagagaatttaaacaagtctgcatttcatattattttagtgtgtaaaattaatgtaataaagtgaactttgttttaaaaaaaaa

SEQ ID NO: 98861 - DNA, 3152 bp, Homo sapiens
ctgacctctggccgctattcgaagggaagggagccccctataaaacagcctacagtggacagtctggtcggcagagccgcaggtcagtcgtgaagagggagctctattgccaccatgagtttctccggcaagtaccaactgcagagccaggaaaactttgaagccttcatgaaggcaatcggagggacctagcttggaagatcaactctctggtcaccaggggtatggggaatgaaatgctcacactccaagagcaaagtcatcaaaggaggagggaatgaggaaggagagtgagcaagaaccagggtgcttacaagaggaacggttcttcaggccagaagagtgtcctttttataaattgactggcaagatagcagcaggccaggccaggtcactgtcccttcctttctgaggccacagccgatgctgctgacaagcccccagtgagtttctgtggccccttgggagacacagtgcccttctctgtccctccatgtcatgtcgtttctctcacctacctaccacggtcatgaaactcccacctctgcccatatctaaacctcagacggtttccaccaggtctgccggaagagctcatccagaaggggaaggatatcaagggggtgtcggaaatcgtgcagaatgggaagcacttcaagttcaccatcaccgctgggtccaaagtgatccaaaacgaattcacggtgggggaggaatgtgagctggagacaatgacaggggagaaagtcaagggtaggagggcatcccttctgctgtcagaactttccttggaacctggccctgggacctcattcctcaaggctcaaacctcacaattccacccacagataccatctctgaacccacctcccatgtgggagaagcagagagacaaaggcagctcttagggaagaatcttatagagaagctgctctcctcttcccagggactgtctggggggtgttccagcccctaaagtctgagctctcccatatggaggatatgggagaaccaggcatacagcaggattctaagtctcaggttctcccaggcccagtgctcctagcactaagagtcctctaagcagggcccaggagtggggcaagtgtggaagctgtgtggtgatagggagagacttcttgaaggaggtgctagcaataccagaataccagggccccagacaggtgctcagaccctgccttcaggggtggtcacaaagtctctggcttcagccaccccatctgtaaaataagaacagtcaacctccctagactgaaggcagtgcagggcagcatcacttctgctgggcacaactcatggtgtgcaatgacagctggggtgtgggctgtgtgagtggttggcagatggtggcagggggatcctggcaatgggggtgcccgtctcctcctccctctgaaacactccatgctctagcagccctcttctctcctccccgtggacagctctgttcattgggctgggcgtgtttgctttttatctcttctggtcactctttatttctgcctctccaattagaacattacaggtcaggatgattttaggaggataatattcttgatgtgctcatggtcaagggatttaactatgggccttttccaaattttctttttggaggcaacatagcaagacctcatctcaattaaaaaaaaaaaaaaagaagaatacataccaaagcaaaatatgtattctctactggtcaatatttgaattttgccactacctccctccattagcttgggagaattgagattttacttgatttgattttagcatttgtatttggggccacttaggtgttccatgctcatttctagatcacatgccatgaattaaagttctgacaaaagaagtcgtgacattttatttagttcttaaatgcacctcacttctatttggagccagagaactagaggcttgggatcataggaaccagagcattttggttgttatgagctgagacctgtgcaaaggaagcaacttcattagcaaggctcttgccccccaccaccccttcctcacaggtcacctctctgttccctgcagacagtggttcagttggaaggtgacaataaactggtgacaactttcaaaaacatcaagtctgtgaccgaactcaacggcgacataatcaccaattgtaagttggtggtgctctgagcgtgtggctcccagtgcttgaggggagaggggaggtgaagcatggggagcggctcacataccctaatgccacccctccaccctccaacccccaaacttctttcctgtggtcagtatctgccagcacttactgaggatccatcatgtcccaggcagtttacacacattatcactaaccctttctgctcagcgcaaccaaccagccacagaggcctccacctgccctgcatgcccagggtgcttcataaatgcctttgcccatttagcgtttataaagagaatcccattcatggtcatattatggcagcttacaagcctggcacagtccacagtcttattcaagagaactggcaggggtggaggaaacatccttaaaaactcaaaagctgatgcatccactgtttttatatgcttcacagctataggaggacaattatgcactacccactgccttccaggctgtgtgcctagttgtgtccatgtacatgtatccttggtgctcaacatgtatttggtgcatagtaggtactcaatgaaattttgagaaattagattgggctggtttggatggtcttgctataacagtcattgatgtagaaaagaattcagtcaaaggcaggaggactttccaggtgaggaggagaagtgacaaagacttggcataggattttggaaaacattgccaacctttcctccggtcctacaggaaaccagacgaatttttgaattgtttcatatgccaacatatttggtgctgttttttaagcttaattttgttttttatgcttaattttgttttttacaatacaacatcagatgaacacttcataatttcttttctggctttcagaaccatgacattgggtgacattgtcttcaagagaatcagcaagagaatttaaacaagtctgcatttcatattattttagtgtgtaaaattaatgtaataaagtgaactttgttttaaaaaaaaa

SEQ ID NO: 98862 - DNA, 2701 bp, Homo sapiens
ctgacctctggccgctattcgaagggaagggagccccctataaaacagcctacagtggacagtctggtcggcagagccgcaggtcagtcgtgaagagggagctctattgccaccatgagtttctccggcaagtaccaactgcagagccaggaaaactttgaagccttcatgaaggcaatcggtctgccggaagagctcatccagaaggggaaggatatcaagggggtgtcggaaatcgtgcagaatgggaagcacttcaagttcaccatcaccgctgggtccaaagtgatccaaaacgaattcacggtgggggaggaatgtgagctggagacaatgacaggggagaaagtcaagggtaggagggcatcccttctgctgtcagaactttccttggaacctggccctgggacctcattcctcaaggctcaaacctcacaattccacccacagataccatctctgaacccacctcccatgtgggagaagcagagagacaaaggcagctcttagggaagaatcttatagagaagctgctctcctcttcccagggactgtctggggggtgttccagcccctaaagtctgagctctcccatatggaggatatgggagaaccaggcatacagcaggattctaagtctcaggttctcccaggcccagtgctcctagcactaagagtcctctaagcagggcccaggagtggggcaagtgtggagtttgtgaaaaacccttaactgagcccaaagtcaactggccttcactgaacctagagctgtgtggtgatagggagagacttcttgaaggaggtgctagcaataccagaataccagggccccagacaggtgctcagaccctgccttcaggggtggtcacaaagtctctggcttcagccaccccatctgttctgctgggcacaactcatggtgtgcaatgacagctggggtgtgggctgtgtgagtggttggcagatggtggcagggggatcctggcaatgggggtgcccgtctcctcctccctctgaaacactccatgctctagcagccctcttctctcctccccgtggacagctctgttcattgggctgggcgtgtttgctttttatctcttctggtcactctttatttctgcctctccaattagaacattacaggtcaggatgattttaggaggataatattcttgatgtgctcatggtcaagggatttaactatgggccttttccaaattttctttttggaggcaacatagcaagacctcatctcaattaaaaaaaaaaaaaaagaagaatacataccaaagcaaaatatgtattctctactggtcaatatttgaattttgccactacctccctccattagcttgggagaattgagattttacttgatttgattttagcatttgtatttggggccacttaggtgttccatgctcatttctagatcacatgccatgaattaaagttctgacaaccagagaactagaggcttgggatcataggaaccagagcattttggttgttatgagctgagacctgtgcaaaggaagcaacttcattagcaaggctcttgccccccaccaccccttcctcacaggtcacctctctgttccctgcagacagtggttcagttggaaggtgacaataaactggtgacaactttcaaaaacatcaagtctgtgaccgaactcaacggcgacataatcaccaattgtaagttggtggtgctctgagcgtgtggctcccagtgcttgaggggagaggggaggtgaagcatggggagcggctcacataccctaatgccacccctccaccctccaacccccaaacttctttcctgtggtcagtatctgccagcacttactgaggatccatcatgtcccaggcagtttacacacattatcactaaccctttctgctcagcgcaaccaaccagccacagaggcctccacctgccctgcatgcccagggtgcttcataaatgcctttgcccatttagcgtttataaagagaatcccattcatggtcatattatggcagcttacaagcctggcacagtccacagtcttattcaagagaactggcaggggtggaggaaacatccttaaaaactcaaaagctgatgcatccactgtttttatatgcttcacagctataggaggacaattatgcactacccactgccttccaggctgtgtgcctagttgtgtccatgtacatgtatccttggtgctcaacatgtatttggtgcatagtaggtactcaatgaaattttgagaaattagattgggctggtttggatggtcttgctataacagtcattgatgtagaaaagaattcagtcaaaggcaggaggactttccaggtgaggaggagaagtgacaaagacttggcataggattttggaaaacattgccaacctttcctccggtcctacaggaaaccagacgaatttttgaattgtttcatatgccaacatatttggtgctgttttttaagcttaattttgttttttatgcttaattttgttttttacaatacaacatcagatgaacacttcataatttcttttctggctttcagaaccatgacattgggtgacattgtcttcaagagaatcagcaagagaatttaaacaagtctgcatttcatattattttagtgtgtaaaattaatgtaataaagtgaactttgttttaaaaaaaaa

SEQ ID NO: 98863 - DNA, 3088 bp, Homo sapiens
ctgacctctggccgctattcgaagggaagggagccccctataaaacagcctacagtggacagtctggtcggcagagccgcaggtcagtcgtgaagagggagctctattgccaccatgagtttctccggcaagtaccaactgcagagccaggaaaactttgaagccttcatgaaggcaatcggagggacctagcttggaagatcaactctctggtcaccaggggtatggggaatgaaatgctcacactccaagagcaaagtcatcaaaggaggagggaatgaggaaggagagtgagcaagaaccagggtgcttacaagaggaacggttcttcaggccagaagagtgtcctttttataaattgactggcaagatagcagcaggccaggccaggtcactgtcccttcctttctgaggccacagccgatgctgctgacaagcccccagtgagtttctgtggccccttgggagacacagtgcccttctctgtccctccatgtcatgtcgtttctctcacctacctaccacggtcatgaaactcccacctctgcccatatctaaacctcagacggtttccaccaggtctgccggaagagctcatccagaaggggaaggatatcaagggggtgtcggaaatcgtgcagaatgggaagcacttcaagttcaccatcaccgctgggtccaaagtgaggtaggagggcatcccttctgctgtcagaactttccttggaacctggccctgggacctcattcctcaaggctcaaacctcacaattccacccacagataccatctctgaacccacctcccatgtgggagaagcagagagacaaaggcagctcttagggaagaatcttatagagaagctgctctcctcttcccagggactgtctggggggtgttccagcccctaaagtctgagctctcccatatggaggatatgggagaaccaggcatacagcaggattctaagtctcaggttctcccaggcccagtgctcctagcactaagagtcctctaagcagggcccaggagtggggcaagtgtggagtttgtgaaaaacccttaactgagcccaaagtcaactggccttcactgaacctagagctgtgtggtgatagggagagacttcttgaaggaggtgctagcaataccagaataccagggccccagacaggtgctcagaccctgccttcaggggtggtcacaaagtctctggcttcagccaccccatctgtaaaataagaacagtcaacctccctagactgaaggcagtgcagggcagcatcacttctgctgggcacaactcatggtgtgcaatgacagctggggtgtgggctgtgtgagtggttggcagatggtggcagggggatcctggcaatgggggtgcccgtctcctcctccctctgaaacactccatgctctagcagccctcttctctcctccccgtggacagctctgttcattgggctgggcgtgtttgctttttatctcttctggtcactctttatttctgcctctccaattagaacattacaggtcaggatgattttaggaggataatattcttgatgtgctcatggtcaagggatttaactatgggccttttccaaattttctttttggaggcaacatagcaagacctcatctcaattaaaaaaaaaaaaaaagaagaatacataccaaagcaaaatatgtattctctactggtcaatatttgaattttgccactacctccctccattagcttgggagaattgagattttacttgatttgattttagcatttgtatttggggccacttaggtgttccatgctcatttctagatcacatgccatgaattaaagttctgacaaccagagaactagaggcttgggatcataggaaccagagcattttggttgttatgagctgagacctgtgcaaaggaagcaacttcattagcaaggctcttgccccccaccaccccttcctcacaggtcacctctctgttccctgcagacagtggttcagttggaaggtgacaataaactggtgacaactttcaaaaacatcaagtctgtgaccgaactcaacggcgacataatcaccaattgtaagttggtggtgctctgagcgtgtggctcccagtgcttgaggggagaggggaggtgaagcatggggagcggctcacataccctaatgccacccctccaccctccaacccccaaacttctttcctgtggtcagtatctgccagcacttactgaggatccatcatgtcccaggcagtttacacacattatcactaaccctttctgctcagcgcaaccaaccagccacagaggcctccacctgccctgcatgcccagggtgcttcataaatgcctttgcccatttagcgtttataaagagaatcccattcatggtcatattatggcagcttacaagcctggcacagtccacagtcttattcaagagaactggcaggggtggaggaaacatccttaaaaactcaaaagctgatgcatccactgtttttatatgcttcacagctataggaggacaattatgcactacccactgccttccaggctgtgtgcctagttgtgtccatgtacatgtatccttggtgctcaacatgtatttggtgcatagtaggtactcaatgaaattttgagaaattagattgggctggtttggatggtcttgctataacagtcattgatgtagaaaagaattcagtcaaaggcaggaggactttccaggtgaggaggagaagtgacaaagacttggcataggattttggaaaacattgccaacctttcctccggtcctacaggaaaccagacgaatttttgaattgtttcatatgccaacatatttggtgctgttttttaagcttaattttgttttttatgcttaattttgttttttacaatacaacatcagatgaacacttcataatttcttttctggctttcagaaccatgacattgggtgacattgtcttcaagagaatcagcaagagaatttaaacaagtctgcatttcatattattttagtgtgtaaaattaatgtaataaagtgaactttgttttaaaaaaaaa

SEQ ID NO: 98864 - DNA, 526 bp, Homo sapiens
ctgacctctggccgctattcgaagggaagggagccccctataaaacagcctacagtggacagtctggtcggcagagccgcaggtcagtcgtgaagagggagctctattgccaccatgagtttctccggcaagtaccaactgcagagccaggaaaactttgaagccttcatgaaggcaatcggtctgccggaagagctcatccagaaggggaaggatatcaagggggtgtcggaaatcgtgcagaatgggaagcacttcaagttcaccatcaccgctgggtccaaagtgatccaaaacgaattcacggtgggggaggaatgtgagctggagacaatgacaggggagaaagtcaagacagtggttcagttggaaggtgacaataaactggtgacaactttcaaaaacatcaagtctgtgaccgaactcaacggcgacataatcaccaattaccatgacattgggtgacttgtcttcagagaatcagcgatgagatgttgaagggcgatgagatgttggaagagccatg

SEQ ID NO: 98865 - DNA, 1645 bp, Homo sapiens
cagtccgtcgaagcttccgaatggttgggactaccgtgctgacgcatgtcaccatgcagctaattttaaaaaattttttgtagagatgggggtcttgccatgtgcctaggagttcaagaccagcctgggcaacatagcaagacctcatctcaattaaaaaaaaaaaaaaagaagaatacataccaaagcaaaatatgtattctctactggtcaatatttgaattttgccactacctccctccattagcttgggagaattgagattttacttgatttgattttagcatttgtatttggggccacttaggtgttccatgctcatttctagatcacatgccatgaattaaagttctgacaaaagaagtcgtgacattttatttagttcttaaatgcacctcacttctatttggagccagagaactagaggcttgggatcataggaaccagagcattttggttgttatgagctgagacctgtgcaaaggaagcaacttcattagcaaggctcttgccccccaccaccccttcctcacaggtcacctctctgttccctgcagacagtggttcagttggaaggtgacaataaactggtgacaactttcaaaaacatcaagtctgtgaccgaactcaacggcgacataatcaccaattgtaagttggtggtgctctgagcgtgtggctcccagtgcttgaggggagaggggaggtgaagcatggggagcggctcacataccctaatgccacccctccaccctccaacccccaaacttctttcctgtggtcagtatctgccagcacttactgaggatccatcatgtcccaggcagtttacacacattatcactaaccctttctgctcagcgcaaccaaccagccacagaggcctccacctgccctgcatgcccagggtgcttcataaatgcctttgcccatttagcgtttataaagagaatcccattcatggtcatattatggcagcttacaagcctggcacagtccacagtcttattcaagagaactggcaggggtggaggaaacatccttaaaaactcaaaagctgatgcatccactgtttttatatgcttcacagctataggaggacaattatgcactacccactgccttccaggctgtgtgcctagttgtgtccatgtacatgtatccttggtgctcaacatgtatttggtgcatagtaggtactcaatgaaattttgagaaattagattgggctggtttggatggtcttgctataacagtcattgatgtagaaaagaattcagtcaaaggcaggaggactttccaggtgaggaggagaagtgacaaagacttggcataggattttggaaaacattgccaacctttcctccggtcctacaggaaaccagacgaatttttgaattgtttcatatgccaacatatttggtgctgttttttaagcttaattttgttttttatgcttaattttgttttttacaatacaacatcagatgaacacttcataatttcttttctggctttcagaaccatgacattgggtgacattgtcttcaagagaatcagcaagagaatttaaacaagtctgcatttcatattattttagtgtgtaaaattaatgtaataaagtgaactttgttttaaaaaaaaa

SEQ ID NO: 98866 - DNA, 2332 bp, Homo sapiens
ctgacctctggccgctattcgaagggaagggagccccctataaaacagcctacagtggacagtctggtcggcagagccgcaggtcagtcgtgaagagggagctctattgccaccatgagtttctccggcaagtaccaactgcagagccaggaaaactttgaagccttcatgaaggcaatcggagggacctagcttggaagatcaactctctggtcaccaggggtatggggaatgaaatgctcacactccaagagcaaagtcatcaaaggaggagggaatgaggaaggagagtgagcaagaaccagggtgcttacaagaggaacggttcttcaggccagaagagtgtcctttttataaattgactggcaagatagcagcaggccaggccaggtcactgtcccttcctttctgaggccacagccgatgctgctgacaagcccccagtgagtttctgtggccccttgggagacacagtgcccttctctgtccctccatgtcatgtcgtttctctcacctacctaccacggtcatgaaactcccacctctgcccatatctaaacctcagacggtttccaccaggtctgccggaagagctcatccagaaggggaaggatatcaagggggtgtcggaaatcgtgcagaatgggaagcacttcaagttcaccatcaccgctgggtccaaagtgatccaaaacgaattcacggtgggggaggaatgtgagctggagacaatgacaggggagaaagtcaagggtaggagggcatcccttctgctgtcagaactttccttggaacctggccctgggacctcattcctcaaggctcaaacctcacaattccacccacagataccatctctgaacccacctcccatgtgggagaagcagagagacaaaggcagctcttagggaagaatcttatagagaagctgctctcctcttcccagggactgtctggggggtgttccagcccctaaagtctgagctctcccatatggaggatatgggagaaccaggcatacagcaggattctaagtctcaggttctcccaggcccagtgctcctagcactaagagtcctctaagcagggcccaggagtggggcaagtgtggaagctgtgtggtgatagggagagacttcttgaaggaggtgctagcaataccagaataccagggccccagacaggtgctcagaccctgccttcaggggtggtcacaaagtctctggcttcagccaccccatctgtaaaataagaacagtcaacctccctagactgaaggcagtgcagggcagcatcacttctgctgggcacaactcatggtgtgcaatgacagctggggtgtgggctgtgtgagtggttggcagatggtggcagggggatcctggcaatgggggtgcccgtctcctcctccctctgaaacactccatgctctagcagccctcttctctcctccccgtggacagctctgttcattgggctgggcgtgtttgctttttatctcttctggtcactctttatttctgcctctccaattagaacattacaggtcaggatgattttaggaggataatattcttgatgtgctcatggtcaagggatttaactatgggccttttccaaattttctttttggaggcaacatagcaagacctcatctcaattaaaaaaaaaaaaaaagaagaatacataccaaagcaaaatatgtattctctactggtcaatatttgaattttgccactacctccctccattagcttgggagaattgagattttacttgatttgattttagcatttgtatttggggccacttaggtgttccatgctcatttctagatcacatgccatgaattaaagttctgacaaccagagaactagaggcttgggatcataggaaccagagcattttggttgttatgagctgagacctgtgcaaaggaagcaacttcattagcaaggctcttgccccccaccaccccttcctcacaggtcacctctctgttccctgcagacagtggttcagttggaaggtgacaataaactggtgacaactttcaaaaacatcaagtctgtgaccgaactcaacggcgacataatcaccaattgtaagttggtggtgctctgagcgtgtggctcccagtgcttgaggggagaggggaggtgaagcatggggagcggctcacataccctaatgccacccctccaccctccaacccccaaacttctttcctgtggtcagtatctgccagcacttactgaggatccatcatgtcccagcactttgggaggctgaagtgaaaggactgtttgagcctaggagttcaagaccagcc

SEQ ID NO: 98867 - DNA, 2233 bp, Homo sapiens
  misc_feature (2233)..(2233): n is a, c, g, or t
ctgacctctggccgctattcgaagggaagggagccccctataaaacagcctacagtggacagtctggtcggcagagccgcaggtcagtcgtgaagagggagctctattgccaccatgagtttctccggcaagtaccaactgcagagccaggaaaactttgaagccttcatgaaggcaatcggagggacctagcttggaagatcaactctctggtcaccaggggtatggggaatgaaatgctcacactccaagagcaaagtcatcaaaggaggagggaatgaggaaggagagtgagcaagaaccagggtgcttacaagaggaacggttcttcaggccagaagagtgtcctttttataaattgactggcaagatagcagcaggccaggccaggtcactgtcccttcctttctgaggccacagccgatgctgctgacaagcccccagtgagtttctgtggccccttgggagacacagtgcccttctctgtccctccatgtcatgtcgtttctctcacctacctaccacggtcatgaaactcccacctctgcccatatctaaacctcagacggtttccaccaggtctgccggaagagctcatccagaaggggaaggatatcaagggggtgtcggaaatcgtgcagaatgggaagcacttcaagttcaccatcaccgctgggtccaaagtgatccaaaacgaattcacggtgggggaggaatgtgagctggagacaatgacaggggagaaagtcaagggtaggagggcatcccttctgctgtcagaactttccttggaacctggccctgggacctcattcctcaaggctcaaacctcacaattccacccacagataccatctctgaacccacctcccatgtgggagaagcagagagacaaaggcagctcttagggaagaatcttatagagaagctgctctcctcttcccagggactgtctggggggtgttccagcccctaaagtctgagctctcccatatggaggatatgggagaaccaggcatacagcaggattctaagtctcaggttctcccaggcccagtgctcctagcactaagagtcctctaagcagggcccaggagtggggcaagtgtggaagctgtgtggtgatagggagagacttcttgaaggaggtgctagcaataccagaataccagggccccagacaggtgctcagaccctgccttcaggggtggtcacaaagtctctggcttcagccaccccatctgtaaaataagaacagtcaacctccctagactgaaggcagtgcagggcagcatcacttctgctgggcacaactcatggtgtgcaatgacagctggggtgtgggctgtgtgagtggttggcagatggtggcagggggatcctggcaatgggggtgcccgtctcctcctccctctgaaacactccatgctctagcagccctcttctctcctccccgtggacagctctgttcattgggctgggcgtgtttgctttttatctcttctggtcactctttatttctgcctctccaattagaacattacaggtcaggatgattttaggaggataatattcttgatgtgctcatggtcaagggatttaactatgggccttttccaaattttctttttggaggcaacatagcaagacctcatctcaattaaaaaaaaaaaaaaagaagaatacataccaaagcaaaatatgtattctctactggtcaatatttgaattttgccactacctccctccattagcttgggagaattgagattttacttgatttgattttagcatttgtatttggggccacttaggtgttccatgctcatttctagatcacatgccatgaattaaagttctgacaaaagaagtcgtgacattttatttagttcttaaatgcacctcacttctatttggagccagagaactagaggcttgggatcataggaaccagagcattttggttgttatgagctgagacctgtgcaaaggaagcaacttcattagcaaggctcttgccccccaccaccccttcctcacaggtcacctctctgttccctgcagacagtggttcagttggaaggtgacaataaactggtgacaactttcaaaaacatcaagtctgtgaccgaactcaacggcgacataatcaccaattgtaagttggtggtgctctgagcgtgtggctcccagtgcttgaggggcactttaaccccaaactttttttctgtgn

SEQ ID NO: 98868 - DNA, 2001 bp, Homo sapiens
ctgacctctggccgctattcgaagggaagggagccccctataaaacagcctacagtggacagtctggtcggcagagccgcaggtcagtcgtgaagagggagctctattgccaccatgagtttctccggcaagtaccaactgcagagccaggaaaactttgaagccttcatgaaggcaatcggagggacctagcttggaagatcaactctctggtcaccaggggtatggggaatgaaatgctcacactccaagagcaaagtcatcaaaggaggagggaatgaggaaggagagtgagcaagaaccagggtgcttacaagaggaacggttcttcaggccagaagagtgtcctttttataaattgactggcaagatagcagcaggccaggccaggtcactgtcccttcctttctgaggccacagccgatgctgctgacaagcccccagtgagtttctgtggccccttgggagacacagtgcccttctctgtccctccatgtcatgtcgtttctctcacctacctaccacggtcatgaaactcccacctctgcccatatctaaacctcagacggtttccaccaggtctgccggaagagctcatccagaaggggaaggatatcaagggggtgtcggaaatcgtgcagaatgggaagcacttcaagttcaccatcaccgctgggtccaaagtgatccaaaacgaattcacggtgggggaggaatgtgagctggagacaatgacaggggagaaagtcaagggtaggagggcatcccttctgctgtcagaactttccttggaacctggccctgggacctcattcctcaaggctcaaacctcacaattccacccacagataccatctctgaacccacctcccatgtgggagaagcagagagacaaaggcagctcttagggaagaatcttatagagaagctgctctcctcttcccagggactgtctggggggtgttccagcccctaaagtctgagctctcccatatggaggatatgggagaaccaggcatacagcaggattctaagtctcaggttctcccaggcccagtgctcctagcactaagagtcctctaagcagggcccaggagtggggcaagtgtggaagctgtgtggtgatagggagagacttcttgaaggaggtgctagcaataccagaataccagggccccagacaggtgctcagaccctgccttcaggggtggtcacaaagtctctggcttcagccaccccatctgtaaaataagaacagtcaacctccctagactgaaggcagtgcagggcagcatcacttctgctgggcacaactcatggtgtgcaatgacagctggggtgtgggctgtgtgagtggttggcagatggtggcagggggatcctggcaatgggggtgcccgtctcctcctccctctgaaacactccatgctctagcagccctcttctctcctccccgtggacagctctgttcattgggctgggcgtgtttgctttttatctcttctggtcactctttatttctgcctctccaattagaacattacaggtcaggatgattttaggaggataatattcttgatgtgctcatggtcaagggatttaactatgggccttttccaaattttctttttggaggcaacatagcaagacctcatctcaattaaaaaaaaaaaaaaagaagaatacataccaaagcaaaatatgtattctctactggtcaatatttgaattttgccactacctccctccattagcttgggagaattgagattttacttgatttgattttagcatttgtatttggggccacttaggtgttccatgctcatttctagatcacatgccatgaattaaagttctgacaaccagagaactagaggcttgggatcataggaaccagagcattttggttgttatgagctgagacctgtgcaaaggaagcaacttcattagcaaggctcttgccccccaccacggacagcacagaggaggtggacagca

SEQ ID NO: 98869 - DNA, 1374 bp, Homo sapiens
  misc_feature (1251)..(1251): n is a, c, g, or t
  misc_feature (1270)..(1270): n is a, c, g, or t
  misc_feature (1322)..(1322): n is a, c, g, or t
  misc_feature (1330)..(1330): n is a, c, g, or t
ctgacctctggccgctattcgaagggaagggagccccctataaaacagcctacagtggacagtctggtcggcagagccgcaggtcagtcgtgaagagggagctctattgccaccatgagtttctccggcaagtaccaactgcagagccaggaaaactttgaagccttcatgaaggcaatcggagggacctagcttggaagatcaactctctggtcaccaggggtatggggaatgaaatgctcacactccaagagcaaagtcatcaaaggaggagggaatgaggaaggagagtgagcaagaaccagggtgcttacaagaggaacggttcttcaggccagaagagtgtcctttttataaattgactggcaagatagcagcaggccaggccaggtcactgtcccttcctttctgaggccacagccgatgctgctgacaagcccccagtgagtttctgtggccccttgggagacacagtgcccttctctgtccctccatgtcatgtcgtttctctcacctacctaccacggtcatgaaactcccacctctgcccatatctaaacctcagacggtttccaccaggtctgccggaagagctcatccagaaggggaaggatatcaagggggtgtcggaaatcgtgcagaatgggaagcacttcaagttcaccatcaccgctgggtccaaagtgatccaaaacgaattcacggtgggggaggaatgtgagctggagacaatgacaggggagaaagtcaagggtaggagggcatcccttctgctgtcagaactttccttggaacctggccctgggacctcattcctcaaggctcaaacctcacaattccacccacagataccatctctgaacccacctcccatgtgggagaagcagagagacaaaggcagctcttagggaagaatcttatagagaagctgctctcctcttcccagggactgtctggggggtgttccagcccctaaagtctgagctctcccatatggaggatatgggagaaccaggcatacagcaggattctaagtctcaggttctcccaggcccagtgctcctagcactaagagtcctctaagcagggcccaggagtggggcaagtgtggaagctgtgtggtgatagggagagacttcttgaaggaggtgctagcaataccagaataccagggccccagacaggtgctcagaccctgccttcaggggtggtcacaaagtctctggcttcagccaccccatctgtaaatangacagtcctcctagctgangcgtcaggcagatactctgtggacactatgtgtcatgacagtggttggctgnttgtgcanatgtgcggggatcttgcatgggtgccgttctctccttgacatct

SEQ ID NO: 98870 - DNA, 1019 bp, Homo sapiens
ccctgactcttctttgcccccagaatatgctttagggagtcacagacaacagaacactgcctcagggcgctgtcatcactctattcaaatggaaaactccgccccagcacattcccaggagagcaggggagcaggagatgagctgtcctgcagtaagtcctggccaacgccctttgataggttccatctcacctaatcctcctgtctccttcgagggaggctggatgagggattcaatagacaggttgacctgtccaagtcatcagctaataaatgttaaatccagggctcaaacccatcaagcagcaactattgcattgctgctgaaactgaggggctccttttcaccctgatgacatggtatgtcattccagcagtcttattcaagagaactggcaggggtggaggaaacatccttaaaaactcaaaagctgatgcatccactgtttttatatgcttcacagctataggaggacaattatgcactacccactgccttccaggctgtgtgcctagttgtgtccatgtacatgtatccttggtgctcaacatgtatttggtgcatagtaggtactcaatgaaattttgagaaattagattgggctggtttggatggtcttgctataacagtcattgatgtagaaaagaattcagtcaaaggcaggaggactttccaggtgaggaggagaagtgacaaagacttggcataggattttggaaaacattgccaacctttcctccggtcctacaggaaaccagacgaatttttgaattgtttcatatgccaacatatttggtgctgttttttaagcttaattttgttttttatgcttaattttgttttttacaatacaacatcagatgaacacttcataatttcttttctggctttcagaaccatgacattgggtgacattgtcttcaagagaatcagcaagagaatttaaacaagtctgcatttcatattattttagtgtgtaaaattaatgtaataaagtgaactttgttttaaaaaaaaa

SEQ ID NO: 98871 - DNA, 472 bp, Homo sapiens
ggtctctgcctccttccgcatgtggtcccagcaggctaagaacagtcgccgagggaaaatatttcttgggcgcatatttgaggagcttcctgggagtgagtcagaaggcgaatgccgtttaaaggctgcaagagaagccatgctggtgaagcggacccttccacctcgggatgtttcaggactaggctgagggcaaaggaaactgccaccacctccctacacctccccaccctccaggacccccaccccatcactgggcacacaaccccggtccagtgctcatcccaccgtgaggacgtggaggccggaaggagccgtcacacgggcctgccctgcagatgtggttgaaggagtctccacgggaatcatgactcccagagcgaggctggggcttggggcgccggggaggcagcttggatttaggagccccagtgccaagtctttgccgtgaactgttctggcccctgtgacc

SEQ ID NO: 98872 - DNA, 476 bp, Homo sapiens
ggtgtatcgcgtggttgccgctgttagcggcagtcaggcgaggagcggacgctgcaggtcggctttgtcttgggcgcatatttgaggagcttcctgggagtgagtcagaaggcgaatgccgtttaaaggctgcaagagaagccatgctggtgaagcggacccttccacctcgggatgtttcaggactaggctgagggcaaaggaaactgccaccacctccctacacctccccaccctccaggacccccaccccatcactgggcacacaaccccggtccagtgctcatcccaccgtgaggacgtggaggccggaaggagccgtcacacgggcctgccctgcagatgtggttgaaggagtctccacgggaatcatgactcccagagcgaggctggggcttggggcgccggggaggcagcttggatttaggagccccagtgccaagtctttgccgtgaactgttctggcccctgtgacc

SEQ ID NO: 98873 - DNA, 260 bp, Homo sapiens
acttttaatgttatcttctgttggaaatacccttcctgtgaagttcccctgcttgccagtgagatttggagaactgactgtggcttatgtgtgctttaatcttcagtgccttgcatagtgatgttttttgcccccacgtgaatcattcaagagttaaacaagagaaatggttcctgtcagtgcaggtgatgaaagagatcattacaacataactgaaggtcaagacaaggataaataccagcaaaatcaatagagaacga

SEQ ID NO: 98874 - DNA, 313 bp, Homo sapiens
agcgggtggcgcgtgccgagccgcgagccccaggcaggccaggtaacggcctctgcccccgcccctccctccccgctcggacttcccttacccgcacactggctccaggcagcgcccgggcggcggaggcggctgcggagacggcggggtgcgggctgagggagccgggcctggacgccccccccatcacccccgtaccccaggagctgtgcctagtccaggagaggctggggggcgccccatggaggtgagacgcggagacacctgacaccgcgaccctcacaccctcaggacctgagggaggaaggacttg

SEQ ID NO: 98875 - DNA, 447 bp, Homo sapiens
tcttcacacagtggactctctgaatgggcctgagagattctctcctgtcagagcctctacacatgctggtccttccaaaagactcatgcatctctccccactgatgctttgtccttgacctagctaatgtttccttgctgttcaggtcttagatgccatttttcaaagaagtctcctccctgacctacctcccaattcttggtaggatctcctctgatttttatgtgctcccttagtggctggaacttctctccatcacagaagttagcctcttgtaaagtcatagcccatttgcctgtctgtacctcccattagaccagaagactgctgagggtaggatagtttccagcagctagcacagtaactgacacataataaatgctcaattagtacagcttaaaaaagtactgctatataaagagttcaacagtcacagaacaacaaagc

SEQ ID NO: 98876 - DNA, 215 bp, Homo sapiens
aatacatttatcctttcccatcatgcccaattctgggaattcatcctaagatatatctgctcatcaaattaagtatgtataagattattcaaatgtagcattgcttgaagtagcagaatactacaaacaactcaaatattcgtcaatacagaatgggtgaaatgaacatgcaatacatgggggaagaccttttttccatatatagtgatatggaa

SEQ ID NO: 98877 - DNA, 163 bp, Homo sapiens
aagatgtccaacagtgggggagatgggggaaagggtacacagtggagggtgcatgggacctccctgtacatcaccctgcaacttcctgtgagtctataattatttcaaaataaaaaggtgttctaatgagggtgtagagaaatggatgttcttgctggtagta

SEQ ID NO: 98878 - DNA, 227 bp, Homo sapiens
gtgaaaatgggaagccaagaaaatagatcttctgttttctggtgaaaatatgtgcatgtgaagcattttgtttgtaacagataactttttgctttagttatgattttattagtttttatctgaactttttattgatagtgatagctggaaccatcttcagtgaaaattgattcgttgaaataaactgaaggcattccgaaggaggagggaaaaaaatacgtaaaaag

SEQ ID NO: 98879 - DNA, 551 bp, Homo sapiens
caaatctcagctattggactgagactcaggggtctatctgacttgaattgaaaatgcaaattactgaagagggagggagggaggagtgctgaagattgaatggatttatcagatttccttctcctatggcccagatgcaggcctagtccaggcgattcccctggctcagaatctgccaggctcaagcattcattgacagcctactatgtaccaatcctgggctgagtcccaacccggggatgacttagaggaggccaggatgtggcctcatgttctggttgctctcacatttaaacaggctaaacccactttgcattgtatgttaggggtggtgcttgtgggacaaagggggctgtcagaacattctggctgccacatgaagttgactttgccaggacagactgggttgtgggggaaggcagctactgtaataatttggccaagaagtgggctgagcaggagcagggctgagggagggagagagggaatgagtaagaaaggcccagggtactgatttgactgggacttcagggacaggtgtggggcgagag

SEQ ID NO: 98880 - DNA, 555 bp, Homo sapiens
acaaagaaacaaaaaccggcacatgcggttactgtgggctccagttcagacagcaccaccactagagcgtgtggcacgccgggggtcccgcagcatcctgtgagcatttccgcggggaagctgagctggttctgtgcgaagggtattcctggtgctgaataaagggtgttgctgtcaaggctgacaatttatatctgtgtgaggctggattttctttgcctactccaaccaaagcgacacatcacagcagactggatgcagaagcgtgcgtgggaatgcagctgttttccatggaaccagacgctacagagactgcaacgtgtaaaacactgccattcttttcattcctttgaataatttttttaaaatttgctatttaacacgtaatagttttttattttaaaatgaattaatacttttttttttgagatgcagtcttgctctgtcgcctaggctggagtgcagtggtgcaatctcagctcactgcaacctccaccttccagtttcaagtgattctcctgcctcagcctcctgagcagctgggattacaggcac

SEQ ID NO: 98881 - DNA, 340 bp, Homo sapiens
cctaaatagaatgctaaaagtcatgtgatgctcaatcagcaaaccagggattggcttcatcctgggaaaaagctatctgggtgcaacaagacacaagctctcaaggagtttgcaaactggaccactgttctggagttatgcaattaaacactgcacaattgcaattaaacatggacagaaaatcctcctccccgttgttcttagaacaagaataacaatgaagttaaaagccacctggaagggcccctcctcacccttgttctctcagtttcactcttagtcctcctgaggcccacagcaccactgctgtcagccagcctcttggcaggttgataggtga

SEQ ID NO: 98882 - DNA, 373 bp, Homo sapiens
actcttttatattatgacagacaagccaatcctgcctgagcttttctgccaacacattagcattcatttctttcaaattgaagaactccttttggcattttttataaggcagctctggtgttgatgaattccctcagcttctatttgtctgggaaagtctttatctgtctttcatgtttgaaggatattgttaggtacagtattcttggatagcagttttctttcttcaaaactttgaatatagcatcccagtctatcctgaccttcaagatttctgctgataaatctactgaaagccatataggagctccattgaatatgatatgattcttttcttttgatgctttgaatatttcttctttgtccttgattt

SEQ ID NO: 98883 - DNA, 438 bp, Homo sapiens
aactaatatataaactcacttttagaaaggctgttaactatcaaagtgtctcataaatggacacatatttatgtgttatatgtaagttactttttcagtgttcatgatcaggattgattttctataatcagtattttcaacatttattaaaagcttctatttatgtatacacatttaactccaaagtattttaatacactttggtagtcttatgacttagtctatcttatattatgttcactgctttggcattcagtcaattttaaaagcatgtttctatttcatgtttctttttggcatattttacaaaaagtaatatgtagaattataaataaaggatgaggcctcggtctgtagagaatttaccttttcttttgttcttgcttggaaacacattattttacatgggtttatgttgctttgatttcagtagtttta

SEQ ID NO: 98884 - DNA, 608 bp, Homo sapiens
cgcacattacaaatggaaaggcggcgcgtggagggaactcaaggcctgattggttcgtcctaagcaggacgcgacagggttggcagggcaaccggccttcggttagtgccttcagtgggtgccttcagttggtggcattcggttgcctttcctggggagaggtggcaggtgctctactctgcagtcgtgggggcaagcgaaggcccaagctgccggagaagagcagagttgccccatggggaccacgatgacttgtcacatgtgcaccaaagccagccccaggcagggcctgcgcagggcttctgcggagccgttctgcggctctgacatctatgagtgggcagccagcaaaggcgcaggccccagcacagaggagcagaggcgcccggaacacgctgtcccccaatgccagccccaagctgggccaacactgggtgcagtgttgggagcagtcctgcagctctgagatccactagttggaggtgggagaagtgccagattccactgatttgaaacctgcccagcctgattccggagccgtgacttacagcacattggctaccagaagacgcccaaaggtagggaggagacagttcgctttcctatcc

SEQ ID NO: 98885 - DNA, 197 bp, Homo sapiens
tgctgggattacaggcgtgagccaccgcgcccagtctagaaaatcttttaattctccacttaatacatttatgaacttatgtcatcatctcaatagattaaaaagaacctcaataatactcatcattttaaaaaagaagaaaaactcctaacatatcgagaataggggagaatttctttaacctaataaagagtaac

SEQ ID NO: 98886 - DNA, 248 bp, Homo sapiens
ttcatggtctctacttactcatgtcccccattaaactataaagcctctactgcctaatgtcggcctctaatctctactgaaactgctcttgccaaatgaaaatgacagggacaatttctactctttaaatgacctctaggtggcactggacatagttaataattttctcaatcacacttcctccctggatcctgtctctctttggttttccagtgcgctctcttttgctgttttttcttaaggtctgc

SEQ ID NO: 98887 - DNA, 350 bp, Homo sapiens
ttgacaagtaagtgtatatatttaaggtgtacaatgtgatgctttgatacatacagtgtgaaatgattaccacagttaggtttaataattaacatatccatcatctcacataggtatgatttcttatgtgtgtggcgagaatcctgaaaatcaactctgagcacatttcaagtgtacaatacagtatttatgatagtcaccatgctgttaatcagattgcctaccttggttaaagtgcagactcaggtgaaggtctggatggaggatcatactttaattgatttagactctaaaataaatgtatatagttatttttgctaacctaagaacctactcataaatggctagtg

SEQ ID NO: 98888 - DNA, 199 bp, Homo sapiens
tgggagggaaaaggggctaagaacagagtggagcggcttctgtgatggaggcttggtgttcacgtcactttggaatagtgtcctggtattggggaaaacatcttgcagtccgctttgatagaatttcagccagaattccttcctgttcagtttatcctcagcgcgtcttcccttctgactcctcccccagcagagcctc

SEQ ID NO: 98889 - DNA, 894 bp, Homo sapiens
tcattgaaaagcagtgaaacactttttttttaattgaaggtgagaaccaaaaggaagtttaaagaatattccaagtgagcagagggggtggcgggatcacccaaaaatgctactttgtggttatggtcattataagcataaaatatatctaaaatacttgaaagttatcactttaataaaacaacaaagagatagaaaaagccttgctgaagcaagggaggctgatgtgcacaggacgaacagaagtgaagtgaggaagaacaagggaaacttcgtggcccaggcccgcgtgcatgcctagctgggtttaccacccccgcgagggccccatgccacgcgtggacaccgtcagcccagtggccagagcctggctgggtttaccacccctgcaagggcctcatgccacacatggacaccgtcgggccagcggccagagcctggctgggtttaccacccccatgagggccttgtgccacacatggacactgttggcccagaggccagagctccccaaagccagggctgctgcctggagaacagttacccttggggtgggagcggtacctcccacgagctgcaatgggactgtgtgtgccgccggcacctggcattgcgcattctgcgtgtgtcccaggaggaccctgtgcggagactgttccacactttccacatttgcttctcctgcgagtcgcaatgggactgcgtgtgccgctggcccctggcattgccaattgcgggtttgtgccaggaggaccctgtgtggggactgttccacactttccacatttgcttctctggtagcaggtgagctccgggattccgtcagcgctacctccgcgggtcccctgaagttatattttattatttgtatcaaacttgtctgtatatttaact

SEQ ID NO: 98890 - DNA, 242 bp, Homo sapiens
ggtcacaatttaaattcacaaccactaatctcaagtaccccaagtactacctggccatcctactatacttcgagtccactcttccaccctcctagctgaccacttcacaccttcccctctctcccaaactagcagcacatcctccctcttcttcactcccaccttgcttctgattccaccaaggaaacaggagcaatcctaaaaactcccacgtgattgctcctcccactgcttctgccacc

SEQ ID NO: 98891 - DNA, 322 bp, Homo sapiens
ttactattgttatccttattatttcctagaagatgactactcaaactgaaacaatcaatataattatctcaaagacagccttgaggaaagaataaaaattttcctcaatttcctgacataagctacacagggggaggtagcattggccagcgttgcacacacagggctgggcctcagccctggctccaccatgtgctagctgtgtcacgtcaaggcggaacctcggctctaccttgtctacattgttccaggataacacgttcgcgagggataacacgttcgcgagagataacacgttcgcgagggataacacgttcgcgag

SEQ ID NO: 98892 - DNA, 600 bp, Homo sapiens
ggcccgagaggcggcctcaggttaacttcaagcatgttgggctctccaggagggagaagaggcacctttgccgtgggttgaggactcctagaaccaacctgagactccgcggccatatacaccttacgacgtgtgtgtgtgtggcgggagatgggaggggaggaatcctgtagaacccagatcccatcattccagcaactgccagagcgttcgagaatgtcatgtctgtacctgtcttctctcatcttttgtgccaactgttttatcaaacttctaccccactttaggtcttccagtagatacctgaaaccctgaactacaatatatgtgaaatacagtgaatggcagaaatactttgataaaagatgtaaatgcctaccgactgcagaagacaacatcaacaaagcacacttcacaaaaagtacaacacaaatatactgcccaggttctaaaacatgtataagagttaacaaaatcagctgaggttgagcagaaattgtataggaaaaaataggaaaaacacagagaccaatctcagctgcaagaaggttcagctagacactgcaagcaaaagtataactcctgaaggtaagagacata

SEQ ID NO: 98893 - DNA, 408 bp, Homo sapiens
tgtttttttcccgaggtttaatagaggtgatgtcttcaaggtgctgggaggcctatcacaggtcgcctacgttgaccactgtcactggactaagctttcatgaaagctgcaatccctgctacaaatccctgaagtgccaaccttgccaagagggactgagaaagagacaagaggcaggatgtagggccctgggttctgagccatgttgctgcagagactggggttcaagtcctggtgctgctgtttcttggctgtgtgatcttagacaagtacttaacctctctgatccctcacttcctttgctgtgagagtgatatcgatggttattaattcacaggcttggcttgaggattaaaggacctttttagggtgcttgacacagaagttgaatctttgtgggcactcaat

SEQ ID NO: 98894 - DNA, 498 bp, Homo sapiens
ttaacatttactgtaaatttttattgtgcttaatgcctactgactgcatcttgtcataggaatctcctactggctctcctgcctcacccagatttgccaccaaattgtttatgttcactctttttcccatcttctatagactcccctgattatgttcatgctccccaagtctgaagcccctaaacttcacttctagtctgagttataaacctccaaaatatgttaagattacatttatttatagaggatgcacataatgaagatagcctttcgtaattaatcaggctacttaacatctcactctgaagcatttgcatttggatttccaaagttcggagtccccccaaagaaaatgagtatcaccacagtgatccttccaaagcaacaatccacctgaacgacaaactccatcattaggtggagctttagatccacaagatacaaatagtggtcaggatttcaccttccacaaaccaagggtagagaaatactgagttc

SEQ ID NO: 98895 - DNA, 163 bp, Homo sapiens
atgtgggccactaggcaaaagcatacattcaaaaaaaaattcctgtatttcccacagtatgagaaggtgcacaaatggagatagctggtcctacaaattctagggccctaaatagaacattcaaaagtctacttgggacattgattgcaaaggtggaggaaaa

SEQ ID NO: 98896 - DNA, 311 bp, Homo sapiens
gacgctaaagagaccttgaagagggtacaagacagggagaggcaggcttggccagggctgtctcgtgggaagttggctaaaaagccatcgaacacttccaggacaggaatagctcagccctggagaagactctggagagggaaagactcaaaaatgcccacatctgataccttcagtaagcaagcctttttgagtgcctactggctgccagacattgagggtatctaaggatgaatgatgttcatctggccttcaaaatgctagtggcagcagaggggaaaggcatgaaaacagataaggacataacgggg

SEQ ID NO: 98897 - DNA, 381 bp, Homo sapiens
ttgccttccctccctaacgtggtggtgttggtgttggtatgaccagcgtgcacacacagaagcacgtacaattacagagacaaacacgagagacacagacctgcaagcacacagagatacccaacacaaaccgctatacaacgtacatcagtccccctttatccgaggtttcactttttgaggtttcagttacacttggtctaaaaatatttcaatggaaaattccagatataactcctaagttttaaattgcatgccgttctgagtactgtgatgaaacctcatgccatcccactctggttggcctagaacgtgaatcccccctttgtccagcatctcagtgctgtatctgatacctgtctgtaagtcacttagctatca

SEQ ID NO: 98898 - DNA, 1276 bp, Homo sapiens
  misc_feature (1048)..(1048): n is a, c, g, or t
gtgcggctaggcgcgagctctgcgggagctcagcccccgggagagacccggcagcggcgcggcgaggacggcggcgcggcgaggacggcggggaccggggcagcccctgctcccgtggccagtgagataagtcgggtggagagtggcttgtgatacttggagtgtgcactaaccgtatccagtattgctcgaatgcgatgctaaggaaatgcttgtattaccacggtaatatgggttctttttccacgggtttgtggagtgaggcccacgagctggctcgtgtccgaaaccgagatggctccgtgtattagataccaatcatgggtgtggccttctctgttttatccacgccaggggggtgacccaccgctttacttctaaactggtattttcaaccggcttttgcaccttgtcaagtttttttatacggccattggagaccgaaaacttacaggtcccgaaactgtgcggccggggcggtcggtccgtgtctgcgcatttcaaaccgtctccggtgggttaattttcccccaaggcgaccgcgtttgtgtgggggaatcagccccgtaagggggcggtgcggttggaagttcaacacgcattgaacgcgattccacggtgagagttatccggaagtaagcgcgaggacaccttggggttgaataaccatacattggggggagaaaaaactccgcttgattcattctttaacgacaaagggttagctaggcagagagtttaggccccaacggtcggtttgagttcggcgcaggggatcaggcctcgttggttaaacgtccctcgaaggcgtacccattaagcggagatgtggctttgaaggggccccatcgaggaacatttgtggcgtagggacaaccgcgttggggaacgggccggcgcagaggtttttgcaaccggtggaagggcccaaattgcgaattcaacccatggcgagtttgggccaaccgtgccacgatgggcccctatggttgcgcgggaatccattacggaaggtttggaaaggaaaccttcccccgggttccttttnaaagagaaatagtcagtagaaaaagattattataaggaacagcgaaagtataagaaagtggtttgctggagcagcgagagagaaataattaaagtaggacgggtggtgtgtgagtaggtgagagaaaaaaacagggtggtggtttaatatatgaaaagagcgtggggggccctatgtttgtgggcccacccaacaagagatattattttttgtagtaagagaagacgg

SEQ ID NO: 98899 - DNA, 449 bp, Homo sapiens
gtgatagaagcttcagtgcacatatactatgctatcaataattcatatatgaacataatcgattttagtatttaattattgctaaatctccaccctcaaagagattacaatctagtctgaaagattttaacggtggccatgtcttacaggatcttacattcccagcacattatggatctggcacacagaagattctaacaatcaacattcatagaaatgttggttgagtgaataaataagtgaatgaattatgatttgggaggaaattgtgtagtaggtttataaattatcatcttttcaacacttaaaaaaatattcattattaatttgttggaatgatgaatgggcagggactttaaatgaattaatgtgacaagctgagttttccggaaagaaactgaaaaatggatgggccttttgggttaatttccactgccctgtctgtttta

SEQ ID NO: 98900 - DNA, 859 bp, Homo sapiens
catagctgaaacgactctcttaatcttccaccgctacacgagattagaggacacattattcgtgggtcgggaggaattcaatgaatcatgaagaaaagataatttataaagaatatgtattaagcatctaccacgtgccatgggaagtgctggtgtaaccaggaagatgaagaaaaaaatgcacatggtaaccaaccccaggggtttacagtccgatgagggagaccgacaaaacaccaagcaaatgtagaagtggtggtcagtgacttcaagtaaaagtaaaggagatggatgtgatgaaagacagtaacagaagttatatttcagacaggttgttcagggagggcctctgaggaagtgatatttcagtggaagcctggagggtgagaagatgatgggtaggtggagagttgggagaagaacaatcaaagccaaaggaacagcgtgggcacgcctgaggctgaagagcacccgcatggagaaacccaaaaggctgatgtgcccactggatagtgaaggagggagaagaaggtgtgagatgaaattggagaatggggaaaggcagtaacctaaatgactgcccacagtttgtacttgaaaacttcgcattgatttcaatcctgaacgtcttgtgatctggagttcccattggatttttggttataatgagtcagtgcatcaagagtaccttgaggccgttactggggtgggccttaaatgagcacacagagatgctatgcacatagtgagtatgtatgtatagagacgggatctcattctgttgtccactgcactccagcctgggtgacagagcaagactttctcaaaaaaaaataaaataaaattcagaaattacgat

SEQ ID NO: 98901 - DNA, 251 bp, Homo sapiens
ccgtgtgcttaagaaacgcccacacatacacaaggtagggagccacactgctcatcgcagaatccttcacgcgcctccacggggagaagtccacccgcacacaccaacgcctgcccaggtcaggcctggacaccagctctctgggtctctccaggaggtggtagagccataccccaagtttcagccatgtagttggctgggccttcaggctctctggggtgactggcactcaggaacaatactccagggac

SEQ ID NO: 98902 - DNA, 442 bp, Homo sapiens
gaaagacaacttcaaaatgatcaaaagcttttgatatttcgacttgcgtttgccccacttgccactgccctcccttgtgtgacagcagtagtgggaagagggaagcccacactcccagcatgagactctcattcctccttccagagggagcagagcagactttatttgtagatgatagtgtatgtccgctctaagctgtctgggagccacctgaaggacaaggtgctcatctctggtcttcctgcctcggaactcaggctggaaaagtggtggcactgctcaaaaacactgcaagccaaactaacaaaccacagatgtctgttccaaagattacaatcaaaacacacaatagacggcctaaggctcaggagcaaaagctggggagagtttcctggggaaattagaagcacctgcatgcatagggggatttataaacacaggg

SEQ ID NO: 98903 - DNA, 560 bp, Homo sapiens
gcctatctccacctgatccccaagaggatggtgtcctctcagaggacagtggggccccaggagcctcctgcgctgcccagctgggggtgcatgcagggcctggggagaggcggtgtcctgtggaaggctcctgggaggcgctgtcagagtctcactctcagacttcctcccgccgctgtgggaggcctggctgtgcccgcgacgtgtgtggcacagcgggctgggttgcaaaatatatctggcatggcagttggtgaagtagttatgcaaccaccaccaacttacggaaaccaccgagcgatgtgccttgctagcagaggtgcctggcttggccacgctggccacagactctggttccgtgttggcagtgtgaaaagtggcccaggctgtggagtgtcgagaaccatgacaggtcttccctgaagtcaccctgggagcacatgacccacgagaccccggcagagctggcatcttctcctccaaggatctccttcccattctacagaatccagaagacagcctcatctggttatcagcagccgatcctccctaggaggccc

SEQ ID NO: 98904 - DNA, 472 bp, Homo sapiens
tgaacttttttgctgcaattgttgagcgtcaaaggctgaaaccactattatcaccactattactgccctcctctctgcatttgaacaccctgctgcatcctgcatcttgcctcttcctttatacttgctgctttggatgaggtcccatgtatcatcctcagcccgggattttcaggctcctagaagacatttcctcttactgaggcatggacacgtgcaattgcagccaaaggtgaattggttgtcaggtgttccttcaacttggctcctctctgccctctcactgcctcctgccatctaatcagctctacttatctgccccttagagggaccatctcttcagttattagccattcttgtgtacacacaacctgctggttttcacttccttgtatttgctcagacagttttttccactaagaaggcagatgcctcaaaacccagatggacactgcctttcagaagctctgcc

SEQ ID NO: 98905 - DNA, 463 bp, Homo sapiens
gataatttgttactgtgtgcatgttctattagtactgtaagcccctttatacaaaggatgcgtttaatttttatattcccattatgtctgttacctagcattgccaagaatacaatagaggctcattaaaatcttgaatgtatgatcagtgtatgttgttgccagcacaccctcccaactctcccattagatgacaagcaatttgaggggagcacccaagtatttgtcatttttaaattcttctctctttcacactcaacacagtgccacaggtatagtaggcgtgtgtgttgaaggtttttaagagcattcccactttgggggatttgttagaaggactcacaggactcagaatatcatttcactaatggcgaagatttattacagtgacatagtagagatgcacagccagatcataggggaaaagatacaggcggagtttggaggaatctactggtgggct

SEQ ID NO: 98906 - DNA, 732 bp, Homo sapiens
gcatttagtcggctggaaccttgcagcgtcccacgcagcaatcaacctgatcggcagtgaggcagagcttcacactctccacctggctgaggctggaaactgatgacagacctggctgactcccagcgtctctaatgaatggatgcctggagaaactctgacctccataaagccagaggaaggggaaggggtgtcatcaggacttcagacacaaatcccctcctactccctacttcaagaccagataataattgctttgactgtaaattgagcttttctttttttttttttgagacagagtctcactctgtcgctaggttggcgtgcaatggcatgatgtcagctcactgcaacctctgcctctcaggttcaagcgattcccctgcctcagcctcctgagtagctgggactacaggcacgtgccactatgcccggctaattttttgtattttagtagagacggggttttaccacgttgaccaggatggtctcaatctcctgacctcgtgatccgcctgcctcagcttctcaaagtgctgggattacaggcatgagccactgtgcccagccccaaattgagcttttcaatctgctttcactagtataagctagagctccaagcagaaaggaaaacaagcaagacagaattgttgttagagatcagttagagatcggctattagagatcagtggcttaacaaattagggtttcaacaatacctatttccaattc

SEQ ID NO: 98907 - DNA, 385 bp, Homo sapiens
gcatttagtcggctggaaccttgcagcgtcccacgcagcaatcaacctgatcggcagtgaggcagagcttcacactctccacctggctgaggctggaaactgatgacagacctggctgactcccagcgtctctaatgaatggatgcctggagaaactctgacctccataaagccagaggaaggggaaggggtgtcatcaggacttcagacacaaatcccctcctactccctacttcaagaccagataataattgctttgactgtaaattgagcttttctttttttttttttgagacagagtctcactctgtcgctaggttggcgtgcaatggcatgatgtcagctcactccactccagcctgggtgacattgcgacactttgtca

SEQ ID NO: 98908 - DNA, 421 bp, Homo sapiens
cagagcatgagagggttcctgaatcgtgccaggactggtgccccagccttgcagctggtgagctgtggacccaaggttttgtgccacgtgtgtctggctctagaacacagtgacagagcgtgggtccacacacttgcacacgtgcatgcatgttctaacagtggagcttcgggcaacaagatggtccacagggaggtgtttttcactcaggcagcgtcaaatcccaccacagaggagccatttacactttgcccttctctgaaatctgcaggttttaaaaatctgagctttcaaaggcagctgtgctgagtgggaagggcaagtgctttggacaaaagtcaggctgagggccctcgggtgccagctccaccacctactcagacaggcagcggcctgccctgactccgtttcccctttgcta

SEQ ID NO: 98909 - DNA, 326 bp, Homo sapiens
ggtatatgtgcccaggctggtctcgaactcctgagctcaagcaatccacccaacttaacctcccagagtgctgggattacaggtgtgagccaccgcgcccggcctgattagttcttttaatttaaaaaatactgaattctatcttgcgttatctttcaaaagacggtgattataattcttctataatctctgttgtaaattctgattcctcaagtgggggttctcttggacttgacacctcctgtttgtgacttttttttcctctcagatttagctttttcccccaccagggtgtctccatctttgtttctgtcatagtgtctcag

SEQ ID NO: 98910 - DNA, 636 bp, Homo sapiens
tccagcctgggcgacagcaagactccgtctcaaaaacaaaaacaaaaacaaaaaccctgatctttcacttcgggcctgacagcagcttgactggaagtttgctcccgcagttctgagattctggccttttcttttgtcccattggtactttttgctgccagggtttcctgtccttcaggtttccatccccaatcagttgagagtccgactggagtacccaaggtgcgttgaggaatgaggcacagccctgggcttaactcatccagcctggccagctcagccttcccctgtcaggtgggagcctaggattgctgtcagcccagggagcagagttggaagaagggggcagggccctacctaggctgcggcccatcggggcagcctgcgctggtggcttcggaaggccctggtttgaggatgggtgcggcaggaacagcctgaagatagtggatggagaaggtacctgaggtgttgggagctctgctggtgagctgggcccttcacgtcaatgttagaggttgttacgtgctaggcgctgttcaagcactgggaattagctaaacaaaatgaccattactgtcatggagctcacccctagttgagaaaaataagccgaatcacacggcaagtgctagg

SEQ ID NO: 98911 - DNA, 792 bp, Homo sapiens
ggaactgctttcctcattatgatacccctgcatggaacagcacctggagagtaggtgttcaataaatcctcacttagaggttgagtacctactatgtacaagcaccatgcttggacttctcagcgtgtcttgctgaactagacacatctgctgtctttgtttgttcaagctgctttaacaaaagaccaaagagtgggtaatttataaagaacagaaatttcgagcttacagtcctggggtctgggaggttaatgaccaaggcactaacaggttcagtgtttggtgagggcatagtctctacttccaagatggcaccttgttgctgcattctccagaggggatgaacactgcttctcatatgggaagagatggaagggcaaaaatggacctatctagttactcccatcccttttataaggtcactaacccatttataaagttatatggtttggaagtcccacccaaatctcatattgaaatgtaatccccagtgttggaggtggggcctggtgggtggtgactggattatggggatggttttctcatgaatggtttagtaccatcctcttggtactgtccttgagatagtgagttctcacgagatctggtcctttaaaagcgtatggcacctcccgcctcactgtcttgctcctgctcccaccatgtgagacgcctgctcccccgtgaactcccaccatgactgtaagcttcctgaggcctacccagaaatagatgcccgtgttatgcttcctgtacagtgtgcagaaccatgagctaattaaacatcttttc
